United States Patent Application Publication US 2007/0237770 A1 - sequence listing, part 6

SEQ ID NO: 511 - DNA, 58687 bp, Mus musculus
  misc_feature (1)...(58687): n = A,T,C or G
cttgatccagtcaccctactctcccctgaggactcccacttttgcacttactctttgctccccacttttagtcacctgtcagatgctctcattgctgaggcctctaactgggtcattggtgggacctctttttcaaggatttatttttattatctataattgtgtgtaggtgtgtgtgtgtatgtgtgtttgtgtgtgtgtgtgtgtgtgtgtgtgtgtgtgtatacaagtgcccatggaggcctgaggcattagatcccctacaggtgtagtttcagatggctatgagccacctgacatggggtctgggaactgaactctgggcctttggaagagcagcaagtactcttagccattgagccatcgtctctccagcaccatgggaggagctcttttaaagaattccatcaaattgcaggttgtgacactgtcacagatgatactactgaagaacttcaatctttctcttcccccttcctaccacctcacagcatgcagaactcattgctcttctctggcactcgaattagcatgaaaatgaaggctaacagctacctcagttccaaattcctaattctggtgccacaatttggtaagagagagaggctctccgcacttcccagagcactgctgtcattcatgacaaagaccttcaagctgcctggctgtctctggctgcagcaatcctctactgcacaggccagatagccaaaggcaactctccgcagctgacaccctcattaaacaggtaacactggtctccgccctgcatacttccagtcctctggagtctgctcacccagagcctgcctttttttattgttcactttctcatctttccagtccttgttctttttcaacctatccacctcccatgtgtgtatgtctggtggtggtgggggaatgggtcaagccatcctcaaagactcttgggaatcccatcacctccttttctgttcaagaatgggccctcctttccaccctacatgatgtgggatgtcagcttctgctcaccttatccaagacctatctctactccccagccttgtcacagaccttccacaccatgcccccttcctcactcaccaagccccaggacatctgctgggacagaactagcagatggacttcccccacatgctatcctctcggtctctgctccgctggttgacactcttccagggcaggcggagaggctttccccactaggtctgagaggacacagaggctgctcatatctttctatttcaagtcaccccttgctttggtctgttttcatctccactgtctgacaatggacctgtgtgtgtgtcttatttctaaggtaactcaacccttgactacctccttagtcatcaaaccctggtttcacattccctatagacctcagtcctcagggctggcggaccatggtaatgcttttctcaacacttagctcgtggttgacgtcaaactgtcctggtcagctcttctactgttctctctttctttttttcaggttctctccaggaaagcccgttgatctcagcctcctaaggctcaagcacagctggttcgtcaccaccttctcactggcacttcattcccatttctggatgcacggactgcttcacatcttaccaccttctgccttcatttggctcacaaacaccttcctaaactcatcctgagtcttccggaaagggacctgcccaggtaggtcactgtgaccaccccagcagtagcaaaggtaaaggaatctctcactggctgcactactctgagctccaaagggctccaggcactaactcaaaaactcttaatcctgtttggtgacactcccccatctatgtttcttctttcccaggtctgacctctcacctcataacctgagagcctacagccaccctgtctttaccagccacctttgaacaccccaactgagcaagtttcaggactcaaggatccactcgaccaacgtctcggcaccccgcactactgctggccattcccaaagcaccatgacaggcttttgggtcctctgtttcgtccttttcccctcctccttatcctatccggaaagctggatgccccttgtaaacctcactcaccacatcctacgtgataccaactcttccctgttttccaactgttgggtctgcttgtctacccaaacccagcggtccttagcagtcccagcccctctgtccatttggacagatacacccatgaagcttcatcttacctactcagtcaggcccttctctggctccttttccattagcgacattgaaagacgcctccgtctcttccgcccactgactgcctcctattctttccacaatcctgacagaagggcgattgcttttcttcaactcgtcagctcaacaggcatatttcggatcatcacccggataacctctgtgatatatccccataaggaccgtttcttcgaatctgcccaacgccctctctggggaccactctttactgagaccgtgctcaggtcgcaggccccactctgcatatctcgctttttcaaggtctcagcatatgccacttttgtaggcaacctctctgcctctctctgcaactacaccatgcatatttcaccttctaccagtcatgaaaacctagatctttccaccacccatacgttcaaacaggcaatgaaaagaccggatgccaaatggaaaaacccgctccgtttttccgggcccccctccctcatcttctcgaagccggcttactatccctgcccaacagacatcaaacactgccatacctctccggccactccctggatgcactgtcctcaggctcccttcggcacctgctataacctcactttatttgaaccagacaactcaacccaccctgttaccatgtcagtgaaccctacccacttcaaggtcaaactccaggggcacagagacccctatccgctctcccattaccagcccctcacgggagctgccctgtctggacaatattcagtctgggagaacgagatcactgtccaagaaaactgggacatcacctccaacattttctcacatcttctcagcttctcgtacgccttctgcctcaactcttcaggcgttttcttcctctgcggaacatcgacttacatctgcctcccagccaattggtccggtgtctgtaccctggtcttccaatacccggatattgaacttctccccaataaccaaacggtgcctgttcccctttttgcttcagttctttcctcagactcagttcttcgcccaaagaggtcccctcacctctttcccttccttgcaggcctgggtatctcttctgcccttggtacggggatagctggcttggccacctcgactctctatttccaacagctttctaaggttctttccgaaaccttggaagaaatagctgcctctatcactaccctccagaaccaaatagactcgctcgcaggtgttgttctacaaaaccgccgagctctggacctcatcactgctgagaaagggggcacctgtctcttcctccaggaagagtgctgcttctacgtaaaccagtctggaatagtccgggacgcggcaaggaaactccaagaacgagcatctgaactcggccagcattctgactcttggggacagtggcctgaccttggacgttggttgccctggctgactccctttctgggacctcttctcttcctcttcttcctactgacatttgggtcttgtcttctgaactgcctaacccgttttgtgtcccagagacttggctcctttgttcaagacactgccaaaaggcatgtggacagcatcctccaaaatttccaatataaaaaactgccccaagactccccagatgaggacaccattcctacataacagggaaaagttgagagagcaccaagtataccctcccttctacccagttaatagaatccaagtcgggagacttagttatggcctcatgtttgtatcagggttaattccagaaactatagtaatttggcatccagaaaatttcttctttttctagatctgagctccttctgctccttctagatcttctccttatcagtagcccccatctcagacatggcctctggagttgtttcacctgacattctttaatccatcactcaccttgctgcttagctactcttagcaatggccaaagaaggaatgttttcagtgccctgcctgtaggtggagagtgggctctcttatacagagatctctgctcccaggcctgtgctgccagggagtggcttgttcctccgttgtctttcttgctttctgacctcatacgaagaacattgaggtgtcagggagcttccagaagctggaagggggccagcaaggattctctatgacagctttgagagagagagagagagagggagagagagagagagagattattttttttaaataaagtttttacagcatcatcgtatctttttttttttaagatttatttatttattatatgtaagtacactgtagctgtcttcagacactccagaagagggcttcagatcttgttacagatggttgtgagccaccatgtggttgctgggatttgaactccggaccttcagaagagcagtcgggtgctcttacccactgagccatcttaccagcccgagagagagattattatccccttaaccttagactgtacccttcagaagatattataaatatgtagtttcaagctgtcagcatagcagcactttggtactgtagatccaagactcatgaatcaactctgatccgtagatgtggtagaatatttaggtggagctcttctggagcacatgaacaaggtgtggagagcacaggctggggtaggatgtacgactgagctgggcctggtaactgggatgggcaagaggaccacagggaagggagggaaggagagaaaggagaagtcaagggatgaaagagtggatggcgagagaggattccagaggtaagagcaagacgttcatgctggagatgttaccagagttgttaggggcagagctgggaccctggcagccatagcaagctaggcttgaccacctgtcctcaacaagccaatcattgtcacacttaatagtgaagaacagaaagaaaacacttatccaatgtggccacactggaaaaaagaaggaagaagtctgtggagcccctctctcacaaagtccacgctctgggtcctgacatgaggtttgggtttaaatagaaagcaagagacaggcataaggaagcagacctgtccaagaccccgcccttcctaccatcattgttccagtctggtctcttctgcaagggactgtctgacacatgatcagagttgtgtgtaatctcttcctgagaggtaagctcctcctaacaggccccagccttctccaattccagatggaattctcaactctaacccctgcctgtcactgcctgcattcaaagaaagcccagtaaactgaggtagttctgtcccacctcttcatttgtctctgtttcttattctgtgtcctggggaaagttatctccaagggaaacttatcccacaggtcaagagtctataaacagtactgtccttggaaaagcaagggattctgggattataaggacaaatatgtgcagttgtgaggactggatatgtttagaggtgcttgtgatctctcatatatatacttgagttaaaattagctggcacatgcatgctctcattctcaatgtactggtgtgttttgtttattatgtggtttcgtatccatggccatagccttcaaaagaagtaggccaatccagaggccagagccccattgtcagtaaatgggggaaccagagctggcacaggcctctgagccaaagttagaggctgtgcaccctgcatgctcagtaacttcctctttctaagctaagcttggcttccagttgacctgaggcagatggcatgctgacatttttgggccttcaacagtcaggaacttaaatgcaagactccagcagaatcagcagcctgtgtctctggacctgaccctggagagaatattgtcacctcagcagccagtcttttgttcctgaatttctgggctcctgtctttcaaagaaaaagcagctttcccctgtgcagggtgtgtctaaaacacagggttctagaactggaatgtggaccttgtcccaacaggctttcctccggaagtgggggtggggtggggtgggggcagggctgactgttgaattgccatggccaggagcgagtcctccaccatcgggcccttctactgctatacatggcattgttggaggcgtggagagccaactccaagctaggtctctgaggataattcacagatgcacacagccaagatggtttctcaaggaaaacagttaactctctcacatccctgagggtcagggatcaagaggccatatatgacactaccgtgaagggtttgggaggctgccatcaaagactcccaacaagcatatgcctggtggccagacactgcaatgctattgctgagggaagccactctcctccccaacacaccgaccctcctgtctgcagcctttccagggagcaagaaaacagtgagcagaagaagacagctctggttgcacttctgctttctggatctctccagttctatctattggcagagcagcacatctagacccctggctgcaggcatgtcttagaaatgtggcccttgcaatccactgagtgtgacatagacattgagcacacagtccaccctagagagaggtagaaaaaaatgctgaacacttgttgtaaacccaacacaaatctgcagttgggcctgacttgaattcttttcatgttttgattttttttaatatttatttttgtatgtatttcacatataagtactgtatttatataatttccccttcttctcctccctccaactcttgagttctttgctacacatactcctcaaattcatggcctcttcttcctctttttttaaataaaagatttacttatctgtgtattttatgtatacaggttctttgtctttgtgtacatctgaataccagaaaaggacatcagatcctgttgtagggagctgtgggttgcacgtgagtgctgagaatctaacttagggcctgtggaagagcatccaggactccttaccattgaatcatctctctagcccctggcctcttattctttattattgttacacatatacatatgcatttataaatacatcctctgagataactgagtgttgctcatatgtggttaggaatgacctcttgggattggatagcctatcagggggctcatcccaggagaagactaattcttggtttcctagcaactattaattgcccatcgttctccatctaggggtggagccttgtgagaattcccccacccatgcggtcatgtctataggtgctgtcatttttcaggtcttgtttcgtcaacaacatggttgccattccctgggtgctgcttccctgtcgtatagaagacatggtcccccagcagatgttctggtcctctggtttttataatctttctgtcccctctacctctatgttatgtgaaccttaggagttggggttgtgttgtagatgtatcagttggggttgggttccccgtggtccgtggtctgttgttctttgcagtttgacaagctgtggctttctgtaaccgtctctgtctgcttcaaagggaagcttctttgatggggggtgagagttacaccataatgattttttttaaagaaaaatctaaaaatcttcgaactccaaagattatagtcatatgcacatttgtaagaacctttaatttaaaaaaataaatttaaaatttccaagaatagtcactgatacattgaatcccttccaccaatgccattgttgccaacctcagatggtttccccatccactaacatgtgacatataagtccttttatttcgaaatcacagaaataatgtattaactgaaacctgaaaaaaaattagttgcctgtaatcccattactatcgcaagttgtttcacttttctttctgtacacagaaattttttttgtgtgtaatggccccataattgtgctttgctttcctgacccagccgtgtatgaatcatttcctctgtgattgcctaatagaaccacagtttttatggggtgtgtaatatttcacccaacacacattctttcttcatttcccctcttaccgaatgtttagacagtttgtaagtatttgctactacaaataatgctttcaaaaaagctttatgtgtgtatcttgggtcttcatgtcccaaatccagaagtgggacggggaggggggggtccatatgtattgaagactttcatttttgtatgtacgagacagagtctcacactgagctcaggatggtctggaacccactgcacaacacaaactggcctcacactagttgtaatccccttgcctcagattcttagttgctggtgtgaatatcaacaacttctgatcaacagtttttaaaaacaccacctttgtcaaaagtggagctttgtttctgtcacctttgttagacagtgacctgatatctactttcatagtcccaggattcacctggaagctactaggacagctacaaacactggaaaaatgatgcccttgccctccacacctttatcatcttctgctgaatccccgagggctgcttgagatggctaacctggcgcttggcaggcacagtgtctgcaggatccttcccagccccgcatatctcattgcccagccttgctgctcagaagtctttacctaatcgaaggaggccctggcactaaatgcatccaaggacagagcggcccacaaacaggcagacctctgcgttttgatttctagttttaatcgcagatggagcaaggcaatactaagttaaaataaagcatcccggactctaattcattgaagggctcagcagggatggttttaaaagaacagctttagaagataggcagtgttgcaaagctttattcagttcacttgagcactcttgctgtgacatcagctaaagatcttacaaaccccaagtaaatgtcccagggagctgcttagtgaagggttctgtccctgctacgattgtcttggtctatccaggacagggtggacttggatcttcagagaacaagagcagcatacacttagctcttcgttgttttcagaagagaaacacacttcccaatctccaagattattcccaagcaaagctgactagaagcggggaccttgagtgttaactgttcattccctggaatgggccctagcagaatacaaaacgagcacatatccaagtgtatcctcaattctagattcctacaagcactctattgtccaaccactccgcttcataattgacattcccagtaacagacctcacctcctaccagatccccagccttcggaatgctaaagctggttgattagtgtctgcaaaactaccgattctggggacagccccttctcctgctcttgcagctctgagcatatcccttctgctgactctccccagggacctgactgtcccttgcagatggtcaccaccctctaggtagtacaacttcccgggacaccccaatgtctgctctcgcccccgtccggttgcttggaaatgtgcagcgggcagcgacgtcacacagagaggtgggtgccctctgcccggcgcaccaatagcgcggccacggccggcctcttcttctccagctattggtgcttctggccgctcggctccaccccagcccgccatggcgtcagccgccgcaacccgggggaggaggttcccactttaagaagtgaagttttcctccccctccccctcctgcccacctcctgccgcctcccgcgccccgcggggccgcggatggagctccgccgtggcggcgtggggaaccaggctgcgggccggaggatggatggggactgccgcgatggcggctgcggcagcaaggacgccgggtcggaggactacgagaacctaccgaccagcgcctcggtgtccacccacatgacagcgggagcgatggccgggattctggagcactccatcatgtacccggtggactccgtgaaggtgaggcgcgcggaggactgtgggggaaaggagccggagagcagtcgcagcagcgcgcgcgtttgcatcccgcgcagttccagcctggggcagagccacgaagccacgctgccggttccccggggcgcggcgacaggccagggctctctcccggattggctgcgtgcagccggggctccaggaaagcgcaccatgtcgctccttccgcgatgtcccgggggagtacccctagattccgccagggagtcttgcacttctgtctctgtcgtggtcgtgggggacaagtggtgagcactcagtgcgcggaggtggctgtggctctgagccgtccgatcgctcgggcgctgcacgtgcgcggcttctgagggagctggtggccgggaagcgcttgcctcgctcctccgagaaacgtactccccctccctccccccggccgcgcgccctctggccccggcgcgtgcctgctgctctggggtggcttagggtctggggaagagccagggacgccgtttcgccgagtccccaggctccggtcagctctttgggggggcatactggatcagcgacactccatgtgacacctcccctcccacctagttctactagaagacagtgggacatccagggatctttgctgtctttcacttgctgcgaggtggacctgcagacttgtactgtacagctatgggttgtgtaataggcttccagtttgacctggtcacttcccccaggtagtttcgcatgcgcttctgtcaagaggcggcttgaacaggtgaggtttgttagagcaagaactgcctgtgttggacctagagaggccccgcgagagatgcaggaagtaatacctgtactgacattgcacctttagagctggaatacggggcgagacacccctgggagttaacatgaataagcccgaggggcaaggaggagagcggagaagcttcctctaactcttagccgcttgaattttgggtggctgcagctccactatgctttggggaacttgggggcctcactaagtggcagttattttgtaaggcagggtgccaggcctgcacacatgaaacagtaccttactgcagatgcgggccccacctgagcaggtatgagtatctgggttttctcagagctgccagtcagtgactggacaggccaagtccagtgaacaggatgctgggcctaaggcaaggcctgtcttccagctcactgccagacccgagtcatcttcactgtccctccgctgtcctagtgggcaatcatgcagtgctcctttgccggccactgttgagtgaggaggggggaactgatttttgattttaaaatcaccttagaaggagcctggacacatgctagatcgcattaatacaggagaagatggatcaaatgtaaggacattttctacagtctaatgcatcttggttagagacaggggaaagtcaggagctattaatttgaactggtcacagacctggagatgaccttgcatcgaaggagcccttccacctgtgaggcctgatgtcccttagccatgagttctggttcctatccccttagctgactttgaaggttagaaacaattattgatgcctcttgatttatttgacagtccaggcatgcctttcccctttgtaagtaacacacgttgtgtttagttctcccacactctccctacctgtttggattcagacttacttctgtgcttagtcttttccaaaaattttccatctgtggatagacaaacataggctataaggatgtgtgtgtgtgtgtgtgtgtgtgtgtgtgtgtgagagagagagagagagagagagaaagaatgtgtgtgtgagctatgagtgcatatgtgagtgttcttgagtgtgcaaactgtgcatatacctgtgtgtgtatatgtatgtgtgtttgtatgcacatatgtgtgagagagtattgagctgtgagtgtgtgtgagagtgcatgttcgtgagtgtgtgagctgtgagtgtatacctcactgtgtgagagtgaatgtgtgtgtgtatgtgtgtgtgtgtatgtgcactcgcacagctatcttgagtgtcatagcaagtattcacctcatgggatttgcttgtaaaatgaagttgctcattgccagtcagcaggttcttctagttctgagaccgatcccgactgctggtcagtagtgaccctttgctgttcttagactcacagtttgggtgtgaaatgccttctgtgtaccccccgcagctttttttgggggcagcaaggatttttctttctttctagttttcaacaaagataataataattaataataaaggcacagcgaaggttagtgtcacaagccctatggctccaagtaggcagcaggcgggccagagtccaccaagatcatcacagttgtctgtatctaacctgaggtggcaggacacaattatgccccagtcatggaaacagttcatgtgggaagcccacagctgcgtccctcttaaatattttggatgatgaagactgagtaattgagtcaggagggcaggcttggctcttagccctgtagctcactgctgtctgcctcaagcaccaacctgtgcctttgttttgttggggaaaatgggtgctccttctcctttagcccctcccactttgtaaggtgcccctattgtcctttcgtgttaattattacagctgagaccaagtgcgtgtgaatcagatcttggaaagatgaaaaaaagatgtctttgatttttttttttattttataaaggcattcattttttgaacttgttaagtgtgagtagagtccgccagctttctttcggatttgctgtcccaggctgtgtgagcgttgggacccagggcaggtcctttgcaatcaaagcttgctgatttccttgggtcttcagtacagaaagaggactcatgggatgtgcactgttctaatactgaagttgctatttcataagcttctgtcgtctcccgatgccactttaatgtccactgtctttcaaactgtgggttttgatgtattagtgggctgagcatttggaagccagattggtgacagtatgtaagtatgtaagcaggtatgatttgggtaggaagaaacacggttgaagttctgtttgagtcatgcaccccagagactgtgtgaaaaagcacttctggccagaacaggtagtaagtacatgcaatgagtcctagtactcagagacccagatgggagggcagagaatttgaggtcagcctgaatttcatagtgagttcaaggccagcctgagctgcctagcaagactccatctccacacaaagtctgagcatcatagaatcacatggtccataatttctctcctagcagcaacagtctaaggtcacttaagttcctcttgggaagacttgcatggatttttttcctaacctttctctttccccttagtcttcacagctagtggttagatgcgaagacttcatttaaagagcaccagactggtgggacccctgagctccggcatgattgtagcaaactgatggaagctaagtcagggatctagggtgcctgggtgtctgcagactcgtgtccaactgtggcttctctctaagtgcctcttggcagcatttccttagaagcctctaaccggtggtggcaagccggtatggtggctttcgctggcccgtggggtggaagcaagagctggtggtcaggacgctcatgactggtgggagcgtgccaggtgggtggggaaggaaattccatccagattaggcagagaccatgcaagtcagcttggtaagcacggggaagaaaggaaacaggaaagatttgaagtgggggaacttccgctgaccctttcacggtccttctttgagtgacttgtcaggaaagttctgctctaaccctccctgggtgagccctctgttctccagacaccgaatggctgacactgcttaccttaccttagctcctcaggaagccctcatgggtgtcttcgggggatggcctaagtggggatacaggctaagcatggatatacagcctggcctgcctttggggacagccctggtgaggcaggtgccaggacacccctctcccccagcccttgagcttttccatctgactgggagggagtactggcagctgccagaatcccgctcccagttcctcatgctttatagaacaaagtgtggggcagctggtagtgcaacttcaagaggtcatgaagtcccaaattactctgttccctggagcaaagtgatagtgctttctctctccctccctgcttttccccgcccttcactgagaagcccttttggacaggtgagttacaggtggacagacacagagtcaaaaaagagttcaactaagttcttccattctttcatgacaccccggtgcactctgataaccagatctgctgtctgcatccctttgcaaagttggaacttgacccttacacattcccttgcccaggaatgaagggagggacaggctggttggggggggggcggtcacaaaggtggggggataacacccagaacaacattgagtagcaaagggggctcagcatttaaacaataaacaaacaaactttattttaaattttttacataagctttagttagtttctgtactgactggttttgtgtgtcaactggatacaggctggagttgtcacagagaaaggagcctcccttgaggaaatgcctccatgagagccagctgtaaggcattttctcaattagtgatcaagggtggaagggccccttgtgggtggtgccatccctgggctggtggccctgggttctataagagagcaagctgagcaagccaagggaagcaagccagtaacatccctccatggcctctgcatcagctcctgcttcctgacatgcttgagttccagtcctgactttctttggtaataacagcagtgtggaaatataagctgaataaaccctttcctccctaacttgcttcttggtcataattttttgtgcaggaatagaaaccctgacgaagacagtttatttatttagacaaaaatctctctatgtagccctacctggcccaagactcactatgtaaaccatgctggcctaaaactcacagataatcgcctgcctctgcctcctgagtgctgggataaaaggtgtgcactcctatacctggtgtcttacttagggttacttttgctgtgattaaaaaaaaaaggatgaaagaaacttgggcaggcaagggtttatttggcttacacttctacagcactgctcatcactaaacaggaactcatacagggcaggaacctgcagaggccatggaggggtgctgcttattggcttgcttcccatggcttcctcagcctgctttcttagagcacccaggaccaccagcccaaggatgatgatatccacaatgggctgggcccccttccccatcaatcactaattaagaaaatgcctcttacgggcattttctccagcatataactccagataactccagcacatctggccactgtagctttttagttcggagtggcatatgagtgggcatgacccgggtagggtgcacgtgtgtctgcaggtcaggggacagttttgtggagtcagttctctccttccacttttaaagagagttcagaggctagaacttaggtcatcaagcagaccgcctgctgagtcatcttgcttactgtgcatttggagtttaatggtaggggtgggagtgggggtaggagtggtgttaattgactgtgtttcttaggtcacaggggcaagtgttcagggcttaagggatgtgttctccaaactttttattggcccttattggctaagtctttgccaccaccttgaccatcccttcttggatgaggttttgtgtcatttacaataatcaacttcagaccccaaatcccactttgctttgccttgggcatgtgtgtgtgtgtgtgtgtgtgtgtgtgtgtgtgcgcgtgcgcatgcatgtatgtatgtgtataaaggtatttttaaattatgcatatatgtatatgcctatgtgggtatgtgcacgtgagttggagttacaggtgattgtgagccacccggcatgcatgctaggaaccaaatttatgtcctctgtagctcacttgaacccctccccccaccttttcttttgagacaggatagaaactgacctgaaagtcactaggtagcccaggctagcctcaaactcctgtcaatcttgcctttgagtgctgggattacagtaggctggcaccagcctactggacttttgccttctggtttcgtggaactaactgccttccctggaccactgggtgagctacccactcctcttccttccctgatcatcctccctgcttctcattaagccagaagggccctctctggagactgcttcccagtctttgcctatctccctttttactcagccttcccttttgaggcattgatgtttgtttctaatctgaagcagtctggccccacatggtgctccccagggacacagcacctgcagctctgtggtttgaccttgctatttcctgctctgtctttgttgaactccatgaagctcagttttattctgcccttggggttggcatcctagtgttctgctccagatggctgagttctgatttccttatctatggaggagaactctaacttctgtctctcattcccctccctggccttactgttccctgatggcttctcacctcatctgtactgtgggaatgtctggttgacatcatcggcccctgtagcaaaggccacctccattcccattcttttcctatctccctttgctgtcctcctagaagtccagctctcttcctagtggtcaggaactcactctcaggacctttcacccatctgcctgacaatggccctcattcttacctgtgtgatcttgacatagtttcttagcctctctctgctgttttctcacttgcagaaagaagacactgttctcttgggtggtcggagggtgaggtccttgtaatgctcaggacacagttggtacaaggagaatattctccaggagtgagcctgctttttcttcctccccttcagtaatgtggctagagtcactgtccctcctccaaggactcggactcttggcaatccacttctctccagatctctatgaatataccacctgacagtgcaggcctctgtgcctgtcgtgagtgtgtctgtgaaagcacacagtgtgggtgtgtgcgtgtgtatgtggatctcattggcttgggacttggtagctcagctaggctccagggatctgcctgcctctgcctccccagggattgtaagcaaatcacacctagcttgtgcactctctcctctctctccctccccccatgcgtgtatgtatgtatgtatgtatgtacgtatgtatgtatgcatgcatgcatttacacaagatctcaatttgtagtcctggcttttcctggaaatcagaaactagcacaaccgtgtgtttacagagatcagcttgcctctgcctctcgattgctgggattagaggcatggtgggttctggggatcaaattcaggtctgttgttagtacagctgcaggcttaagtttcttagtctttgcttctttaacttgattctgaaaagctgctctgcccactgggcagctgagcccttgggtaattcatcactgcccccatcagtatccatgggctgtgggctctgagcctccctctcctcctaaggccccatcaacagcttctgaccccccaccagtgccttcacgctctcttgctttccaacccccattgtaagggaatggggctctcttggtcctctgggggagttgatagtggcagggaggggtgagccatccagatacagcaggactgagtcctgactctacccccagggcacatggcttaacctctgtcacttcaggtcccttcccagcagactggggggcattaaccccagatccatcttactgggttacaggaagaaaaaaatgtcctcgcctggtgaggctctcagtaaaatggtttgtttatttcctcctcctccccctnnnnnnnnnnnnnnnnnnnncccctccccctcctcctcctccttcttcttcttctcagggtttctctatgtagccctgactattctagaacttgctctgtagaccaggctggcctcaaactctgagatctacctgcatcttgtgtctctgcttggtgcctcctacagcttgccctggacacaccatgtctgggtgtcatgatcatcggctcagcccccctcttccttatctcagggcccttctgagagcctatccctaaccctgaggtgtggcaccttcagcttcttcctggctcccgattgtgtacatggaagacaagtgtatctccgagtccaagatcttttatgtgctttcccatccctgctgccatgtgtttagggcatttggttttgtcagtggacttggcttcctggtctccctacctctcttctattttggtttttcatttctttgttttttccttctcgcacacagtgccgtttgcttgtttatagtgtttagacgttatctgcagttacagaattctttattgcttatttattgctcattaaactgtcatcttccagtgggagggacttgggcatgtgtcctttcgatcttggcattcccatgacctgaaacagattagttgctagcaagcatgtggtgtgtgaatttcagccgtcccttctctggagcccacccttcttagctgctccttcgcacctggcctcagagccctccaagtttatccatctgaaatcagaagagtggcaacaccagatgtgtgtcacatctggtcagacgctttgacggggattccaggcgctgtggttttcaatagggaggttctatgatggggctgcccatggtatttatgatagtcaaagcgagatcctgctgtaaaggtaaggttagctcctccacgtgggtcatctagctggctttcctggtgctagttagaccctggggcatggggggatgggaagcagccctgccttcccatactctgcatccagtaacccagtgcactctacacctggcagccccttcacatacagcaatgctgggtgtgacttccgtggatgcagagacccttccctccggcctccttccacatgctcgctcaccagattgaggcccacaaaggcattcctggaatattattagcccggtgaatcaggtgaatgaaggcaggacatgacagttatagagagctacaaaacccagccaaagagaagttaaaacaaatgaatatctcattattaagcaaatactagctttgcctttgtcttattctatattgttttgaaatcataacatatcttggccacacatacacaaaagagattaccttagtaattgtgttaaggttccatccttttaaaaaaatttttcttttcagtagaacctgggagtagctttgtctttgtggtgatttgaataagaatccgccccctcccacccccgcccctgaggtctctagttggtggaaatgtttcaggaaggatgacggggtatggccttgttagaagagctgtgtgtgttgttgggggtgggctttgagatttcaaaatttcactccaggcccagtcttcccccccttctctctctctctctctctctctagtacctttggataagaaaaaagctctcatcactgtcccagccccgttcctgccacagtgcttgctgtcacgatggccgtgggctcactgtctgaaagccccaataaactctttcataagttgccttggtcatggtgtgtctttacagcaatagaatagtcactaagacccttgtcgtgagaccatccctccatctgacttgctccatatttgctgacccctctccttccacactctgcactaaacacgaggctgcaaaaagaagaactcctggttcgcattcccaaagtaggcatgctccttccctgtaacgagaccctaagcagggtgaagggctttccttaaagaggaaagtcttgtctccatgcgtacagcagccccctttatcctgggggagggtatggtgatgtagtttggaagatagtttgcctatatctggaaacacaataataaagaatgctgtacacatactattttcccccactggtaatacctgtgataatagtgtagtttataaattagacaccttaagggatgaacactaaccaatgataaacagaactataataagacactgtaaccaagttgtttaaaaacttataaatacgatcccagcatttgggaggcagaggcaggtggatttctgagtctgaatccagcttggtctacaaagtgagttctaggacagccaaggctacacagagaaaccctgtgtaagaaaaaccaaaccaccccccacccatgcaaataggaatcatcaacaacaaaaaccatgaattatttctggcattttccatttaatattttccaagcactttggctttccaccctcacccaaggcacagaagccttgaaagtcaatactttcacttgggcaagaaggacgaggtggagttgttggattttgagtggccacaccgatgttctcttgaaggtctggaggttagaacagtgtcacctggcttcctttggggacattgttaaatagggaaggtgatggtggatcctgactgctcctaccctgtgacctttagtcattctagaaggtcacattggctcacagaggtccctttgaaaatatccacccaccctgtgtgtaatcccagacagcccaggatgctgttggcttagtcactaaggggccacagccttaaaccggtgtcttctttgagagaaaacaaaacgtgttgaaattgggagaaatcccagactgcttgagtgaggcaacagttgcataataggtttaggaaatgtctgtcctccactggtcaagtttagccactgtcccgatggcacttcccatgtcttatgagctcttgggtccatcagaggtggctgggcaaagccttagaaagttccagaactttgcgtggctatccacacagtaggtggcgcatactgcagctggaagaagacccgatcctgttacctctgtgttgatgggtttttatttcctgggacagccaggacgggtacttctgagatgtagctgtgggtggggcctcagaagaggtgtgtgcctgccctgcgtatgacagtgttgaagccatcaaaccaagagacagcctttagtgttcaattcttggtcttgccattaagcagcttcagttgttgggcaagccatttctctgagctggtttcctcgtggaaccacatatgactcagctttccctattgggaggcttaggtgagatcgcattagttaaatggcttttgtaagccttgacatacaagagtaaggacaatttgtatatagtttgtaatgtatagtgtggttaacgattagaaatgttcagacttgtgtctagggacagaaacagagctatagggatagaaagaacctgactacgtatccaaacctccttgtgctatttgaaatgggctttcatgattttagtacgttgtagtataggctagcctctgactgtcttcctgtttcagcttcacagacttctgagattataggtatgtagtatcataccatgcagagaacacagctttttctatccgtctccctcctcctctccctcctcctctccctctttccttcccttccttccctctttcctagttgtaggtgttggtgtcatggcacatgttcagaggtcaaaggacaactttggatgctggctcttacctcccctcttgttgagacaaattctcttgttcatcgctgcccaggccaggctagctggcccagaatcttccagagattgttctgtctccgctcctcttgcagtagaagcactgagattacacacagtactgtgcatgcctttatgtgggatctggggatcaaaaatctcaggtcctagcttgcatggccagtagttttccctgagccacctccttagcctgggagcacagtcttaaagctcaatgcaggttgctccaccatgttatctattgttcaactgggctctagggagaggcgtgaagccagccctgtgttcatgaaggactgtagggttccctgtggctgcagccttgggctttgacctcttatccagttgagtcctcagctgcctgctggtgtcttcacctgagacacaagggaagaggaggtgaccattaaaatgcacagggctgctgctcagtaacactctatagacttttcagtgcacaccttcatcctgattttgagtctgcctcatgggtcaccagacagatgagtctggggatgttttgaggagggatacactccgagatcatctggctcttgtactgtgtactgtcctgatttctgagcttatttgtctgtgtggaaataggtgccatcgcctctgggtctcctgacctccctttcttcatggtgtttgctggtatttgacatcaagaacagaagattgagtggtgagtactggtttgtggggcacagacttgcccacacagccatggccagagtgcagggtgctctccgtcccgacatggcagggtagttagaagtgtctggattgaaagtaccagcacatttttctgtctgtctttctgtctgtccggtgagtggttatgcaagtgaactgggttcatcttaatgaagaatagagagatggggttctatagtcaccgtctctggtttggttgctactatggtctccaatctgctgcctcgctaattcattgtaatgtccctcccgggaagacttcagggcctccgtgcagatgctttatgccttggctaccatcaagcgaaggtactcattgtgagatggatgcctctcctgtgaggtctgatgcccagtaggatagatgcatgttacatcaagtcctcgaagagagatggaccgttctcgagactttgagcttcaaagagaaggaaagggtctttgaggtcccataggatctcagtgtgtgtctaagcgtgaggaagttgtgggtgttagaacagggatatacatgttttgttcagtgcgtcacagcaagtccccccagacagcagctcatctcactccctcttttcatacacatgatgcatgctgactcccatctctcccggaggccaatccagcaacgtgtgcgtggacctactgaccagaacagcatgtggctgtggagttccctggcacaggaggccttggtgactccgctcgttttctgggtgctgtggttgggaacagacctttttctgtgtcaggtggctactcagaagaaacactagaaggaaagatttggtctggttgtagaaaagcccaagaaagtaccaagatgggagtttctctcttcttgcatcccttcttgtatgtgtatgtggcaggcatgtttacatgtggatggggacagatgtgtatgtcagatagtgtgttttatggagacttgaggttgatgtccagtgaccccccttaattgctcaattatattttgaggcagggtctctcagttgaccccccagagctttctcattgacatatctaatccagttaggcagccttctcctgagggccactgtccccacttcccttgtgctgaggttatagatggaccaccgcgtctgtccagcatttacctaagagtctggggatctgaaccctggtccttgtgcttgtgtggaaagcactttgcccatggagttgttttccccacagccctagagcacccccttaatgaaactgtacatgaaaccatgtttccctcttcggtctcttagcttttccaggcccacctgagtactaagcacttgtgcatgccgggaaggaaggaaaggctcaacaaactcgattccagaattattgaagattgtcgtacgtgtatcttagagctttgaaggtgtcagctcagaaatggcctttaattatatatagggcaactctcacagtctgcgaatgggactaactcttagctgcttgtttacttctgacagacccttgcaagtttggattggagttggagacattgaaattgcaatatgggatgcatagcgccatgactacaggtagcagtgggctctgttgaccctttcaggcttgtaagcaggcccctgtctgtatggtgacatgttgcagaccttgctctttgcgttttgttcctggaattctctgtcagaccctggacatcaaaagttcttgcaaagctgggctgttctcaggagctactgtgcaattgagaacagatgtctgctctcagagcagcttggatgaagggaccaggaagcactgggcagggctttttcatcctggagggagggacttcaaagaagcgaagagaagcctgtgtttacttgcaggtgcaaggtgaccagggatgcattgactgagcagcaagtatgacttgaactcatggcctctctgtgccttgggacactgtgacttctaggttctctgaatacacttggccacaaatgtagacttctagccagagccattctacctcaagaagaaagctgggaggcaggactgcttgtagtgcattctgggaggggagccaactgctctcgtcccattttgggcctgccttgtccctgaattccaaagtgcccgcctcgaagttgcagtttattttgtccacttgaagtcacccttcacgattgcagacccttcatttaagcctctcccagagtgttgaatgactctagccccgccctggaaccaggggcagaaagtcccagaggtttctggatgggctctgtttacaactctctgactctttcctgcttggggacctttcataagttcatcaccaggaagctgagtcatgcaggggtcagctggcgtgatcaaagatcaccccagcgctgccggcaactcacatcggttgtctgggcatttgtggggagcagtgtaggaatgacgaggtagatgagctcaaaggccctcttagcatcgcccctctggggtagggagagtggggagggtgggctgcacaccctggggactgcacagcggagagccgtcacccacttcattcacttgatttctttccctcttctctgaattcaaggccaaggtcagagccaaacagaaacacagtgcagaggataaaataccttcccttgtctcatgtttggagttcagcacgccctctctgcccctgtgctgtgctctcaggctctgctcctgatgcttagcacatttatgggaaaccagttcccccagtcatgcatccacattcccattccatagtccattcacctgaacccctttctttcattttttgtgtgcatgtgtgcatgcacatgtatgtgtgcttatagaggccagaggacaatcctggtcattattcataaggtattttccatctggtctatgttttcctttcctcttctcttctcttctcttctcttctcttctcttatcagagcctgcgcccctgtcctcacaggccaagtactgagccgcttcccgcatagacctcacaggcgcagatctccannnnnnnnnnnnnnnnnnnnnnnnnnnnnnnnnnnnnnnnnnnnnnnnnnnnnnnnnnnnnnnnnnnnnnnnnnnnnnnnnnnnnnnnnnnnnnnnnnnnnnnnnnnnnnnnnnnnnnnnnnnnnnnnnnnnnnnnnnnnnnnnnnnnnnnnnnnnnnnnnnnnnnnnnnnnnnnnnnnnnnnnnnnnnnnnnnnnnnnnnnnnnnnnnnnnnnnnnnnnnnnnnnnnnnnnnnnnnnnnnnnnnnnnnnnnnnnnnnnnnnnnnnnttttttttcttttttttttgggacagggtttctctgtgtagccctggctgtcctgtatcactctgtagaccaggctggcctcgaactcagaaatccgcctgcctctgccccccaagtgctgggattaaaggcatgcgccaccactgcccagcttggtctatgttttctacacatctccagcttcactttcctgagccttggtattgctgctggcttgaatcagggtctccttatgtaacccaggctggacttgaactcacagagatctgcttgtttctacctcatgagtgctgggattaaagacctgtgccactatgcctagcattaccttgtctttttgagacagactgtcatgaggttaagctgtttagccaggtctgttcgtcttcccttcctcagtgccgggagggcgagagtgagccactgtgccagttatttttaaaatgtgaattctgattgtctgattcaggtcctttgtaagtactttaccaatgcccgagctgtcccccaagccacaggctactttctttctcctacacatcatcagcttttcggtcctcagccttggtgtccatgtgatggtacccacagatctaaattaagtacccttcataggatctggtagtacctagtatttggggcattcagagtttggaaattatttgagtttcctcttctccctttttagatcataaatatctcaaagaccagaactccactcaccctcctgtccccaactccccagcagtgcactaatgggtagtttgtgggaagatctctctggcaacacagcatattttccctgctgggacctctgtaaaactagagtcactgtcaccctcgtccctcatcttctgtcactcctgggaacccttctctcagacagttttactttaagtcgcactccctagttcgttctttttagggagaagattttagttagcgtctgttctcacccataatggaagctttctgccatacttggatacagagaaaccttaaatctgccttaaatctggggctcagctttgatcatgcttgtgtccttggctgttttcctgtgtgttgtgtcccagactctggggcacacagatgcattattgatagcgtgtagggccttgtgcatgtgggtgaaaccctgttggcccctgactccttgggccattgttacagtttagtggggcacagtgaacaacaatggatgattctcacaggagacagacgcagatgcatcacctgatataattataagcagaggaatgagcaagccaagcctggcgacaggattgctgtggattctgctttttctcctttgtttaatgggctaatcactgggcacgcttcgggaaggtgtggcctctgtgaagggtgtggaagccggccttgtagaagctggcaggaccgcacccaatttgcaggcatgcaccgggtgcctggttcccagtccggtgtagatttcagccgagctgtacctactgaatcctggggcctctcccttgcttggtatcaacactaaggagatgattagggccacttgtcttgtcaccctcctggtctctcacaaagacacatagctgcttcttgtcagttccctcgtgcctgaacagctgggatgtgttctgggagggtgtccgttggcgtggcaagaggctggcacacattagagaggaagtgctgtgtcatccagtcaggttggcccgtggaaggagaaagactcgggttttgtcgcctaagcattttgtcttcctttgcagaagcccgagagtcctcggacttggcctctcagaagcctcctccgtggcatgttcctcctgcctagggacagtgtggcagactcctggctagggacagtgctgtgtccggggtggggtggggtgggggtggtgtctgacactgcggagaacccagggcggatgacagacaagacaaaggccagctccggaaagggctgtgggagatttcagggaattctgattgcagattccgggatacatccttgaagcaaactgtaggttacacctttttgaaattgagtatatatatatatatnnnnnnnnnnnnnnnnnnnncatatgtgggaaggccagagaccagccttgaatattgttcctcaggagctacccaccttattattattttttaatttttaaaatatattgtatttatttatacacatggaacatgtgtgtatgtggaggtcagaggacaacctctcttctaccatgcgagttctgggtattgaactcagattgtcaggcttggccgcaagcatctctacgtgctgagccatcttgccagcccacttttgttttgcctgcaggtatgcctatgtttatgcaccacatgtatgcctggtgcccacagagatcagaagagggccctggtatgtcctagaactggaagtacacagagatggaaagccactgagtacatgttgggaactacaagaacagcaagtgcgctgaactgcttagccatctctctagctgatcgcattatcttttgcgagatgggtctcttctacctgaacctggttggctggcagccagagagcttcaagggtctactgtctccacccctgtgcctctgtgcctggctcgtgcataggttgtggggggttgcagttggggccgcctgcttctttgggaagcactttactgactgagccatctcttttcaagtatacccttcagtggtgttgagaacctcttcttaatgatgtagctggactcagacgtcttttcatcttgcagaactaaaacccgcctcttaaataataagttcctatttctcccacctccagaccctggtactctctattctgctccctgtctcttcgaattccattcctttcagtgcctgtcgtaaccagaagcatagtagagctgcccttttgcaattggcttatttcactcagcatacggtcttctaggttcatctgtaatgggacatgggtcagaatttaaacccttttccaggctagatggtattccaccgaatggctgagacccacattatctttatctgtggtggacaacagggctctttctacccgcccacatctctccttgagcctctgcttttagttctcctagctatagctctactctccacaggtggaattgctggatccttgggatttctgctttttttttttttttttttttttacttttggaagaattgccttagtgtccttttaaaccttcttactactaataaatagtgcctttgaatgagagtggcccccagaggctcatatatttgaacattaggtctccatttggtggaactgtttgggaaggattaggaggtgtggacttgttatggaaagggtgtgtcagtgggggtggggtgggatttaaggtatcaacagcccatgccaggacgagcctcactgtgcctgcctctaacctaaggataagctataaggtctcggtttctgctctagcaccatgcttatctgcatcctgaggtgctccctactctgatgatcagctctctgaaactgtaggcatggcctcaaataaaagcttccttttataagtctcctttgtcatggtgtctcttcaatgcaatagaacagcatctaagacaagtgcacagggtccgggtctttcctggttttcagcccctctacctctttggctctttgacagagcctcctcatatgtctccctggctggctttggcttagacacttcctgccttcacttcccaagtgcgagggttttaggtgtgcaccaccatgcctgctttaaaatttttaaacaggtgggggtaaagttgcaaacaggtccaatgtacattaatgtcagtaggtttaacctccttcaactaaacactgctacacacagatgcacctttgtttatagctggccctacgtgtacctacataggtactgatggctgacattctgaatgtctccatggagacaacattagccctatttgttcatgcagcatctctcagtagttgtaatagacggtgaacaaaagcactaggagtccatctgtcaagctcctctcctggtaagtgtccagagaggtgattgctcagagtccctgtggtggctgagctgcagagatatttcggtctgttaacttccagaacattttggaggaccttcagtttggcaaagtgagttagcacttgcactgggtttgcattcctagaggacctcagaggcgagagcccctgcatcccacctctgggctgtggagagctctaagggacatggacaggggagagaggtcctctgtgctcagtcttgtagctgacctcagtccacacctggctgccactctgggtctatttttcaacactccagaaggcattgagagaggccaaaggcttgtcacagaggggagcttgcttataacagaccacacaacagttttaggatgtcttggtactcaaggaccctccccagtcctgggctggaacttcaataacccttaaaggtgagcaaggaggccaggtgagtgaacttcctggagcacttttgtttgtgacttttttaataccagtaaactgatattagtgacagctccccatcccccatggtagttagctgtccaagtttcctttgttacataagcaggattaatttaagcagctcatatcccttcattcagaagtgacagggaagaggagtgactgcaggagggtcggtatccctcgtgggacagcctgggcgaattctctcattcctctgggcctagctttccttccgttcaatgcaatggcagagtggaatagcacctcaggtgtgctggagtctgtaggtgtttatgggtgggttcactcccaccctgggcagatcttgcaggtacctttctccaagcaagaagagttgaagggaggaatcggtacaagtgacagtttccaggagtttgtttttttttttcccaccagatctacagtaaaaggaatttgatcttcatagccttttttagaaggttggtgctgtgaggaacctcacacagaaaaggaaacaagcagaggagatgagccattgtctgagtttacgcttgggagaggaagaagcccctgggatgtctcactgctctgccagcccccggccagagtctgtaattctcaggaagtggcctagcatcaagctgctcttgcgctaagagaggagagggaataaatgccgaggccaggagtttttgacactcaaaaacctgttgtgtgatttcttgccatctgttttatagtctaatgggattccgttcaaacctgttgtcttagtcagggtttctattcctgcacaaacatcatgaccaagaggcaagttggggaggaaagggtttattcagcttacacttccatactgctgttcatcaccaaaggaagtcaggactggaactcaagcagggcaggaagcaggaactgatgcagaggccatggagggatgttctttactggcttgcttcccctggcttgctcagcctgctctcttatagaacccaagactaccagcccagagatggtcccacccacaaggggcctttcccccttgaccactaattgagaaaatgccttacagttggatcccatggaggcatttccgcaactgaagctcctttctctgtgataactccagcctgtgtcaagttgacactcaaaaccagccagtacacttgtcatgatgtcctgtgtgccagacatggagtcctttagcagttagctaagaggaacactccttcaggtgaggtgaagctagtggtaggttgtggggagagtgtgggcatccatattaccagaggtggtttcccctctctcagggatggaggaggagcagcctctccacaagtcattgcaacagagacgaacccttactgaccacttggccactgccctagctggcccgtttgcttccgttccctctttcttcatcatgggcagcacaaggcacacacgattgggagggtgctctgcaggtgagccagctaaaggtcagagaggtgacataataatttaccaggctacaaagttgaactaggacttcagtgactagatggcagaggactgggccatcttttgtctccttggatcttgatccaagtacaaggaaggcctcaaatcagcttgtactctgcaacagatgggtgaggagattagcgtgtagatgaactggtaacaactatccctgccaggaatgaagatattctaaggagccgagactgcccctcccttttgcctgtcagattattgagacaagaaagcctcaggtattgggatttcccctagaagtgttacgatgctgaaggaaaggagaaagctgctggctgccctagcaggagggttagagatttctcactgttctgtcaacttgtcagaccaccttgcaggagactggagcccagacagtaactgacacctcacctagaactgcttaagtgtacattcctcttccttctgtttaaatctaacccccgaggcaggaccccaaagatggaaagggacactatttgacctctatactctttcctctgcttttcacaatgtctttgactcattgtagacaggtgccacctaggtcactgggtcttcttggggtctagggtctgaccctaattcaggtaagcctccaactctttcctgtgtcccagtgaccccagctttgtacccagtgctccagagcctgtgcgaggcctctcctgaccccatctctgtaccatcccaccttttctttatggggctgagatgtccgactagtagagtatcctcagagagtctgagattccttgagagcagtggctgtctctgaggccttgtgtggctggctgaaggctcccagcagagtctgagattccctgtctggctctctgttcctcttccttcatagcagaacaaagcggggggaggcccgtgggaactcaaatgaaaactctctcaaggcacacctcccttccgccccccaccccccatgggcttctgtggtgcttgcatggggactcttccatgtcaatttcttttcctttgtggcatgccaagcctacctatgctttgcagaagtaacacgccgtttctccagcttgtctcaacatcttgtccttacttgtgaacggagtgtttacaagccattcagctcctcaagactgagtcagtgagaggcctcaggagttccctttatgagcaggcagttgacctgtggctcctgtacgcactagcctttgcataccgggccgtttggagtatcctgttggaaaacaatgttgaaatggaactgctgctctttggctcctgatgctggcaagatggtcaagtgccatggtctccttactgcccggaagctccaaaatcacccgtgggatccaaagaggcatggtaaacagaataagaaagccctcttaggcatggccctgtaggccagtcctgttggaggcgtttcttatgcaaagagaattgtgcaaggaagaagttggggttgatgttaaacatccagatcctgctgccagggagcacaacagagtgcaggctcaagacctcagggagcacggcagagtgcagctcctcaggaacccagggagcacggcagagtgcagctcctcaagaaggcaagaaggtcacagtgtttgtgcccagtgatggctgctcgaacttcactgaggaagacaatgaagttttggttgctggatttggtcagaatgggccacacacaccctaggcgctatccctggagtctgcctgaaggctgttaaagtagccagtgtggctctcttggccccgtacaaaggcaagaaggaaagatcaagaccatacattttgacagcagaaatactaataaatttatatattcttgggaaaaaacaaagaaaagaaattgagctgctattataatagcacagctgggaagcagatccttcagggggagtctgagaaagggctctgggctactgaatggattgagagccctgatactggagtaagtccactgccatgggagtgggcgagttcctgataagattgggttgggctggatctactgtcttgcatgcctttgcccttctgccttccacaatgcaggagtcctccccaaatattgggatgtgctcttggatttccagggccctggcactgggatgcccccaaacactgctgctgctgtacccagaggtgttccgttacagcacaggatgggctgagacaaacactgactcagccccaagctttcatcctttcagatacccgacctgcccctgacctcagtgagtatctggctcagattccttttcaggagactgagtggtgggatgttgatgcagctctatatggagctggggtggagatctgcgcctgtgaggtctatgcgggaagcggctcagtacttggcctgtgaggacaggggcgcaggctctgcataaacagagtatacatagacagggatgtctggacttgaacttgggggagcttgggtggcttggacagtcagtgtagctcttctgctcaccaacactgggcacaaaggagatggctgcgtgtaacttagagtgaccatagaagcagagcaccctgggaacagccaggaatttggagccatgttgcctgttgcctggctctctaccttggtttccccatttataaaacggggatagctagctgttccttttcttgcttttagtataatatttttggtaagcagagatatgaaaggctcagactttaccgctgatagaagctggagtaggtcacggccctgttcagggtgggaaggagtgacccgtgtctcaggtttcccttctgtccctcagtgaggtcaccgcaggacccgtgagatctcagtcctgctatctggtgtcctgggaatttgctccccctgaggagtagataatccttggggtgtgcctcacatagggtgttctgagagtgtcctgaatcaactggacttgggccaagcacggattcttttatccctccctgcttgctgtaggaccatccggagaaaggggggcacccaagtccagctcctggggtcaggaatgggagccatttccttggagccataggcctactgtaagctgcttccctagatagagggggagcccaagtgtatggaacaacctgtctggggatcctgcagggagggcttcagttgtatgtggctgcctcccgaggcagggagcccatctgtcctagttaaatgtctgacatttcctgctgcctgtcctctcactgttggaagcagggtgtagccatgtgtggaaagtcacctgagtaaattccagcttcattggctggattcaggctctcctctccgtggtctgattctaacttcctttcttccagccattttcagatgcccatgtaatggtccagctgtttctctgagtcttgtcctgggggccatccctgcacacaatgccccagccacacagtcttgtttcccaggtagctgcacatgtctgtatggtcctattttttcccccaaatactcccacatgtctctgttcccccacaactaggtcattgtcccctgtccctccactactgcacttaccttatatttttttctcagagtaatatagtctaaatgattaaacaatatagaaagagctattgtgacagttctgctctgacagtttgatgccctgtcacttttcctaagtgaagcttgagcggtccctttctggtcaccctccactttggtagtgtgagtctttgtaccttggtgcgctccactgtggtcttgggaggagaaacaggcttggtaccctggctccttcaggcaacctgaggaacttcgttattcttgccaaggtggaattccatccaacacatgatgtacgttgtccccagaaacagccagtgtcttggctggggtctagcttagtcagtagggtgtttgcccagcacgcacaaggacccgatttgatggctagcacagcaaacaaaacaaagcaatgaaacaaaactagcagtaattcctaaagcagcctacatggggccctggaggtttcagtgttgttcctatagggtgagcagcagctgggagggtactttgtagtcataggtagctaggaagggctgcctcctaacactgcggccacctgaagaacttcagggactatgatgagaaatcatcttccttcaggtttcctcctcttcactgtctctaatgctgtccttttaactggcattgcaggtggactagcctttctgcttgctaccaactagaggtgtttcaggaggaggcatttcatcatgcacgggaggtctctgctcagaatatatgttctggaacgctcattgcatgtgctgtgtagcttctctaccttttaagaagacagtagtgaccactcttggggtagttgttttctcttgctgctcaataaacatcacagttttcctcttggttaaatatacatatgtacatgtctctatttttgtatgtctggataggcaagtatgctctctgtgtctgtggtttctaaggatgatataaaatcaaagcatgggagatgaattagagcgaagtgtattgtctcatgtgcgaaagtgctgtaataaaattctttgtatgctggttctaaaaaatcaacttttaaaaaccagcaaagcacgaggtgaagttcagagctcgtgggtaaagttggatgtatatggagcataatgagcgtcggtttctctttcagggctcattgtatgcttcactctcagtgagcacgtgagaacgatgctgcctggtagttttttttttttatacaggatttttttttccatttttattaggtatttagctcatttacatttccaatgctataccaaaaagtcccccatacccacccacccccactcccctacccacccactccccctttttggccctggcgttcccctgtactggggcatataaagtttgcatgtccaatgggcctctctttccagtgatggccgactaggccatcttttgatacatatgcagctagagtcaagagctccggggtactggttagttcataatgttgttccacctatagggttgcagttcccattcatgataaaagtttatacaggattttaaaggaccaggatgaggccataaaagctccatcatgagtctgtcttctataaggcagaatgaaatgggtgtgggctctaatttgggaatgctggtgagttagggatgctggtgagttagagatgctggttagttacggatgctagagtgttagagatgctggtgagttagggatgtagactgttagagacgctggtgagttagggatgctggttagttagagatgctagagtgttagagatgctggttagttgaggatgctggtgagttagagatgctagagtgttagagatactgatgagttagggatggtggtaagttagggatgctggtgtgttagggatcctggtgttagggatgtggttggaatagaggtactggtagtttagctgtgttgtagggttgggggcattggtgatttgagcctgaatattgagtacttcactgcacatgctgtttcttgcattttggagacccacatctatagtatgtacttcagaaggattctggaagaagagtcatggctctcaaggcctgggtgagttttacagtttcacttcagaagatttctcacagaacacatggccagaggagactctttctgctgaccttgggcttgtgatctgcagggcgatgagtcagtctgaggtcctaggccccatcctctgtattgtgggcgggctgttgatggatgctggctttctgtgtctgcagagttgcctcagcttccggtgtggagggaacacagtactgggtgtgagctgaacatgtccaagtacatgcttgtgtgtgtgcatgtgcgtgtgcatgtgtgtgcatgtgtgtgtgcatgtgtgtgtttgactagatatactaaaatttttgctctttgctgacactggtagacagttagtgtggaagttgcctgtctgattatatattccagagccaaccctagcaagagaagctacagctgtctggcctttttctagcattttctgggtgcctttccttccttcttttcttcagggagtctctggaacatgggtacacaagttgttgggcattcttagctcggcttcggtgcctagggaaatgtacatacgttcacaccaggccctgggagccttcaccctgactgtatccctattcttggctttcatgttattttctgatcctgaaagtgtcacttgtactttgaacaagggaaggtcctctccccaccctctcttcagaaatatgaaacggaaggttgaaagtcgccagctcctctgggttgttggacagggagtcagtggcttagtgatgacacgctggtgcgtgggctgggccagccagcgttctgagcagactctttaaggagatctgaggcctctcctccaggccttttttcttttttgggtttgaacccagcttccacactccccacccatcagaagatgcaggcattgctttcctgagtcccagtttcctttctaaatacctgtgtttaagctgaactccacaggctgtttgcctctggttatatgatccacgcgctcacctgggacagcacatacattttccactctccctcctcctccccctcccccaggtaagagaacaggctgggcctacctgtcttgccttcctgggggagagtttgagaaagagatggcccctctcctaatctctctggaagcttatggaaaggaacccagcccatgggtgtatcattccccaaaatccttctaacttgagtctggtcccaaggggcctgagcatgccacagtctgagtgacagagccccggagcaccctgctatttgctgcccccttgagagtgagtggcagaggtgtaggaggaggatgggggacgctcatctgcagaagagggtgcacctgctgctgctcagggctccctgtcgactttagaccactcccccgctgacagtcctggctcttccttgtaggagctgcttcagggtccctgacacagccatactcccagtgtaagagccttagagatccgcctgttggccctggctgtgttttcacaagaatgcttggccgagtgtaactgcttattaaataaaaaaacaacaaaaaaaccgcatgtgctgccaaaggcacatgtttaggaagtgcccggttaaaactagctaaacgagtttctttcccgaatgccttctcagagcctgtcacactactgctgtgtgtaatggatttccaagggttagaattacagcccagccatggaaactgagtggaagggaaggcaagcccagtccagtgcaggggctgaagtccagatgggacagttcagtgaataaaggctcttgccccggatccttgtggcccgaggttgatccccattatccacttggcagaaggagagaattaatgccttacaggttagccactcatcttcatgtgtgtatcacagcacatgcttgcccgcatccatacccaaatgcaaacaaataaatgtacaatttaaaatgatgatgataatacccagatgggtgaattctttctcttatatgcatgtgtgttgtttctgcatgttctttgtgtagcctcatttgtttccttcattattccctcctttctcatgtctttattttaaaaattatagttttatatataatatgtaggatatattaactattttcaagctagggttggagagatggctccgttgttaagagcacttcctttgcagtcatgtggtctagagttggactccagcagccacacaataaaacagtcattccatgcatgctgtaaccccagctccctggcagatgagacaagatgctgggggccctgcacacttccagcctgaaaaaatagagtcccaggttcaggaagtggcacagtctcagacgagtatgtgtccagcaatagatgatacttcctgatgccccttttgtggcctctgcattttaaacacacccacccactcacattcacacacatgcccccctcctttaccgttcttatcatttttaagtacacagatcagcatcatacttactcatgttgctgtgtagctgtggccactgtcaatctatggaactcttcctactgcagaaccaaactcctgtgcccataaaatgccagtctccatcatccactccccccacctctggctgccccctctctgccttgcctggatggatctgactagggcaggtccctcctattggtgtagtgctctgtggaatagccagattttggctcacccttcatgttttttttaattaaaaaatttttaaaatttatatgagtacactgtcgctgtcttcagacacacactaaaagagtgcactggatcccattacagatggttgggagccaccatgtggttgctgggatttgaactcaggactgctgggaattgaactcaggacctctggcagagcagtcagtgctcttaaccgctgagccatctctccagcgctcactcttcatccttttactcaccctttctcctccttgggcccacacaatagagaatatcaacttttttcgtttacattttatagacagagtaaattgaaaacttaaaaaggagaggttaaattgattacattcccgccatctctggcatcctcctgcctcactccttaccctcctgactccagcctctcatctgaagctatgttgtctttcagtcagttctgagcttcttctcttggcacctcagtggttattctctgccttcctgtcacatgtcccgttcccgccccccccccccaggcccccagtgtacacactccagtgctatttgctctttctgttccatggcttgggtggctgctctttgcaggttggtgagggcttgacggggccctgctccgtgcacacagccatccgccgtacttcagagatgcgcagttgactctctctcttaggtggtgggcgcaagtaggttcggtggggcttggcataagggctacagctttatcaggaaagagggtgggaacggatgcaaagtcaattcagacttccctgggcagcgttagagttggtgcagtgtcagtgagctgacaaggatgtgcctgtaagatgtctgtgagatgatcgtgcatatataaaaggggtgaaggatgtatagttgttgactgacagccagtacagggttctccaggagctctctgggtggttatcacagctgagggcaggcacattccagggtaagctacctcaggttgattcttgaagcctacactgtggaccccactgtcaccctgcttggctctgtgcctactgccatccatcaatcaccacccacctccctcctcataggactagaggtggatcccatactgctgaggatgttatttgaaagtaccaggggcctggaaggggcctaaagggtcctttaatgggtcttcctaacctgcagtgattagaaccatcagggaatttaggaaagaaatacattttgaattcatgtgtgtagaggtggtacccagggatcttgccacagtttccccagggattctgctaacaccccctctctccccccatcacctctggtttccctcctctctttcattttcaaaacaaacatgctggggaccaggtaagtaacatcacaaatcagaacgcacttgtgactgccggagctagcatctgatctagtccgaggccttgcaacagccattccagaagcctctgttttctcacctggttgccccaagttcttaccccggtctctgtagtttctgcctgctcagatacaaggaagccctcaaccatacatggggtgtgtaaaccctaacaggaccctgcccctatgccagaaaccctggaggaggtggtaagctactgcttcactctctgagaagaggtacaagacagcagactctctctaggcacggggcctggccagagtcgttcttttccatgagccccaattagtcttccgggacaagctcattcagcaggggataacacagcttgaggcatagcaggcatcatttaggaacgagtcaaagatggtgatagggaaggatgggtttagtccccgagaacatggttcttgctcagggaaggtgggtggggtgatggggaatcccctcacccgctgcatcacccgctgcatcatcaactcatccatccatccgttcagcaaatgtttgctgggtgcacacggctagtactacatctaccacgcacaagtccttgcagtgaacaagagctagaacccagactgggagtggcagtggtgtctcagctctctgggagatgaagtgtctagctccatgttcatcctcttcatgtaccccgnnnnnnnnnnnnnnnnnnnntgtgaatgtgtgtacccagaaattttctctctctctctctctctctctctctctctctctctctctctctgtctccctctccccccaccccagactggctcacatcactgccggggctgtccattggtagcctgtgtggcaggccagcaggctggacagctaccaacaccacacaagtgaccttctttagtcaggagcaactgactttaaatgttaacctgatgtaaacaaaacaaaacaaatattagggaatcatctagagtacactgatgtctgatcagttatttgggttcctcagcccagccgttgaagtatgagattaactctccaatctccttaagtgctttttatacctgagtagcgaggacctgggttcaattcctagcacctacatggcaggtagctcacaaccatctgtgaatccagttccaggggatctgacagtcctaccaatgcacataaaataaaacaaatacagaaaaatgtgcgcctgtattaaacaagtgcagactgttcgagcttgccattcattggtcctgaatagtgtgctctaagaacttcctatagcactttttttcggtgatcacagctgggtttgtttttgtttttgtttttgtttttcattggttgtttagttggttggttagttagttttgttctttgagacaggatctcatatagcctagccttgaacttctgatcccctttccttctgcatcccgagtgctgagactgcagatatgcccaatggtgcctgggtcctgtatgtggtcctggggctccaccccaaggcaaacgttctgccagtggagccacatcccaaggacttcccacaacccctttgtttcatcagatatcatctggagacatgcgcatgggtcacaagtgctgtagcattttatagaaagttaaatggtcatgaatctcggtatccttagtggggacgccaggatcagctctcctccagagacttggggccaagagtccaaggttaaggaggggttttgaagacattgtttcaacgcttgctcgtaataaatgcgtgatttcattgaagatcccaaggcctagggcagccaaaggctctacctgaggcttacacagcttacccatggcacatgacacagcagggatctcattcagtatttgtccatcttttctacaagccttgaggctttgcaaatgcggagctgtggtggagactgatggaggaggccatccaattttttttttttttttattttcttaccagcttgttttccttctgttttctgggttgttccttccctcttatcatatgtattaactcccctatattcatacatattttctgtctcccgcagacacggatgcagagtttgaatccagatcccaaagcccggtatacaagcatctatggcgccctcaagaggatcatgcacactgaaggcttctggaggcccctgcggggcctgaacgtgatgatgatgggtgcagggcccgcgcacgccatgtattttgcctgctatgaaaacatgaaaaggactttaaatgacgttttcagccaccaaggaaacagccatctagctaatggtattttgaaagcgtttgtctggagctgggaagctcttctctctggggcttcctcccccggacccagcaaccttcatcctcggcaaacagagaactctagggtcacgtgaatgcggtcacgtgaacgcgcgcttttttttttttttctttcaattcaatccctctttctctgggggaagctggtggtagatgtgttttggtatttggtatttattattgtgtggcttttttttttttcttttaagaaaacactcgaaacaattaatgatcagtcataggaaaaaatatcttttgaatgctggatgcaaaccaaaaatacacagaaaaggacagcttctttgagactatttaaaaactggtacagcaggtatctccagcgccaggatctaactaagctttgaaaggtcaagacgttttatgctgacagaggactccgagccactgtggaaggccatccccactttaagctgccggagactcgggcctttgacccccccccacagcgtcctccgtgtgtctgagtcgcatctttctgcaagccagggctgaactagtttcctgtggttgatctagggagggcgggtggaccgcaatggggcacttgtggacagcttttacataaggcaggagtcgatgggctgggactttaacaggcttttcagtgggtgggagaggaccgtcgatagcagcaaagcaacttaaaataatgtttattttgacaaaatttactctgaggaatggagaagtggatgtgatcaactctcccctttgctttttattcgacccacaataaaaacggtttcccttctgtcagccacccttagacccaagcatacccgggtgctttgctgaagtcctttgctttttcatttggtgaccattctttgaatttattcctttggtcaccaagagccatgcccccatgcttctgagatggtggtaacagaccctcatttcacccaaactaccttacgtaatggcttggctcctttaaggaggaggctaggggacttgacaaaacccatccctgcaccagggtctgcccaatgctgtccctgctgcattggtgtaaatgctgtggtgtctgccacctttctgggaataattgtgtgtgtgtctatgtgtgcactaagtaagaggtgccttcctgagaggtggcctgtagtctgacgctcatccctccctctttccacctgttataattaacgggcagctgcattgctgtggaagtcactgggaggccagaagcagaaattccagggccaattcaggctttcaaagccaggctaaaggagacttcagatgaaattcttcacttacaaggctggtcctaagtctgcttagacttcagctaaggcaactagccttctgcatgattgtatcctcttcagtagccttagcttaagggcccagagagctctctgtacctaaaggcttgggacaagggaataaaattctaggcagtgggaaatgcctgaggtatggtttctgagctctaacttttcccaaggttgatttacaaacaaaaggagtctctgaggtttagctgcaacggtgctccagatagctgctctccctattgctgttcagcgtttctgccaccactttgggattttaaaattttctcaccttggctgagctgctaggcaactttgagccttagaaagctaagtccagagtttatctgacttaagttcatggaacttcccatgagcaccaggtgacagcgggtaattttctggagtttgttttgcaggggtagctgggagtatggccaccctactccacgatgcagtaatgaatccagcagaaggtaatgttccgtggctctagggagggactgtgggggataggtagagaggccagaggagcggggtggtggtggtggtggggtgggtgggtgaggaaaagtgggcaaggactggcttccctggagcccacgggaagacttcattcctcacacattactggggtgtctccagaaagccagcgagcattggggctctaggagcatcctgttgtggaaaccaaccgctaagcagagttgtctgcctacctgtagcatcctggggaggagttagaaacgaatcttcaggccctgctgcaggggatttcttggcctgcttatcactactgtgcaacctgtgtgttgagggggtgtgcacaccaaatatatacatctgaccctgttaattgtctctagtcacaaacaaatctagagggaactattcccatctcattcactgtgggttgactttttcaggcccattaatatagagtctcaccatgcaactcaggatgccctggaactctctctgaggctcaggctagcccaaactctgaaccttcctgcctcagcctcctgagtactggggttataggcacacccagcctaattttttttttcttaatttgtaagatggtggcaatttcctagaaacagtgaatatatagaactattagccctctgtacttctaaaattaatgtggccattttgaagggggttaccttttttgagttttgggggtcctcttataaaataaggcagtatttataacccacttggcatcctcatgcatgcttaaatcatctctgccttactcctagggttcagtacagtgtaggtagatgctgtatgacctctcttagagaataacgctaagggaaatatcttcttatgatacgtatagactgttttcttttctggttattttcatacacagttagttaaatctgtggatacagactcatggtatagagggaccgactaggattcctttttaaaaaatctattcatacagggagctgacaatgacagtcactcagtcaatgttaactaaacaaagagtttgtttatttaaacagttttttttcccctaaaaaacaaaaaccaaaaacaaggtggtgttatgtaacccgggctagccttgaaatctttatcccctgactcagcctctagatttttagaattataagtaattgctaccctacctggtgtttatatttaaaaaatacttttttttatgtggatgggtgttttgttggcatgcatttatgtgtacctggtacccacagaagccagaagagggtatatgggatcccctggaactggagttacagacagttgtgagtctctttatgggtgctgggactcaaatccaggacctctggaagagcagcaagtgctcttaacatggaaccacccgtctctccggtccccaacccccttggtgtgactcttgactcaattaggcccttatttaaagatggagcatcttggcagtgtgtaggtaccatggaaactctagggaatacactttgttttctctggtcctatgaaccattggatcattttgtgttaaagccaaggtctccgctaggagacatcacccaattgggcagatgtaattctagtgttgtcccaggggtacgtgtgataggcattaaaatcagagaagacagattattgagaaatcagggatactcttgtaggacaatgttttgttttgacacaggatctcaccatgtagtcttggctggcctggaactccctgggtagaccaggctgtccctgagcttatagagattcacctatttgtgcctcctaagggctggaattaatgacatgtgccaccatgtttagctcagggataaggacagatcagggagagggaagtattttgggggagttatatggaaggctaggaccttggaaagcaggctagctaatcaagcctgaagtgaccgcttgatttggggatcttctttcattccagcttcagacaggaaattgtttagaagtacctactttcctggcgcagagtcacaaagttgaggtgggctacctggagctggccttccgtggcctcttagctggggctatacgtgtgctgttttggtacctgtcaccggtgtgtattctaacatgcttgtttctctctattggttggcttcccttctcactcccatctgggatggggccaaaccatccacctgtctgctggttggttgctcatcccccacctgacagtggtgaaacagcgcttacagatgtacaactcccagcaccagtcagccttcagttgtatccggacagtgtggcggaccgaggggttgggggccttctacaggagttacaccacacagctgaccatgaatatccccttccagtcaattcacttcatcacctatgagtttctgcaggagcaagtcaaccctcgccgggactacaacccacagtctcacatcatctcaggaggcctggccggggcactggccgcagctgccaccaccccgctggacgtctgcaaaaccctcctcaacacgcaggagaacatggctctctccctggccaacgtcagcggccggctgtcgggcatggccaatgccttccggacggtgtaccagctcaacggccttgccggctatttcaaaggcatccaggctcgagtcatctaccagatgccttccaccgccatctcctggtccgtttatgagttcttcaagtacatccttacaaagaggcagctggagaatcgaactctgtactaaaggaatggggcagtgggaagtggttctgacatcctttgttccagcttcatcctcttgttctcgcacccagggcttgtcctgaagggtgcttgcgccaggcccttcgttccctggtgccgtagagagggaggaccggcctccactgaccagcatgctgtctgtggggacatccgaggtggtggtaggcgggagaaacttggggagagggagaagttgcttttctcctccttcctccagaggaatgtagcttttctgcctcactgtggccttctccctagatctttagatcacaccgcagaggcaaacagtgacacagcaaagaaaaagtttatgtacataaaagtaccattaccccagtctgaaataggtggataatgtttatcctttatttttctacatagagatttttgaaattgtgtgtgcttgtgtgtgtctataaataatattagagttgggaatgatggacctgttttgtttttttgttttttaaataagagagttccattcttccatcatgagaagtaaaacaaacaacaacaacaacaaacaaggggaaaaaggcaccaaagtaataaatggctttatgtggcctgaaattgtgtgtagcgcccctcccatgggagtttaacttgaatgtaaaataataaatataaagtttatattttgaatttctcttttcatggggaaaaaggtacgttgaaaacaaatcaaaatagtctatcacttggagcttttttttgttttgtttttaattttaattttaaatacagttaccctgcgtgcctttctgtcttttctaagacttccaggaccaaaaatagggtcctggagcattttctccctctgtagacacccccgtacagtcctcagcaccatggctgtctcagtagaataagaatggctggccttaaccttccgtgtgagtgatgtgagcgtgtgcctccctgttcagctcttagcactgggaatgccactgtatgcctagccaattgatgagacagttcctgcctttgtcttaggagtaatctccatagcaacctcctccttgggcacttctgctaacctggtctataaggtttgttagtagtctcctgttgacccatttccccggcagtctagggattttgagtatttctggtactcatctgtcacctaccctgttcagctccacgacttaaacatcagagcctcttcactgcactgaggccagccctccagccgggactgaagcctgccacgatcctccgcccctcccgagctgctcagcagccttgtctcaccctgtgtcacttgagaacctccgtcctttccgctttgttttctgaagtggagtcagatcatctcagagaaagcacaagcctgtgttgtccagtctcccatcctcatggagatgacaggataggctcagtttccttcttccagttgtcaacgagtaagctgggaagacgctcatgttttcgtgtccattgccctggtctcatttggaagccacgactagcatgctccctcactggggaggcttagaccttgagttcccacggatggtcatgctgctgcctgggaagaaattgagcttgtacttggagaatttcatcttggacccacgtaccacttggtgccagtagatgcagctttttggttttgtccagcagctatgagaagttacacactggtcagctgactttttttttttttccccagagagaaccacctctctcaagtactcctatgtattccaggagggcttcctggctggctgcagtttgtcttactagtgtcctgggctggctggtgtcctattatcactgacaatgtttctattcttaccctgctagcattgagtagagttaaattctataaatggagagggaagtcaaattgtagagtctaaagtcaaatttaaatcaaaccccaaactattcctataccacgcttagatacattgttgactaatcctgctgcaagaccaatattttcccttggattttctttacagttatctaatactaggatagcccctttggtcatggccttataaggtaggaccaggacttcaggactctgtgagcttgaagtccaggggtcccatcctggctatcctctcctcatgattggtgggtctgcaggaagatagcttttttaacctgcccatccaattcagtcaccctaaggttgagcgagtgatatgtctgcaaaaaagttgttaaaggttgggatacattcaacgtaagttctgtgccagtcagtcccccctcccttagctccaacattgaaattgtccttgaccctcacgcacatgatagccagtgtgttgattgtcatttttgacgttgcaaatttcaagataggaaaaggctcagtgaccagtttaggatagccataacctatctcggtcattggcatctttggagtgacatccaaggatggaccatcccacctgtgtacaatgataatactttagctgtgtgtgtgtgtgtgtgtgtgtgtgttcaggccatgtgacagtcaaccatttaatagatgagtgttaatttattatagataaatattgatctttaaaaatgggatgctcttaattcatgactttttaaagaattggattaaatatagctacttttatgtgagctttcccctctgtccccctgccccttctctctgtctcatttctcacaaccatcaccctccagtgtcacccccaaggctatatctccaacatactgctatgccattaaggttttatttaactttatttatggataattatgtctatgaacaacaaatgtgccgttaccggtcacacagtgtgtgggataagagtggcctagtgttgctttccgaatgtcttaaaatacctgtggtcaagattgtttttgcctttgtggcctttgggtttggagagcagcattgtgttcacatgtgtggatgtctgtcgtgctgctacagttgtaacactggagctggaaaaaataaagcattgatcttgaaaccattgtggggtctttgtggggatgcagaagggtccggagaatgggttcagaggagacttgatgcgctgggaactagctgaataggaagcagatcatcttgccagcagagggcgctcatgtacatcacacggcctagaggcctcctgcttgaacatcaggaggatggctccctcaccccatccccaccccgcccccgcacatacctctgtgcagagtccgtcaggaacctcttacagagaaagtctcagatgaccagagtccacagtctcaaaatatcacagccaaagccagagagtagaactttcccaagaggtacaggtgaggaagcctgaaaggaaaacgtttgctttgagaacgctggactctatccccagaaccaaggccaaagatctgctcagtatgactgccgagtctctcccaaaaaggtacaaagttagaacggaggctaagcctggaatccagccatggacacaggtgccaggtgggcaaaggtgcagagcggagagtgccacggagcaactgtctgacttgtctcctcctacccgactctgagctactctatgtcccttgtggcttgtagctgctgcattttggtgtgggggtgtggggtgggttcagggtctactgattcaacccagtctgcctgcctgcctcagccggcaaacatggtagtggtggtgagcggaagtcatgtggagctgtgggaaggaagcgtgagatgtcctaccctccataagatgcagtctagtagaatacaaagccagcccgccctgttgtcgcaggcctgttgatgccagctacctgggaggcaggaggtgatacattcaagaccaacatggattaaagagattagtcaagccaccatgagtagcttagtggggcaggttgtgtgaatgggagacctggctccatttaaagcacctgccattcttactgaggacctgggttcagtcccctacactataggtggttcacacccatctgcaacttcgtttagggaatctgatgatgcttctggcctccaagggtgtctgcacttagtgcacgtagccctccgcacatatgcataactgaaaataatcttaaaatcttttatttttaaaaagtttaaggtggtctagggttaagctgagtgtccaagtacttgcctagcacatatgagaggttctggcttagtccctagcacctcactgacacacttcagtccccttccccaagatggcagtgctccatgctatgggggttacaggtagcatggaacctctttgtgtactgttggttaggttcactggttctccctagcctgggggggctgaagctgctctgtctggcctggcccctcagtgttcatgttgcgtttctttccatgcagggactaatattatgctggacattcgcaatctgctccagtggggcagtattcaccacagaaacgagcggtttttacagatctgggtgcttgtctccctgagagctggtagtacactaggctggtccatagcacacgtttggtgtgaagtacgatttttttgagagggataaagctggtttcaccttagagttcttggttagtgccgcctctcttagctcctggcctttctcctgttactcagagccccctgcagaacacagttcctgcctccaaaagtccctaaaggaagggttttcttttctcctcagctaaggtctcctgtcgtgacttttagtgggtaactgctctactaggaagaactcaatgctgatgctgaaggagagcccttggtgggatggatgcctcgggaggatgccattctcccactgctgtccaacagatttagctgtgtgtggggggcatgtgtgggagagaggaatagaggattattaccaagtgtcctatataatctaaggctgaatgtagacctttaagtatgggttgggaagggaaagcctgggccatagacacactgctttggggttttgtccatagtaagctatagtaaccatttaagctgccgttttaaattctaaaacaattttgtgtatgtgttgggggttgggtggggggcaggtatgtatgtgcacatgagtgcaggtgcccacagagttcagaagagaacattggattcccttgaagtttacaggctgttgggagccacccagtgtgggcactggagaccatactgaggtcccctataagagcagcatgcactcttacctataggaccatctttctagcctctaggttgtttcctcctcctgcttctcctccccatcctcaggctcctcccactccctcctttcctccctccccatcctcttctctctcctccccccttctcttcccttttcaccatgataaaatgcctggctaaatccataaccatctacatggattgggcccaggaaatcttcacagtcatcaagaatggccatgaagcctctgagctaattgattgagctctttaggtcaaaattcagtgccaggacccaatgaagtaagaaggggatgagagtggtggtggtgccagttacagggttatttacaacatggtaaaggacatggggggcaaagctcccaacctgtcacccaacaggcaaaacagctaggggacaggggcaagaaagaccaagtgggcaagagaacaacttcaagaaaacagaggaggaagattgtgccttatagggaggtgtgatcagtcacatcacggaaggcaagggtatgtgagatgcttgctcacttctgagagggagggagactcagagggaacagagaaataagaagaaatggagagcagagccgtggtgtggtggcacacgcctttaatctcagcactcgggaggcagaggcaggcagatttctgagttcgaggccagcctggtctacaaagtgagttccaggacagccagggctatacagagaaaccctgtcttgaaaaaccaaagagagaaagagagagagagagagagagagagagagagagagagagagagagagagagagagagagagaaatggagagcaggcagaacccttggtgccatccctacccccttcttacaggtaggctccatctcccaaagattcaacgacctcccaagaatgccaccagcacttaaagccctcgtttgttggagacatttcacgttcaacccgtaacactgcctttgcaagaagtttggcccttaagtaccaagttatggggtgatgctgttattggagaaacccatggcacagaagtcacagggcgagtggggttggcgagcgtcctcagtagtttggtgatgtaatgaatttcctagaaggatgcctaagaggcaggcaaagaagattggaactgagtatcagggactgagttgctgaacaagttcacggtctttgggaggtggggctcagtggtaggtgaaaaacaccacggaaaggaaggagggccttactcaaaggaccagcaggtggcagcagagaggctgagacccaggcataaaacaggcacagctacttggagaagttctggtatctccacgctgagccactgctgttcttggacccagggtccttggatggtccatagcagtcacactcttgtccttggcctcacatttacaggtcacagagccaagagagatctctgagatttgaacttgcccccctctcaagagaatacccaccacctgaagagaatgacatttccttggaggatgcttttagcccgggccgacagttgagcatatatgctatgcttgaccatgactgcttcatgaagtattgcagtggccccgcccttcccttgtttgcaccagtgtataatctgggctgaaatcatgtcccaaacatgcttttcatttatgtagcccaggctggcccccaactcataatcctcctgcctctgattcctgagtgctgggtttacaggtgtgaatcaccacctgcgtcgaaaagcttttgatctgagaggaatacatgtgactgtgggaatgattatttcaatattacttcatattcatgtcccacatgttctgggtgggatggggaggccacaagaacagaaaagggatggaggaagggcaaggaaatagggtggggagaaccacaacacacactttgttcaaaaatatcataatggtatctaacatatatgttgactaaaacatataatttagatatattcactttatgtgtttgagagttttttttttctgcctgcatgtatgtatgtacaccacttgtgtgcctggtatcctaagaaattagaagagaaagttaggctccctagaactggagttctggacatttgtaagccaccaagtggttgctggaaaaggaatctgggtctttgtgagaacaaatgctcttagcaactgagccatctctccagccccatatacttatttttaaaactttttttttaattgaccagaagtgcttatttggccagaattgctcatgaaaataaaatctactaatatgacgatttagaaaatgcaaagaattcaccagcatatcctgctgaacttgtatagcattctaaacatgaattcctttcccattaaaatgtcctgagttattctgagcttgttggatgagagctgttcctttagctctgggatgttgctcactgaaatcgtgttggtcctaattttcatggaaacgtatgtagtgtcatctttttcacagatgagcattccatccgagtgtttgtcatgagtaaacccacacagatgtcattggaagagatgatccattctgcagagaagagtgggggcggggctcagaaatgtgtgcattgtacagagcagagcagaggcatatttgttttttttttccttttaactttttattgattctttgtgagtttcacatcatgcactcatccatgattttgtatatgtcctctgcccttgcaacctacccacaaaagaaaattaagaaaaagaaattaaaaacgataaaaatcttgttgtggaagctgtagtgtgtcacagtgtgtcccacaatgtactctcttgtccacacttcttcacttgcaaatgtccattgcagtgagtcactggtctggttcaaggcctctggcttctgctacagcattaatactggacggatccctgtattgatataggcactcctcttagatgtcctgttgttgccctgtgtcatggagatcttgtagttttggatctgcaggataggccctttcattcactccagaaattaatagatgaggtagatgttgggaatcacagccctggatctgggccagggggggtaggagagttgatcagaccactcgctcccacacccatgtaaccagggtgagctctccagcactgcccatgctagcttacccaatgctgcagccagcaaggggcaggaacagctctccctctcctgtgccctcaggctgctcaccctcccaccagcatggccagctccactgtgctgcccaggtgaggtgcagggcctgcttgcccaagtgctgcagctgatgagggacagagccaattctcctgctctcatgatcccggagctagctctccagactgcagcaggtagtaagcggggagagcaactctcccacacctacttcaccccatggcagacgaatggtgtggcccatctttgaggttttaatgtggctatacactgttctcactgggctggttagaacatgtagcttatggaatgcaattttatatttgcttccccactcaatcctgaatttctacttctggccacaaggtggtatctgattttcattaatgctgaagacaaacacctcatcttttacagctcagtcaggaaactcctccaaacccaccccacccctcatcctttctgtttctgcatctgttgcaccagatggaattcctaaagaaagttcggttaacatgtctttgtcgaggagacttgtattggatcaatcttagctgcggcaagatatagatatgtactttcagtgtttttggttcatctttgattatctttcaccgcctctattttatagcctagaatagaagcacactgtacttttacaagtgcctgctctaggctgcacacgttagcttgcgagtgggacattgcagaggagccttctcagaagctgccttgccagctgggtatacacagggtacacacacaagatacccactgaaggaagcacatgagtctagttgtctcagttctagacttgtgttcagtgtaaggtctctaaatccatggggattgcattttttagatcttctgagtttatgtgtatgagtattttgcccgcacgcacgcatgtgtatgtatgccgttgtacttactggcagaggtcaggaaagtgtgtcagtggactggagttacaagggatggttgtaagccattatgtgggtgctgggaactgaacccaaatcctctgcctccagatccctgccccataagggattaagattaataggtgttcccttatgtttttcatggcaatatgtccacatgggagtaaactcccaaataaaaggactgcatagttgggaaaggtttcacaaggggtggggtaggtggtgacactggtttacattagtggatttgccacacacactctttagtgcagggattacaggcaagtgtcactaccatattcagctctgatgtgtatgttcttagaaagaaaattttggacagggacatatagaccaaggagaacaaacagcttctagatgttataagcaaggctacggtgacagagcatcatgtagtcagtgagacaggctgatctgttttgtttttggggcctgtgtgtgtgcgtgtgtgtgtgtgtgcgtgcgtgtgtgtgtgtgtgtgcatgtgtgtgtgcatgtgtgtgtgcgtgcatgtgtgtgtttgactagacatattaaagtttttgctctttgctgacactggtagacagtgtggaagttgcctgtctgattatatattccagagccaaccctggcaatagaagctacagctgtctggccttttcctagcattttctgggtgcctttccttccttcttttcttcagggagtctctgggagccagacgacagccactggtggtgccctttggatgttgtgatagctatccttggttgtcaacgtgacattcgtgggatgagggagtttccactaagaagttgcctctcttagattggtctgtaggcttatctgtgggacattttcttgactgttgattgatggaggagggcctagcccactgggtagtgccaccctgggcaagtggtcctgggttacacagcaagtgtgtgagctgaagcaggagtgcagccagtaagtggctttcttccctggttttgctttgacctctcgccttgagttcctatcttggcttccttggatgagggactgtaacctgctacaataagctcttcctccccaggttgcttttggtcatagtgttgatcatagcaagagaatgtgaactagaacactgg

SEQ ID NO: 512 - DNA, 1295 bp, Mus musculus
acccacatgacagcgggagcgatggccgggattctggagcactccatcatgtacccggtggactccgtgaagacacggatgcagagtttgaatccagatcccaaagcccggtatacaagcatctatggcgccctcaagaggatcatgcacactgaaggcttctggaggcccctgcggggcctgaacgtgatgatgatgggtgcagggcccgcgcacgccatgtattttgcctgctatgaaaacatgaaaaggactttaaatgacgttttcagccaccaaggaaacagccatctagctaatggggtagctgggagtatggccaccctactccacgatgcagtaatgaatccagcagaagtggtgaaacagcgcttacagatgtacaactcccagcaccagtcagccttcagttgtatccggacagtgtggcggaccgaggggttgggggccttctacaggagttacaccacacagctgaccatgaatatccccttccagtcaattcacttcatcacctatgagtttctgcaggagcaagtcaaccctcgccgggactacaacccacagtctcacatcatctcaggaggcctggccggggcactggccgcagctgccaccaccccgctggacgtctgcaaaaccctcctcaacacgcaggagaacatggctctctccctggccaacgtcagcggccggctgtcgggcatggccaatgccttccggacggtgtaccagctcaacggccttgccggctatttcaaaggcatccaggctcgagtcatctaccagatgccttccaccgccatctcctggtccgtttatgagttcttcaagtacatccttacaaagaggcagctggagaatcgaactctgtactaaaggaatggggcagtgggaagtggttctgacatcctttgttccagcttcatcctcttgttctcgcacccagggcttgtcctgaagggtgcttgcgccaggcccttcgttccctggtgccgtagagagggaggaccggcctccactgaccagcatgctgtctgtggggacatccgaggtggtggtaggcgggagaaacttggggagagggagaagttgcttttctcctccttcctccagaggaatgtagcttttctgcctcactgtggccttctccctagatctttagatcacaccgcagaggcaaacagtgacacagcaaagaaaaagtttatgtacataaaagtaccattaccccagtctgaaataggtggataatgtttatcctttatttttctacatagagatttttgaaattg

SEQ ID NO: 513 - protein, 286 aa, Mus musculus
THMTAGAMAGIHSIMYPVDSVKTRMQSLNPDPKARYTSIYGALKRIMHTEGFWRPLRQVMMMGAGPAHAMYFACYENMKRTLNDVFSHQGNSHLANGVAGSMATLLHDAVMNPAEVVKQRLQMYNSQHQSAFSCIRTVWRTEGLGAFYRSYTTQLTMNIPFQSIHFITYEFLQEQVNPRRDYNPQSHIISGGLAGAAAATTPLDVCKTLLNTQENMALSLANVSGRLSGMANAFRTVYQLNGLAGYFKGIQARVIYQMPSTAISWSVYEFFKYILTKRQLENRTLY

SEQ ID NO: 514 - DNA, 63609 bp, Homo sapiens
  misc_feature (1)...(63609): n = A,T,C or G
acagtagctgaagtgttcagcctgggagcctgagaggagagggaagatctggctgctctctgaggccactcccagggttcctctctgctacccaatgtttctgaaggcctgtctccacaggccaccaagtggagatccttggttaacccttctctcccacctgagagactctcggtgctaactttgcccccccccgctttggtaggtggcaacctggcaccctttgcacatctttctcctgcaaattcacaatcactctgcaattgccccccaacagcagctgaaacagaggtccagacttgagaaacacatatgactaaagtcaggagagaccagcaaggcataattagatgctgtggacagagaaaacacgtggaacgcaaatggaaaaccacagtggttggtgcttctaactgcaaacgagctgcttctcccaagggcaactcttggaagcagtgggttttactcagtcctgatctgtctccaaagcacatgcttgttatttttatgcgacatcatctccatcctcctacagaggggcatcttctctgctcagtagtctatttgaggcagggaaatacagagactttgctacctgaaggatcgtggtcagtgaactctcttattcactgtgcatagagctcagtacaaaactgtgcaaatgtggccatgtgctaatgtgctgtgtcaggtgaacctgaccagagtggagaattgatgactattgatttttacagagcaggcatctgagatatgacaaatgatagcaataaaggagttttatcaggctctgagtttatttcaaaggtgagtaagtgaacgggtattgaatgacacacctggggttttatcccagctctgccaccaaccacttttgtgtccttggacacgttactttaccttggatctcttttgtccacctgtaagaaaggacttatagactatatcatactctagttctcttccaggtccccagcttagtaactccatgttgtcctaagaaaggtagtcccctggccgggcgcggtggctcacgcctgtaatcccagcactttgggaggctgaggcaggtggatcatctgaggtcaggagtttgagaccagcttggccaacttggtgaaaccccacctgtactaaaaatacaaaaattagccagatatggtgatgcgtgcctgtaatcccagctactcgggaggctggggtggagaatcacttgaacctgggaggcgaagtttgcagtaagccgagatcacaccattgcactccagcctgagtgacagagcaagactccatctcaaaaaaaaaaaaaaaaaaaaaaaaaaaaaaagaaaagaaaagaaaagaaaggtagctctctaatttagtgtttgtgacatatactttggaagaaaaaaaaagtcacctttttctctcttctacacaacctgtgctcagaatctccagctctgaggtgcaacatgttctttaactccctgggaatcatggacgtctgcaatatttcatgctgttatataggaagatgaagctcttttccaaagaaattctgactcatttaataatatgtactgtttattcattgtgtgtattcaaggaacttagagtgtaatgggagggctaagacatggcttccagagctgcaatataaagtgcaaggttctaagtaagagctgtggaagaggcagggaagagctccagggttcctcctactttttaggggtcagagaagacttcatggaaggtgaggtgtctgagttgagaaatgaatgttgagcatcatttcaacagtggagatgtggagagtcttcccttccaagaggatataagaagagacaagggccataggttgagggacatggttttgggggtgacaagcaaggtctggctataattaggtgactctatgtcctggttttcccaggatagtctcagcttataccctctgtcctggtggaattgttaacagtgaccctttccattctcaaaaagtgtcccagtttggatgataaattacagagtcactatagctatagatgatgctatctcagaggctggatccagatgtggctaataggatctaagagtcaaaaaaagagagagatgactctatgcttggctgcaggttggtaaaaaggaggtaaatgcaaggggaaaaaatggcattagaaagagttggtggccaggcgcagtggttcacgcctgtaatcccaggcggaccactcgaggtcaggagtttgagacccgcctggccaatatggtgaaacccccatctctactaaaaatacaaaaactaggccaggtgcggtggctcacgcctgtaatctcagcacttggggaggccgaggcaggtggatcacctgagatcaggagtttgagaccagcctggccaacatggtgaaaccccatctctaccaaaatacaaaatttagccgggcgtggtggcgggcgcctgtaatcctagctcctcgggaggctgaggcatgagaatcgcttgaacccgggaggcagaggttgcagtgagccgagatcatgccgctgcactccagcctgggtgacagagtgagactttgtgtcaaacccgtccccccgcaaaaaaaaaaacacgaaaaaaaccccaaaattagccgggagtggtggcgggtgcctgtaatcccagctactcgagaggctgaggcaggataattgctggaacctgggaggcggagattacagtgagctgagatcaccccactgtgctgggtaacagagtgagactccgtgttaataaaaaagaaaaaaagaaggagttggtgattgtgaagaaagattagaaggacagagctggaggggtctgcataccagtgagtccaatccagataatcatttcacagatgaaggaacgagaaaaaggaatgttaggacaggaacgcaggcctcttggtgctcttgcctcactggactgagttgaatagtgtctgtccctcccacccaattcatgtacacccagaacctgtgaatgtgaccttacttataaatacagtctttgcagatgtaatcaatttaagacaaggtcatactggattaggatgggccctgaatccaatatgacaggtatctttataagaagagaggagttggacaggcacagagacacacagggagggtgccacatggcaacagagcaggggtcagagtgatgcgtctacaagccaaggatgggaccataagctgggaactggcagggggagggtcctccaggatagctttcagagagagcatggccctgctgacacctccatctcagactgctggcctccagacctaccgaccgacctacctacctacctacctaccttccttccttccttccttccttccttctttcnnnnnnnnnnnnnnnnnnnnnnnnnnnnnnnnnnnnnnnnnnnnnnnnnnnnnnnnnnnnnnnnnnnnnnnnnnnnnnnnnnnnnnnnnnnnnnnnnnnnnnnnnnnnnnnnnnnnnnnnnnnnnnnnnnnnnnnnnnnnnnnnnnnnnnnnnnnnnnnnnnnnnnnnnnnnnnnnnnnnnnnnnnnnnnnnnnnnnnnnnnnnnnnnnnnnnnnnnnnnnnnnnnnnnnnnnnnnnnnnnnnnnnnnnnnnnnnnnnnnnnnnnnnnnnnnnnnnnnnnnnnnnnnnnnnnnnnnnnnnnnnnnnnnnnnnnnnnnnnnnnnnnnnnnnnnnnnnnnnnnnnnnnnnnnnnnnnnnnnnnnnnnnnnnnnnnnnnnnnnnnnnnnnnnnnnnnnnnnnnnnnnnnnnnnnnnnnnnnnnnnnnnnnnnnnnnnnnnnnnnnnnnnnnnnnnnnnnnnnnnnnnnnnnnnnnnnnnnnnnnnnnnnnnnnnnnnnnnnnnnnnnnnnnnnnnnnnnnnnnnnnnnnnnnnnnnnnnnnnnnnnnnnnnnnnnnnnnnnnnnnnnnnnnnnnnnnnnnnnnnnnnnnnnnnnnnnnnnnnnnnnnnnnnnnnnnnnnnnnnnnnnnnnnnnnnnnnnnnnnnnnnnnnnnnnnnnnnnnnnnnnnnnnnnnnnnnnnnnnnnnnnnnnnnnnnnnnnnnnttagtagagatggggtttcaccatgttagtcaggctggtcttgaactcctgacctcgtgatccgcctacctcggcttcccaaagtgttgggattacaggcgtcagccaccgcgccaggccacatttctgttgttttaagtcacctagtttgtgtcattttgttagagcactcccaggacacaaatattttacgctttctgagctttaggtgcagcagaatattcaggtagagctgccgggaggcacatgaatacgtgggtgggactggaatgaggaggagctggggttggtaactggggtgtgggaataggagagatgaccaacgggaggacaggacagcagctgccaggacggggttgcagggagggaggaaggagagggagaaaaggcagagggccccaagaaagcgagcggaagtgaggaagggattccagaggaggcggaggctgagaggttcatgctgggaggagcagctgatgtggctggcacgcaaaaattcctgtagaaaactgcaagggttagaaactgccacgcaatggtggcaggcgcctgtaatcccagctgctcaggagggtgagacaggataatcacctgaatccttggggccgaggttgcagtgagccgagattgcgccactgcgcttcagcctggcgacagagtgagattctgtctaaaaaaaaaaaaaaagaaaggaaaagaaaagaaactgtcacgcaaagggttaaggactgagtgcatttttagcagagacagcagggagagtcctctcccgaggacttcaggatggaggagagacttagggtactagcttcaggtaaggagcagggaagagaggttctattaggtgatgggggcaccaattgtatttgtggaaacaggcgaggagagggaaaaatgcagatgtcagctcttgcggtggcccacccacgtcacgaggcatgatgattggtagagtcaagcagcagagtgggaggacgccagggcacaggcggctcctgggaggcagatcaacgcttctctctcaagttactgattacaccccagctctgacccttgccagtcaccactggttgtacaaggatgcctggtaaagtgaggcaaccctgtgttctcccatctgatgactctttcccatctcttctttatttgacttggggtttgagagggaggctagcttttgcctccatttattcgtccatctcatggggagactcatttctgtatgagtctcggatagatttagaaacacagcactgtcccagggaaagcaaggaatctggggctacaggacaagacctgtatgagggagggagggactgtgtgcccagagtcctttgaggccctcccaacatgtgcactccacttaaaattacccaggatggggatgagagtgcattataaaaaacaggccaggtgcagtagctcacacctgtaatccaaggactttgggaagctgaggcaggaggattgcttgagtccagaaggttgagatcagcctgggcaatatacagtgagaccttgtgtctacagaaaaatttaaaaattagccaggtgtggtgacaagtgcctgtagttccagctactcaggaggctgaggcaggaggattgcttgagcccaggagttcaaggctgcatgagcggtgatcataccactgcactccagccagggtcacagagcgagactctatctcaaaaacaaacaaacaaacaaacaaacaaacacacaaaccagaaaaacccacaaaacatcaaagatcaacaaagcctgaaagcacaccacactaccaggtgccctagttgacataatgctagctgcagttgctccgtggccaagagtcttctctctcacacaaagcagaggagtgctgggacccagggagacacccagcactggctaaattataagtagggtagtaatgtacctgtgtgttgcatggagcagatggatgtcagggctagagtaattcttatgaaaaaaagcaggatttgggagaaagcctgaacctcttccctctgcaaccctcattttctgtcctcttttctcccaactctccaaaattatatctaaacttcaccatgagcttccatggtgcagcatatataattgagatatatactcttccaaatatagagtttattttcctctatattttgttcaccatgtagtatgaatgaccaaagtctacagaggaggaagcttgccagaaacaggccagagcccctcagctagtgaacactggaagcagggcttgcacaggtctacacctccaagtcaggtgcttcttgccctgcacattctacagcttcctctttctaaatggagcttggcttccagttaggccagggctgcatgacgacatcttcagaactacaacgttcaggaactttacgaaagactccgatagaagcaacaagtcattctgagcttcctggcctgccccatgggagaggaccaaatgagctgccactcctctgctcctggttgccatgttcttgcctttcaaagagagagctgctcccttcctgatggcagtgtggcccaagcactgggttatgctgtctgggatgccaccctctcgcagcatgccttccctagaggtctgggagctggaccggctgctgccttgtgacatccgggatggcgccttcattactatgccctttcactgctatgcacaaaaccgtggggaggggtttaggcacagatccacactgccaaactggcttcccaagggactggctacctctgccatggcctcaaaggcaaggaatcagaaggccacctacaaagtcacggtgcggggatcgggaggctgccacttatcactgctgcaccccctcattccataaatacctctcagcatccatgaatctggtgaccaaacactgccatgctgttgcagtggggaacccactgcccgccccaactgttcctgcctcaagtgtctgtgaccttgctaggcagcagaaaacaccaaagaacaggaagggagcttcagctcatgttcactttccagatctttccaattcatctattgccagaatataattcatggctagacccttggctgcaagaaagtctgagaaatgtggctttacatgttctggccactgcagtccaaggaggagtgcaagatgctaagtgccaaaccaccatatctaccataggtggggagaaaaaaatattgaattctgttaaataatcaatattccaaagattttcaactgtttctaacatttatttaatgaaattaaacaaaaatcacgtctgtgaagattatgggcatattcacatttgctaagaattctcttaaccatcaaaaggcaacttctttccactggtatcaccattgcaaagttcagggggtttctcatccattaggaggtgtgtgtgtgtgtgtgtgtgtatatatatataaaatatatcttatacatatgtattatatataatataggtatacatataatatacatacatatataacaggtgtatatatgtacatagatgtatatatgtatacataggtgtatatatcatatatacataggtatatattaaatatgtgtaaaatatatagacgtgtatatatcttatatataaaatataaaatttatataaattataaaatatatataaaataaaatttatataaattataaaatatatataaaatataaaattttatataaaatataaaatataaaatatataaaaatatatataaatataaaaaatatataaatatatataaatataaaatctatataaaatatataatataaaatttatataaaatatatataacataaaatttatataaaacatacataaaatataaaatttatatatataaaatgtacatatttatacataaaatgtatatatattttatatatacacatggatatgaatgctgagaggctaagtaaaaaaatacatttatatatacacatatatctatatatatttatatacacaaatcaacatattttatatatgtacatatgtgtatattctatatcctatctatatatcttatacatatgcacatatctatattctatacatatatacttctatatatagatgtgtgtatgtatgtgtaaatatggtatatatttcctaaaaagaatggttttttatttttaaattacagaaataataaaagtattatttaaagtctgaaaaataaagtcaaagcagttgcctataagcctccatcactagcacagtaaccatgcgattcttttcctgagcacatttacatctttgtgaatgcaatggttatagaatttcgttttgtttttttcacctaacattacattataatcatcgtccatgtcgtgtaatgtaaattccacttgtaaaggctgcataatatttcactaatattatgcacacatcataatttccttagccattcccttctggttgaccatttaggttgtttccaatgatttactgctctaaggaatgctttgaagaagagcttcctgtgtatttgggtttttgttacattcccagaagtggggcagtgggttcttacagacttaatgcttaaagggcatccacttaaaaataaggatcaacagcttctgatcagtatttcttaaaaacgacctttgacaaaagtagagttttctctagccattacagagatggctaagtaaaaacacagagcctgtttttacttatcacatccttagcactcagcttgccagctactatctgcagctaccaaaactaggcaaacagtgctcttggtcctgacgcctctattgacctctacccatgctcacattactgtatctcaaatccctaagagctgcttgggatgctgatcacggtgagggcagagagtaggctcagcctcttcagggtcttccccaccctttcatatctcaggatccagctttcctgacgagaagccttgtctagataaggcagggaggccctggtgcctacaagttgatcagcccaagtcatcttaagccctggaacacgcaatttagacggacacttccagaggcagacaggtccctcccctactttctgatttctccctttttccccagactggagcaaaacaatattaaaacagcctgggttacactttattgaagaggccagcttaggacgactttaagaactaggtgaccacagtcttaagacaggcaggggcaaggctgtaagattttactctcagccagttcacactcctaactgtgagatcaggcctctacagaccttatgggcctatcaaacccaaagaaaatttcctggaggtgcctactcagaggggctccctcctggtcactccttatagccttgctcggtccagggcagggtgggttcggtctctcggtgagaacaagaggaacacatttagctctgcattatgtatttaggttgagagaaacaatttcgaatgaatgggggtctctccaacaaagcagtctagaacgggcccctgaggtttgaattcaggccttaggaatgccaaagctcactgagcgattctgtttgcaaacccacccgccacggggacggattttccccgagacactgtcacccatgcctccagctctgggcataccccactgcggcccctccccaatgacctcccctgcccctcgcggaccagcccatcctcaagatagtacaactttccgggccaccccacgtctcctctcgcccccgtccggttgcttggaaatgtgcacgggacggtgacgtcacacagggaggcgggtccccactgtcccgcacaccaatggcgcggcggccgccggcctcttggttcccggcgattggtgtctctggccgctgcgctccaccccagcccgccatggcgtcaggcgccgcggccccggggaggtggctcccactttaagaagtgaagttttgcgcccctccccctccctgcccacctcctgcagcctcctgcgccccgccgagctggcggatggagctgcgcagcgggagcgtgggcagccaggcggtggcgcggaggatggatggggacagccgagatggcggcggcggcaaggacgccaccgggtcggaggactacgagaacctgccgactagcgcctccgtgtccacccacatgacagcaggagcgatggccgggatcctggagcactcggtcatgtacccggtggactcggtgaaggtgaggcgcggggagacttcggggacgcaacgagcggagaaggagcgcgcgcgcgcatttgcatcccgcgcgccggcagcctcggggcagcgtcccgaaaccgagctctccccaggaccgcggctggccggggtcgccccaggagcagctgcgcgcagcctgggcgccgcgccttccgccgaccccgcgagggtgcccggtcctcgccccgcaccgcccgctgctccagccgcgtgcccggccccggctgctggcggcgctgaggcgggggaggcggagtggcgagcaccgctggcttcggcggcgactgggctcccgggggacgcgatcgctgaagctctgcacagtcttaccacgctggccgttcgggctggctggggccgcccacacgtgcgcggtttccgagggagctccccgcaggggaagccctcaccacgctggagctgagaaacgtgtggccctggcccggccgcgcgccctcgggacttggtgtgtggctgctgctccccgggttatttcgggaacttggggccggcaagtcttctctcgactagtggcagctctttaccggttcgacagcggcccgtgggatcccctttctgagggttcctgcacttcttcccccgactttgggtcgccgagccgccgggaggcaatgacgtttgccttctccttttgcttgcggggaggtgggtgggcttgtgccttacagcccttgctgtggattgtgtgagaggcactcagtttcctttaaaccctgtctgtcacttgccccggtagttttaactgcatttctgtaaagaggcagcgttactaggtgcgttttgcctggtagactgagacctgccctctgtcagcctgcccagaacaccccagggccaggatagagtagtgcaggaagtaatgccagtattgactgttacacgttgcacttttataggcataactcgcctaattcatgcaacagccctgggggttaacagatgaagaaactgaggcgcagagaggcgaaccgattaccttgcccaggctcctacaccacctcctatcctctggctgcagctgcagtgtgctttggaggattcggaggcctctctaggtggcaattattttgcaaggcaggtcccacagaggcacccccagcagctttatcttgttgctgatgctggtcctgcatgagcaggtatgaaggccagaaagtataactcagagggttttcccggctccggggagctcgcttggagccagcagtcagtgtctggacaggcagaagtccagtgaggaaagacatgggcttccaaggtgctgctggacctaagcctgagccatcacccatatgtccctccagtgtcccagtggggagttagaggaatggttctcatctccaggaaagacactggactgataccaggtggcatttgtatgggaaagaatccctcaaatgtaataaaattctccatgattgaagctgttgtctcaactgccctgggcagagtctggggaaagttaggagcagggaggtgttatctgagcaggccctagtcctactggtgtcttgagatgaatgttctattcgggaaccccacagtgagttcactttagagcatcattttagcttatttttaggattagaaataattagttgtgccttctgagcaccctttgacactctcaagaggcgtttctcacacgtttaaattgtgtgatctgtgtttagtttctccctgccccatacatgttgatatgttttggttcagatgtcacctgtatacttagtattactttccatagcagttttcacctgtggacaggttaacatggtgtgaatggtagaaggagccggtctggttttcctagacaagtctgtaaaacaaggcgtgggttagctaatcagtgaagtcttctaggttctgggattataactgacccttaggggcccttccatgctgaagtgtgcagggttggttttgaggctgccactgagtgccaaggtctgccaacatcagcacagttgtctgccaagcatgaggagtcaggggtgcatcctccatcatggaaaggcttgggggagaccacacctgtgttcctcttaagtattttggatgatggcgaagaccgggagtaactgagtcaagaaacccgggttgggcttcaagccctgctctcacttgcttcatgcctcgggcactgttctgtgccttagttttgtcactataaagtggggacagtggacctgctcagtccctctccacatttttaacccatgcctcgtttctctgaacacacaacacccatcgtcctcttttatgttacttgaaatatcaaaagaattattacagctgaaaacaaatctatgtaaatcggatcttgaaagagagaaagctttctccagttttgaaaggcgccatttttaactttgatcttgtaatgacaaataagaatgttgaatcggctggcttttttctatcctaggtaatgtggactgtggagctctgtgctggtcactttcaaccctgaacctgatgctacttattttgcagttctaagtgcaaagtcggcctggtggatgcttcccattataatattaaatttgcttcttcgtgaggtcacacctcacatccccagtgtcactttaataactagtgttttttacatggtgggccatgacccattagtggactctgcatttaaaaataaataaataaataaaagaagttattagtgagagtgtaaaaatacgggtgtgcctggcatgcagtgggagaaatgttgaaattctgtttgggttgtgtgtgtgtctctgagtgcattttacagacgtgtacaatgtacttctggctgggagttgtggtcaaacaaatatgaaaaccactgaacctgagaaaatatctctggagccccagcaggcaacactgagattatgaaatgggtatttggaagacctttggcaactttcctgctgcttcctgtgtcttcttctttcccttggtcctcccatggtgggatgtgagcactcattcatccataaagggccagtctactgggacctttggctgcccctgcgatgacagtgagcagcaaagtgatacccagggagggagtatagggtctctgcagggctctcaccaaatggtggcaatgacttactcctgtctaggcggggtctggtggcaggttttccatgagcctctttctggtgttccagagtggcaaggggcacttggggtggatacaagaacccctggtctgatcaggagagctcaagacttgaggagcatgccaggtgggtggaggaggaaattccaaccagattaggcacaccactcggagaccatgccgagtcccgcctggggaaagcaggggcagaaggaaacaggaaagatttgaagccgggggacttccgctgaccctttcacaacccttcttttgctttgctgttgggggaaaccctgcctgtgactctcctaggatgagccctccttcccaggttggtgcaccacggagcgttccctctaggagcctcctggctgaccttatggtgtgcacagccagcctgcccagctcagcagagcattacctcaacttctgacttctcctcttctgagttttctcctggctgcaggcagactggtaggaagggtgctggggggcagtgcaggcagctgccagagtcccctcccacccacttcattgctttccaaacaaagtgcagttcggtccatgccattcagcttcagaagggcgtgaaatcccaaattgctctagttcctgggacaaaactataatgatttttctctctcccttcttgtctcctctccctcacatccccctgctcccttcttttctctcctttgatgagaggtgattttcttaaaaggcgaatttggaacgaggaatcaaaaaaggggtatttgtgagctgcagtcctgttccttgtttcatgaacccccaggcagccatggcctgtacccctcaggcctaccctgaggagtgtgagaacctcatccacttttctctgccctaaattggggaggggcaggctggagcgtggtttggaggcgcgtgcccaagagtactgtgaacagcaaagggggcctcagctttttagtagggagaggtatttggggttgaatgggaggatttaatcagctgctttgcttaaactatacaggggtgtgcacctggggtgggggatgtgcgtgtcacctggaagggaggaatgtgcttcccaaaccttttcctggcttccacttgggcacgtttcagctgcatgtggccatctcattagagatgagttttgtcctgtcttgcagcagtgaccagtcttggggaatcagttccactttctctgttttttagtcttgggcttctgactctctctgacttcaggggtttccttcttctgactcatcggatgaactcacctgctggtgtggaagccttcagcatctttcttgaaccccagagctttttggctcttttcctgtctccactagtacggaaccttttcttgtcaaagaatttgtgtttttgtttttgtttttaatccgaaataccggctgtcatgtcccatccatgctggccacagacatacccctgtgatcatggtgttggctggaccatgccaggatgcatggctttgccactcccatgcccaccttgaatgttgtgtctgatgtttgtcataggaggggtatatccaatctctttctcttttttttctccctctctctctcttttttttgtttttttgagacagggtctcggtctgtcacccaggttggagagtagtggtgtgattgcagctcactgcagccttgacctcccagggcttgagtgatcctcccagctcagactcctgagtagctgggactacaggcacatgccaccatgcctggctaatttttttgtatttttttgtagagatgggggcctcaatttgttgcccagactggtcttgaactcctgggctcaagcgatcctcccaccttggccttccaaagtgctgggattacaggcatgaaccaccatgcccagcctctttctttttgttgaactggaaaccttccctaaagttccctcaaccttccctcaagttcctactgagatggatttcccacccttagagaactatcttggggttcaaattccagtctttgacttactggttgggcaggacacttagcttcttcatgtccttacttgtcaaatggggatcctgattttcttcctgctttctctttcctgacccagctttccattgcttctttcccacttctctcatttttccagtgggccttgtggaagttccttgttaacaagctcccttacatcttcccctctttaccgaatgtttctttcacttccccctcctgatggaaatccagctcctcttgctaagggttgggagcatggacccttgagtccaaatccctggaccgggtcccatttcccagttaggtgtgaccttgggcaagtttcttaacctttctgtgctatttccctatctgtaaaaagaagaagagatggtaccgatctcccagggtggttgtgaggagggttaagccctcgctgcacttcacatgcctggtacacgcacagaacagttgatactctctgatgtctgctctcatctttatcttcatcatcatcagcatgattgccatcactttctctcattccctgaggactctggcatctgatgcacagacttcacctccacagatcccgtcctcaccctgaggatggcccctcttcgtccccacccgactcaagtccaaatcactccattccttacacctctgagtcaatggccttcacctccatggtcccttgacctaactcagaatcttcctgagatcttaaatccagattattatagcctggaccccaagattgactgctgcagctgctggggcctttagtttctctgcctttggttcttccaaccctggcttgccccacctgggtcctggacagcccatctgtcccttgggcagcgaagcccttcaggggacattcacactgcctccaatgcgcatgctccctggcctcagctccacatgtctgggcagctgcttgcatccttcacgagggtcctgttgccccttagctccccaccctattgttgtcagcctcagcctggcatcttgcttccatgtcatagggaaaccaggacctcaatcaaacccatcttcctgtcactgtccttccaaactctcttgccttctacccccactataagggaacaggtgtcttcattcctttaaggtatatcaatgtggcagagaagggagatgtatacaaaccaccttgacaccaggatttgaatactggctgcacacctgggcacattacctaacctctctaagctcaggttccttctctgcaaagtggggatatgaatactgtattagtctgttttcaagctgctgataaagacatacctgagactgcgtaatttatacagaaagaggtttaatggacccacagttccacgtggctgggaaggcctcacaatcatggcagaaggcaaaaggcacatcttacatggtaacagacaagaaagaggacagaacccagtgaaaggggttttccccatataaaatcatcagatctcgtgagacttattcactaccatgagaacagtgtgggggaaactgcccccatgattcaattacctcccactgggtccctcccataacacgtgggaattatgggagccactattcaagatgagatttgagtggggacgcagccaaaccatatcaaataccaagagctattttatagggttgttgtaagaattaaatgaggcaacatatgtaaagttcttgccacagtgcgtggtgcgtacgttgtcaataaatggtgatggtgatgtcatttttgtcccctcactcttgagtgactcggttccaggatctttaggcttcctgctccattgagtttttctcaaaagtgtttctacagatccaagcccatcctgtcttaaataaaccccagacttctcaccttgacctcacatgcacccccaatatttcttcccataaacaaactgttgcccctttttttcctccttaaaacaacaaatgttctgaaagaactattgacactggtctctacttcctcactgccacccctgcttcctggcttttgcactgcccagccgcagcctcacagagacttctggctacccatcatcttcctggcccaccctgctgcctctgttcctgccaggggcacctccgagagggggttggccctgcgatcctcagttttcctctttgggcatggcttctcctcaggaatgtgcccttccacctcattttccccagcacacatgcctcagtttcctcctgggacctgatggctcccagatcactatcttgggcccagactttctggagctgaatctccagttgcctcggagcctcctcagactcagtgtggccagaatggtggtcctggcttcccctcgggcctgcccttctgcctccttctgcaccctgggatggtcatcagcttttctcccactgctgccctgtatgcagggaaggcctgcctgtggctgtatctgtagtacttcttgaatgtgtttccttctctccctccccacagctacttactgccttggttcagggacctggatgtctcctcttccttgagatcccagactgcccaagttaaaagtgagtttaggccgagctcagtggctcacgcctgtaatcccaataccttgagaggccgaggtgggaggatcacttgaggccaggagttggagaccagcctgggcaacatagcgagaccccataggtacaaaaaataaaaacattagcttggtatagtggtatgcgccagtggtctcagcttcttgggaggctgaggtgggggaattgcttgagcctgggaggtcgaggctgtagtgagctatgattggaccaccgcactccagcctgggcaacagagcaagaccctgtctcaaaaaaaaaaaaaaaaaaaatgagattactctcccctgcctcacatttccctattgcccattgctgctttgtttttctccccagcagttgttacttcgtaacacacaccatcgtttatttatattgtttacatattttacttatatttatagtattatttgtattgtttatggtctctcttccctcatcagaatgtaggctccaagtgggcagggatgtatgctcttctgttcaccactgtattcccattgccagaaacacagtaggtgctcagtaagtatttgatggaggagcttctgcagttcattctgcacgtcagccatggctggtcctgctcttcagcctccaagcccagcagcttcctggtgggctgcagttttctcatcggaaatagagaagagtagcagtgccgattctgcctcccttgcaggtcgttttagtgcatctagttggaaaatacaggcaggtttgcagggaacacagttttcaaagtgtaaagctcagtgcaggtgctaggtcatggtgttttttgtcacactgggatcctgcgggagaggtaagtttagctgattggagtggaagatccagcccattcttcgtggtgcctgccgcagagcctgcaagcctgcagaaagacagggagtagccacgtctttctgtagttcacacctgtgtgtctccccacctgataatccctcagcacttctgtttgccttgcatgtaaagcccgacctttgcatggcaggcacacagactgaaactctttcctcctccagcctttcttggactcatccacagaatgacaaagaagtattctgtgaatattggttgaatgaaggaaggcacggctttttaaaaaagatgaaaaaaaaaaaagttatgaaaagctttaaaacttgctattggctgggcgtggtggctcacacctataatcccagcactttgggaggccgaggcgggcagatcacctgaggtcaggagtttgagaccagcctggccaacatggcaaaaccccgtctctactaaaaatacaaaaattagctgggcgtggtggtgggtgcctgtaatcccagctacttgggaggctgaggaaggagaatcacttgaacctgggaggcggaggttgcagtgagccgagatcgcgccattgcactccagcccggacaacagagcgagacttcatctcaaaaaaaaaaaaaaaaaaaaaaaaaaccagaaaaaaaaacttgccattaaacaaattccagttttgatttttgttttgcattggttttgaatccatgcatgttatggccacaaagaaaactttcttggctccgttgtttgtcgtgtgtgtgtgtgtgtgtgtgtgtttgtgtgtgtgtgtagaacccagcaagcagcagctataccccgatgaggcaatgtcttcatttggccactcatgtcattccacgtttcctgagtgccctcttggctaggcactgtgctagacactgggctacaaaaataagaatgcctggtccccgttctcaaagtaagcgtgcttcctataattagaccctgagctaaggcgacagaaccagctccctttcaagacaagagtcgcctgtcttgacggactttcagatgggctggaagaacaaggtctggcgtgtatggactctgaactgctcaagctgctgccgtcttgcaggtctagagcctacagggtagcgtcattctagtttctttgctgggcactctggaatttgttctttctcctgcgagagacagtggtcctcagttgtgttccctccccaccatcctcaccctccctcccacggtggttagtcattctggaggctcaagttggctcacagaaggtgctcttgaaaacatcccccaccctcctcgtaaccccagacagtcaggaagggccgttgtcgggtactaagaggtgttatggtttcacattcatgctttctctctgaagagaaaacaaaacatgttgaaatagggagaaatcccagcagcagcttgcttgaagcaagggttgcataacaggtctaggaaacgtctggccgtgtgggtcaagttgagggactgcagccttgtgtcactgagggaacttcttccgggtccaccgagcctctggatccattagatccatccagagagccacttggaaggctctgggaccttgagttctggctggccacgtggtctgtgatggctgtcactggtgaaagagagaccctggctgatatttagccaacagtgtttattccctggcatgaccagaaagggtgcatttgagacactgctgtgggtgggggacccggaggagtgtttgtgtgtcagacttatgctggtgttgaggccctagaaaggtcaccaaactggggcggggtgtgggccccgtgaatttaagtcctggtcctgccattaaccagcttggaaaccttgggctaatcatttctctgggctagttttctccttgtgaatctagactagtgtcatctactttacctttttgacagggctgttgggaagcttaggtgagatagatttgtgaatggctcttgcaaaccttaacatgcaaagctaatgacagattgtatcagaggcaatgtgcttgattattagagctgtttaggttaacagcacaacctctgcagccagactgcctggagtggcacctggtcaagttcctgaaacctctctttgccttatttttctcatctataaaatggggctaataactttacccatttcagtgttgctgtgagaattaattgagatgatacacctagaatgttaaggcacatggcaaatgccccattaatatcagctcctcttgttatttctaaaagtattacttcaatgcctgggtatgtttatatattgctggtgcaattgttaattttatattatttttgtattgttagcttttatttggtcatttgatcctcttagctctcctttgaaggtgagaaaaggcaggtgttgtttctcatttcatatttgagaaaactgaacttcagaaaaattacatgccctagaactcgggcctttttctgctccagagctgaaagcgagagaagagaggaagggaattaggctggagcaagccagtaggatgttggatgcagactcagatgttaatggcagcagagcccttgagctggattctagaatatgagaaagggctgagattgatgatggggcccagctgcattgttgggacggaggaaccagagttgagtcgagggagtaactccaggaaatcatggcacccagaaagtgtggcacagaatgcagggctctaacgtctagttaggagttctttgggcaagtactccagcaagcaaggaagaaggatgatgacatatggttattgccacaggatatttttggctgcgtctggcttctctctctgaaacaaattgcagttgctgtgacaccttctcatttcagcagtgagtcgaagttgcactcaatatagtgttttgaattcggactagtcgtgaagattcctttccagatcatagtatatgtatataagtcacttactgggaagagcactacatcatagttccgtggtccactaaggctgcagttttcttatctgaaataaggaggggtaacggtgcccatcctgcctcccctggcaggtccgcttacgcatgtagtgagaaaatacaggcaggcttgcagggaacaccgctttaaaagtataaagctctctgtgcaggtgctaggtcatggtatttattatcacactgggatcctgtgggaggggtaaggttagctcattggaatggaaaatccaggctctcattccagcactaggactcagtgcagctgcctggccttgggcacttaacctctctccttacagtgtctcccatctgttgagccaagacagggtggctgtctgctgccgcccatttggctggctaatgaggaagagccagtgctgctcacagcatgctcatttcgtggtaatgtagacaggggatagtagtggctgcgtgtagcagaaaccagcagggtaggaccggatgagcccaccttcagggaggtgtacccagggctgttagtttgaggacgtctgtgggattttatatccttactcttattttccaagaaagtctgtccctttgagcaccaggcagatgagtctggggacgctgtgaggaggggtcccccaggagcaggaaggtgactaatgatcccggaagaatgactgtgtgtgtttgcagacgcctgggctcttccccagtttggcctttcccgtcactgttttcctcacttgcttaagaggagaaggaggtaacgcacacaagtgcctttgtctcagggtccccacggtgcccatcttgagggttttgcgggcgccttgcattgcctaaggcctggctttagaagcagaacatggagagagaggtttgcagcctgcaggaagctggccagccagacctgccgggcagcgggacccgcgggcagtgcctctgactcacggcacgtccttgatgcgcagtgctcccctccccactttctctgccctcctgtggatcacgggtgtcctagggctgttgggagcctggattaaagttgctgagtggccggctgatgatcagatccagggagtcagaccagaggtggggacatcttttcaaaggcaagaagatgctgccagtgcgtgtatatacatatgagggtggaaggggtaaacccagggtgtgtctttaactgaagaatcaagaaagctgctttccttagtcacccgcctctgtggttcgtttgctaaacgttggcttgcgttagcctgattcacagtaatgtggctccctaggaagattcacgtggtatttgtgaaaatgtagcttcatcccctgcccttcattgaatgactgaattacagtcagcaccacataacgatgtttcggtcaactatggactccatatgtgacgagacagtgatcccatagattatagtggagctgaaaaattcctattacctaggggcatcacaacgcattgcatttcgcccgtgtttgggatgatgctggtgtaaacctactatgctgccagtcatgtagaagtatagcacacacaattagtaggtaatgcttgcaaataataatgaaagactctgctactggtttatgtatttactatgctatactttttgtcattactttagagtgtactcctacttttttttttttttttttgagatggagtttcactcttgtcctgtaagctggagcgaagtggcgcgatctcggctcactgcaacctccacctcctgggttcaagcgattctcctgcctcagcttcccagagtagctgagattacaggcatgcaccgccacgcacggctaattttgtatttttagtagagacagggtttcaccatgttggccaggctggtcaccaactcctgacctcaggtgacccgccctccttagcctcccagagtgttgggattacaggtgtgagccaccgcccctggcctttttttttttttttttttaagttaattgtaaaagagcctcaggcaggtccttcaggagggattccagaagaaggcattgcgatcacaggaggtgccagctgcattgggacaagatgtggaggtggaagacagtgatattgatgatcctgaccctctgtaagcctaggctaatgtgtatgtttaagaaaaaagtttaaaaagtaaaaaaataaaaaatgttaaaaggaaaagcttatagaataaggatatagagaaaaaatattttttgtagagctgtacaatgtgttttgtgttttaagccaagtgttattacaagagtcaaaaagtcaaaaaattgaaatttataaaacaaaaacattacagtaagctaaatgtaactaattaattttatttatttttttttttagagacagggtcttgccttgtcgcctaggctggagtgcagtgttgagatcatagtttactgcagcctcgaactcctgggtacaaggaatcctccctcctcagcctcctgagtagctgggattacaggtgcgcaccaccacacagctaatttttaaattggtgtagtgaaggagtttcgcaatgttggccaggtggtctcaagctcttggcctcaagcagtcctcctgcctcgacctcccaaagtgctaggattacaggtatgagtcaccacgcccaaccttgaaatttaatttattatggaagaaagcaaaagtttaaaaaataaatttagtgtagcctaagtgtacagtgtttttaaagtctatggtagtgcacaggaatgtcccaggccttcacatttactcaccaccactcactcaaactcacccagagcaacttccagttctgcaagctccattcgtggtaaatgccctacacaggtgtaccattaaaaaaaatcttttggctggttgtgatggctcatgcctgtaatcccatctcctggcttcatgccattgtccttccccagcttcccgagttgctgggactacaggcgcctgccaccacgcccagctaaattttgtatttttagtagagatggggtttcgctgtgttagccagtatggtctcgatctcctgaccttgttgtgatctgcttgcctcggcctcccaagatgctgggattacaggcgtgagccactacgcccagcaaaaaacaaacttttatgtggtattttcactgtactttttttttgttgttgagacggagtttcacttttgttgcccaggctggaatgcagtggcagaatctcggctcaccgcaacctctgcctaccgggttcaagcaattctcctgcctcagcctcccgagtagatgggattacaggtgtgtgccaccacgcctggctaattttgtatttttagtagagatggggtttcaccatgttggccaggctggtcttgaactcccaacctcaagtgatccacctgccctagcctcccaaagtgctgggattacagttgtgagtcaccgcgcccagccttcactgtacttttggtatatttagattcatttagataacaaataccatggtattccagttgcctgcagtattcagtacagtagcatgctgtacaggtttgtagcctaggagcaacacactatagcgtacagcctaggtgtgcggtagctatcccctctcaatttgtgtaagtacactctgtgatgttcacagaaggatgaagtcacctaacaatgcatatctcagaacatatccccgtcatttgcgatgcgtgactgtaattaaggaatggggcctatggggtatgactgtgggtgctgggcactaaggagacggaggcttgacacaacccaggcattccccatgggagcccctgtgtggcaggaaggacagatctccaatgaatcattcctttcaagagtgatgagctcagtcttcagggatcctgcacctcacggggaggagttgggaaaggccccccgaggaaggaatatctcagtatctctatctagacctgaaggagatgtggatgttacaactaaactgtatgattctctgtgtccctgagaacatcacagcctatttccaaggtgcctggccatccccagggtgcctgcatgccactgacactctaatctggggttctgctctgagctgagaaagtgtctgtggtttggggtcatcaggtggcagctcttctcctctctgttctgaaatcttaattccctgtttgactgcctggtggctttcagagaagcccagcctcctcccaggtgggaactttcactgtcgaactaaggacccgaggagggtggaaacaggaggaagggaggctaagcggtcacatcagaggcatttctgctcatcgttggctcataataggtggcagtaggggctggtggagcagtggccaggtaagttgctaaaaataaaacatgctcatgtgacgtgtgcaggtttagggtttgcctgagtgagctttcctggtccaggtcacaacttgtagggcaaagagagacttgaggatggtgtaggcgacaactgtgccttccaaaggtcagagatggacctgggatcttgtagtaccagggcctgctctggaggctcagattcgtgtgtcacttcttgtctcttttgaaaggtaactggagagctggacactttcctgtcctctctctttccttgtagccttcctctctcagagatggcctgctatcaaatgccaggggcacagtcagctgggcttggtaaagggcctgagatgagagcttggggactttcccactggagtccatgatagtccagggtgtagacagaagctcttggatctcacagctttggaaaccgagtcctgtttctccaacaggccagtgcggtgacgggcacagacctgctgtcctctctatttgtgtgtccactgattccctggcacagggggtctttgttacaaaatctctttgctgggtgctttgaaggagcacgtgtgtgggcctttttcagggtggttagacaatgccaagctgtcactcagaagaaatggtcaggatagaagcatagaaaatgccctgtggaaatgtagatgagtgttctggctcacacctgtaatcccagctactcaggaggctgaggcagggggattgctggcggacagcagttcgagaccagccttggcaacggagcaagaccctaactctaaaaataaaaataaaaaaataggccgggcgcagtggctcacgcctgtaattccagcactttgtgaggccaagacgggtggatcacgaggtcagaagtttgagaccagcctggccaacatggtgaaaccccgtctcaactaaaaatacaaaaattagctgggtgtggtagcagatgcctataatctcagctacttgagaggctgaggcgggagaatcacttgaacccgggaggcagaggttgcattgaactgagatcatgccattgcactccaggccgggcaacaagagcaagactctgtctcaagaaaaaaaaaaaaattggttttgtgtggtggtgcacacctgtagtcccagctactcaggaggctgaggtgggaagattgcttgagcccaggagtttgaggttgcagtgagccgtgatcatgctactgcactctagcctgggtgacagagcaagatcctgtctctaaaaatattaaaatgaataaataaaagaacagaaaatgacctgtgtggggagaagggttatctgtgaaaggagttagaaacctcaagtgtacataagtaagactggagatctctctgttaatgaaattgtgcttaaaaatttttttttcttgaaccttggcttctcaggcaataactgaattttaaggtgtgtgtgtatatatatatataggtatatatatatataggtgtatatatatatatatatatatagtgtatatatatatatatatatatatatagtgtatatatatatagtgtatgtgtgtgtgtgtgtgtgtatatatatatatatttgggccaggaagggtgaagtgttaaattgccttacttagaaaattaaggtagatttgtatttagcccttagagcttcaaaaatatcagctcagaaatgacttttaattgtgcaggtgataaaatcacaagaaaaaaattcatctacaagttggaatgactcttagctacttatttgtttttaaatttttttttcaaattttggaaggaagtagagaaggagttagaactgtaatttgctattatgggggttggggtgcagtgcgtattagtacaatgttaggtggtggcaggttccgtttatccttggaattagcactgctccccccacaggcttctgggagttgggagcaggctggttggtgacgctttgcctggccttggataagaactcttgttttcaaattcccttgaggtctcttccaagaatcttttgcattttttctgataaatcaatcataaggaagtttctgaaattctctttcagaccctacaacccacaagttactgcaaagctgggcttctaccagaagtgagtgatttgaaattgaaaacagatttcggatctcacctgagtagctcgagtgtaagggagggactgggagagccacagagaacatttgtcaatccagaaccaaccattcatggtgttgcttgactggagggcagggaaggaaaggactagaagcaaggcgaaagcagatctttctgtagatacacacatataagtcttggatttgcattttagggtgaattgtaattagcttgagatgaccaggggcccaccaatcaagcaactctgggaaaaacacttgtctacatcttaagtttctttgtctataaaatgtcaagattgaactaacactacatgattctctcgggaactcaccagttctaaaatttccactccttcttttcacagggcagtgtaactttaactccctgtttcaactttgggtgtaaaatacaggctcacaagcacttttgctttgcagcggaagctaggaagaccctgctgtggaattttgcagaggggctgagcagtggtgggaaggaccagcggcccatgtaccatgttgggcccctgcattccaaggtgtctgcctagaaataaatgatagtttatttaacatacttgtaacttccaacgacaacacttcaagactgcaaatcatccatccgggcaattacagaaatgctgaacggccacagccccgccctggaatcaagggaagaagtgtggcagatgcttctggaaggctctgtttacagctctctgactccttcctgccagaacctttcacaagttcactaccaggaagctgagtcatccaggggtcagccggcatggccaaggtcaccccgcactgccagcagcacagatggggttagcccatcattccagaggagcatccgtgggaatgatggggttggggagctggggagcctccctgcagcatctccctgccatggtgttttgcatttcctgtagatttcgcagtgagaaacggtctcctcttatattcacttcatttcttctctctttctttctttcttttttttgagatggagtctgtctctgtcaccaggctggactgcagtggcgcgatctcggttcactgcaacctctgcctcccgggttcaagcgattctcctgcttcagcctcctgagtagctgggactacaggcatgtgccaccacgcccagctaattttttgtattctcagtagagatgggatttcaccatgttggtcaggatggtctcaatctcctgaccttgtgatccacccgccttggcctcccaaagtgctgggattacaggcgtgagccaccacgtccgggctttttttttttttttttttagacttgttgcccccccaggatggagtgcagtggcgcaatgtcggctcactgtaacctccacctcctgggttcaagcgatgctactgcctcagcctcccaagtagctgggattacaggcatacaccaccacacccggctgattttatagttttagtagacactgggtttctccatgttggtcaggctggtctcaaattcccgacctcaggtgatctgctcacctcagcctcctaaagtgctgggattacaggcatgagtcactgcgcctggccaaaggcaagagatgaggaccatatagatggaaacacagcattaagggtaaaacactctctctctgctctgtctggtgttcagggcccagcatgggctgtatgtcctacacttcgtttcaggctcatcttcaggtgacaccagccttctcggagcctctgtccacatcccacctgtcactacctctgccctaacttcaccttcagtggtcactgccaggacccctccccaaatctaaatgaggtccccctgcatttgccctcattgcaccttctacttttgcttcatggcatttagagtttggaattttttatcgataggatttttagtactctctctctcctctactagactataaactccttgaaggcaaagacgacacctgctccctcagttccagcagcccctaacactgcgctgacatttaggtagtagcagcgttttcttgcagaacgatcctgtagttttaccagctgagacttctgtggtctggggagtcactcatctctggtccctgcctcctcctctcacttttggaaacccttctggccagacggctttggtttaaattgtatgccggagctcttggttccagggagagggttttagcgtaaaaatctcactcatgatggaaggttcctgctattaccttttgcatccaatacaacttaaattgactcctccaaaagcttcggaagtaatttgtacctattgtctagcataaattcagcaagtgggtcccggaggctgaaagtcgagtcttgcggttgtttcctctggtgtttctccctgagacccttagaacggcaagcctggtgcatctggtgtcctgtcatctttctctgtgattgtcatcagtgtgaaaggtgaaaggtgtgtggagaaagaacatcccttcgagctgtggcttagagctgtgacttggcaccacgtggttagtcactatcaagttagaagcctttgtgggaaatctggctttggtaggatctgggaaatttggacccctcatttgccccctggcatctctaaattccagagcccagctttgatggggcttacatccccagctgttaacctgtggggtgggccccagactgtggccaggtgcattgcgctaggggagacagatccacagcaggcagaatttgaggaggacttaaaatacctgctttgggaggccaaggcgggcagatcccctgaggtcgggagtttgagaccagcctgaccaacatggagaaaccctgtctctactaaaaatacaaaattagttgggtgcggtggcacatgcctgtaatcccagctacttgggaggctgaggcaggagaatcgcttgaacccgggaggcggaggttgtggtgagccgagatcaagccactgcactccagcctgggcaacaagagcgaaattccgtttcaaaaaaaaaaaaaaaaaaaacacaaaaaaacaaaaacccgctttgttacctgcctgtgggtggaattgagttcatctctgaatccgtggtagtcatttattgagcacgtgttttagtgagcatggcatggcgctggctccgagatcacagtgctgccgccctccttcacgtttctctgacctttcatgggagtcacatgcagacgcatcacttggtataattatacgtggaggaatgagcaagaggaggctggcgacgggactgctttaaaaatcccttcttctgtggataataggctaatagcggggtgtgctttagaaggtgtggcctccgccaagggcatgggaactgcatttgtagaagctgggaggaccacacctggcttgggagacggcatgggtttctgaggtgcctggctccctggcctgtccagtgtggacagcttacgcgcagctaggtgaaatgattgtgcagttgctgagggattgggtggcagagctggacagaatttaggtcttctaacttggaacagggctgtgtccatcttacctaggtgtacagtttggggagcactgctgtttggtctagtgagacacacttggtgtaaatatctgtgccctgtagtacccagattccaagggaccagagagcatgcccgcacccacgggctggcgggagcccaggtcctccagggctgctgtggagcatgggcttcttggtgcccagtcctatagctgaacttgggcggcctctggctgttgcccccagggctggtctccctatagttcagaggcgagccagctctcagcagcagggagggccttttccatagtatgaacttggccacaccagaccagtcagcagtgtcgggaatcttggccctcaaggtccctgcctagccctggcctggacttcagcactggtcaaaggtccccagagctgcccttggctctgagcaggtgagtgaacttcccagagcacttttgtctgggcctctgtgccagtgtaaactgataatagtgatttccctgccccacctctctgccagctatctaagttttctttgttacataatcaggattaatttaagcagcctaggccatccatttagaaatggttagtgaagaaaggtgaatggggaggggtcagagtcccttagggggccaccaggtgcgagtccccttgctctttggggccttggtttcccttctgtgagttggggcagctgaagggaagggctgctcaggtggtcctgccacatcccagtgttgtgtctagtgagtacaggtgagagtgctcccaaccagggcagatcctgctgctaggcagtgagtcaggaaggaattggtaaaaatgacgtcattgctaagaatgacgtcttttttgctgtttatccaaaggaaaaaaaaaaaagcagaaataaaagcagcaggcagctgtccaccagaccccatgcaaagggcttttccttgaatcctcacagagactttaggcagtaggtgccattaggagccccacttacagataagaaaacgggggcagagaactgaagtgagtcgcccaaggacacacattgaggaggaagcaacagagctaggatttagatacagaggggtctccaagcctgtccttccagctttgaggtcctgggcctatatattccatcagaaactgaaaggtgtgttggggggtacctagggtcaggatggggttttatttctgtcccttccttgtgatgctgcagggactgtgacctggagttcccaacaccagtgccctgtggctggtagcctcctcctgggactccaggatctattgtttgatttagccattttcttctgtagtccgatgggagggattcaattcaaacctgcaatactgttctttgggccatacaggccatttatcagcaagtagagaaaaacacccacaccttctagcaagattaagctagttctgtggttcttaatgataatttaagccattttgattaacctaggtggtggttttctccctaccaggtagggaatatactggagcctttctaaaaatagttccggtgaagataaacatttattgagtacctactgtactccactaggtgaatacaaggatttctcgttcatctcaggaagcatggttaggggattttacagacgagggaactgaagttcagggaagttaagttacttatccaagttcatatagctgaaaaatagaataggatttcgaccttgtggtaggtggaaaccggggttgtctttgtgctctcaggcatgtggctggcgtggggtagaagctctctatataatggttgagtgactggatgagcttcaaagctggtccctctggcttttcctgctaccccaggccacgtgcccagaaggaacgctgtcttacctgggaggtctttattgactgtttgacgcccttcccatcctatcccaaccccttccccatggcacctagtttccccaaccagaacgtacgttacttatgggcagagacggtctttgagcattgggtgggtggttgaacgcagtttctttgagattctgtgattgggattttcagcaaaatatggtagcaagttggtcagaggggcgagtctggcagtgggggagcccgggcaagtctaactgtttgctcactggcagaacaaagttggggaggttggaggggtaggggaactgaaagcaaaagaaagctcacagggagccccatcgtgcaaaaccgatgatggcagagctgccgggctgcagcgtggagcggggcgggagccttgtgtggagtctgtgaacatactctaggtgcctggatactcctcttatctccccacacatgggttgatgtgcatgtacggtgctttgatgtggactcttgtgttaaatttgttcttctgcgcagctttgtgacgcttcagtgagtgtgtctatatacaaaaggaaaacagttttggctgggtgcagtggctcacgcctgtaatcccagcactttgggaggccgaggtgggtggatcacctgaggtcaggagtttgagaccagcctggacaacatggtgaaacccagtctctaccaaaaaacacaaaaattagccatgtgtggtagcatgcgcctgtaatcccagctactcaggaggctgaggcaggagatggcttgaacccgggggctggaagttgcagtgagccaagttcacgccattgcactccagtctgggcaacagagtgagactccgtctcaaaaaagaaaaaaacaaaaaacaaaaaaaaaaccaacaattttgaggatgaggcatttcttccttacttatgagtgggatgtttatgggccggtgacattgacaaggctggcagagtcaaggggaggccctgggtagtctagcttactagcagtgaattcagttctctcttgaaagcaccgtgactgttggaatatttcagccttagcctttgaatactgacggagtgccaggctttcgtctgtcaagatgcccctctgtgacctcagctggttaatgtctcaagcgcttctttaggagacagaatgggttggtattgaaccaaccactattgcccagtcttgtgatgaccagggttgtggaacagataagttgtgtgacctccacgggtcagggctgttgactttgcctgtaagttacactcttgcagctgggcatagacacagtcctcaggggttttgtggacattaacaagtaaggatttaggtgactctgacatagggtcttccccaaggtcaggcacagaggaggtggcatccatgggacttagcatgttgtagaaacagagcatattgggacaaaagggaagttgaagatcacctgggatcctttagcgtccatccctttgtgagagataggatagcctagttgttaacagcatgactctggccgaccgcctggcttctttctagtcttccttctgtactttgtgaccttgaggcaagtcatttggtctctgtgcctcagtttcccaatttgtggaatggggataactggttgctaatattgctgtttttattgttataattattttgtaaatagaagggttgaagtttcagggaagcgagttgattgacctgaggccatacaatgtatcagtgccagatgcaggatgagaaagaactgtgactcaggccctgtccctcttaccagggcagggcagggcagggaagctgggcaggagagactggcagctcagttccctctccagtccagggtagtcccttccctttctgtctcgcagtgaggtcaccagttgcactcatgaaatcttagtcctgttatctggcatctttggaatttgccccacctgtagggcagagataacttaatcctttttggtgggccacatatgggatattctgggtgtgttctgggtacactgggcatgggccaggcacagacccttccatccattggaggcttttctagagaaggggtggagaccagattgggttcctagggtcgggggatgtgggaatggcaccctctgaactacaggcaaggctgggagctgctgccagtgggcggagagggaaatctaactggtatgtgatgttagtggtggcctggcaagcagctgtagctttggagagagcgaccagcctgtccaggggcctggtagggaaggcttctgttgcacggcctgttgctttctctcagatactggagagcccatctgtcttgcttactgcatggcttttcatagctcccatcatattgctgttgggtgcgattcatagccatggaagacacctgatcataaagtaaattccacacactccagcaaggtattcagggccttgcatggtctagccccaccctacctttcttccagcaaacaataattgatcatctaaggtggcagcttctctcctaagtctgaggctgcttctctaccctcacctgactgctgtcttctctgcacaccagaccttccggccacaggtcctcattccccagatgcaccagcatgttcacatcctcctgcagcgggaattgttttcttcctctccatgccaaatttgtctttttctttcccagtcaaagtaacatatgtacatagtcacaaaatgaaatagtgtagaagagattgtagtgacagctctaattcttacagcttgacatactcttcctttttctaggtggctgttcaaatggcttccttccagccaccttctccaggttggatgtgatctggactctggatctctaccctatagcacatcctgctgtgacctattccaaggagaaggggggtttggtgctggggcttctctcctaggaggctgaggaacttggttattgctatcttagcagaattgttattttctaccaaatgtgcaatgaaaactcttcactgagtcttttgcccctagcaatagcagtgcttcctgaagccccagtagaccctgaaggtttcaggactgtgtctggagagcatcagtgacaggtggcaggaatcctctgtggtccacttcagaggcggcagatgaccaggaggtcagactgtggctggtcttttcagaaggacaaacgtgacccttctgaaaactgggaccattcggggacattggtggaaagacagaggagcctttatggtttgttctcacacatatgaatccactttctcccccctccaacatcagggtgacctgaacgctgaaggaagtctaggccttcctgtaggtgaggcagggaaagccacgtagacctgatttagttgaagtgttttccaccaggtctcaactcttcattttgtcttggtatagcttttctggctgactttctagcaagctggttgggctctttgcttgttccaaaatggtagttttcaccagagacttttcagatgagcaggaagcttttttcagaatgtatgttcttctaactctgcttgagtcccccgccatgtattctgataggcatttgttttcccaccccatcccccacttttttgaagtgggggcaatgactacttttaggggaatcatttttctgttgctggtttcaaaacattaagagcaccaattttttttttttttttgcaacagagtctttctcaggctgaagtgcggtgacatgatcatagctcactgcagcctcagtctcctgggctcaagtgatcctctcaccttagcctcccaagtagctaagaccactggcacccaccatgcctggctaatttttttaaaaaattactttctgaagagatggggtcttgctatgttgtccagactgggcttgaattcctggcagcaagtgatccacctgccttggccttccaaagtgctgggattacaggtgtgagccactgcacccagctcaaattttccttttcattaaaaacatacatatatgtatatgtatgtatatacatatgtatatatgcatgtgtatatatatgtgtgtatatgtatatatgtgtgtatatatgtgtgtgtgtgtatgtatatgtattatatgtatattctctttgtgtatttatttttgccagtttgggagatgttagaaaaagacatgatttggaaacttcaacttagggataaagttagttatactctgagagctgcagttaaaggattatttgtgctgctctgctcttgcctgcgacgtgtgggaatgatgctgagtgatgtcctcctgcttattttgcatgatttttttttgagacagattctcgctctgtcacccaggctggagtgcaatggtgcgatcttggctcactgcaacctccacctcctgagttcgagcgactctcctgcctcagcctcctgagtagctgggattacaggcgtgtgccactacacctggctaatttttatatttttagtagagatgggattttgccatgttggccaggctggtctcgaacccctgacctcaggtaatctgcccgcctcggcctcccaaagtgctgggattacaggtgtgagccgccacacttggccaattttgcatgatttttacatggcttttcaaagggccagggtgggactatccaaagccctgttaagagtccctcttctgtcaaggagcctaggaagggagcaggtttgagtgaggaaggctggtggttttggacggggaacgggtggttttggacggggagtgccaacggtttttgtgtgcgtggtgctccttgatgtggtctgggtttctgcatttgtagtgtgtgccttctaaggatgctggaaggtgagacagggctttccaaggcctagatggggtttgtggctttacttaggaagacagtcctttccataaagcgtggtgccaaatgcttttcctcctgggcctcctgctgtgatttgtggcgtggagtttcagtgagggagggctctgcaggaaccagctccttggtctgatcctttctggacaattgtggatgggagttggcttcttggtgtcttgagagtgtcctcagcagaccccagtgaagcaggagcatagagctctggatgggctcatggtggacatgggagagctgctggccagggggctgcagggtgaggcttggaaaacagggagggggctgggcttggccccgcattttactgtggtttatttagtgaatgtcagtgctagctggggacagttgacagacaagagaaaacactggtttgattttgaattctgaagcagacattgggcagcagaggctaacatttggcatttatcctaaactttcgaggtgcccgagccttatttcctttctctgggagaaagtctggaacagagacggtgcggagcagcctctagggctcagccctgggcccccctggagttgtgctgctcatggtatcacagtgcttgtttgtttcctgtttgtatccccattgcacctggctcaaggtaggtgtaaggcaaatgctttagaatgagccagtgagtagatttcacatgatcgtctcctcagtcctagaaatgccacgtgaacttcgaacatggaaagttttttatttttgagagattggagaggtgggagttacaggctgtctccaggtcaggcagggagtcagtggctgagtttctgatgctacagatggctggcttgggtggcatgacctctgcaggacccctagaagggcctgaggcccactaccaggctcagcttgcccccttctcttttcttttttggtcctaggcctggatcagaggctccttacccacaggatcttggacaagtcattttccttcttgggcctcagtttcccatctgaaaaggcaggggctgggctggatgtggtctccctagggccattgttgcttctgttacatgatcccgccagctcacctgggacagaacgtgcattttccactctccctcctccccgcagtgagagaacgggccagtgagacaggcctttcctgttttgtcatcttaggggagaattggtgtcaggggctgacccttcactttgttctagctttgctaggagtttgtggagacagtggatgcagatacagacagagttcatatcactgggagtttcactgtcctggagcagatctggagctggaggggacttgctcaggtcacactgggagtggcagtgtcaggccagagacccttgtctcttgattccccgggcaggacacgtttctccatcctgcaggcaggtgcagaggaggaatgcttattcataggcagcacgtgagggctcctctcagctgcttatttggcaccctctttcccctccaggggccagccacacaaccacctgcctccggcctgctccccacacagttgccagaggggtctttctgactctctctgacacctggatgttcttggcacttgctgcttcaagggcataggttcccattggctacggctgtgttttcacacgtgtgtttggtcaggtgtctctggttattaaatgagacaaggcttgcattgctaaagacagaggtttaggaagtgccttggaaaaccaagtgaaacaggtttctttccggaaggatttcccagaggctttagtatggtaatgtgcttatgcatttccaagaggggagaactaaaatgcaaacgtggaaactgattttaccgaacaggaggagactagaagctaggtcttgggcaggaactgaaacctggacaggaaaagaaatttgtgaaattctctgtctccggttgtgtgtgtgtgtgtgcgtgtgtgtgcgcgcgcgcgcgtgtgtgtttatttttaatctctgccctgtctctgcatcctgattcattcatttcctttttcctcctctccaccctcacttccttttcttgtatttttaaaaattgtagtaaaatatacataacaaaatttctcatcttacccatttttaagcatacagtccagcggcattaagtacattcatactattacacaaccatcagtgtcatgcatccacagaactctcctcatcttgcaaaactcaaactcctgtacccataaaacaagaactctccgtcctgttccctcctcaccccagcccctggctacccccattccactttttgtctacaaatttgactactctaggcacctcatatcagtggaatcatacagtatttgtctttttgtgactggctcctttcacttagcatgctgttgtcaagaactatctatgttgtagcctgtgtcagaattttctttccttttttaaggctgaataatattccactgtatggatatattacatcgtgtttatcccttcatctggtgatggacacttgagttgcttccactcactcccagatgttttttcccctctctgatcctcaaggaatagaaaatgcccagccttcatttttacattttacaggtagtggagctttaaaaaagagagtactttgggaggcacagataggagcatcacttgagcccaagagtttgagaccagcctgagcaacatagtaagacccagtctctacaaaaatcagctgggtgtggtggtgcgcacctgtagtctgagctactcaggaggctgaggtgggaggattgcttgagcccaggaggctcaggctgcagtgagctatgatcgtgccactgcactctagcctaggtgataggtgagaccctgtcttaaaaaaataaaaataaaaaataaaaaagagactaaattgattattgtctctctggctgtggccacttctgcctgccttcctagccgcctgccttctgcctctcttgcctctcctgaggctgctgcagggttgatccctccttgcctcttccttacactccttcgaggcaccctggtggttcgtttcctcctcctgttatcatacactttccttgtttttccccattgttttttctcctctgtatcctggtgccaacctcagtgggtgctccctgcaggcaggtggaagaaatgatggtgctgcaggatgaatgaggctctggccccaaacttggctgctgtggctgcagtggtcccagcgggggcctgaccaggcccatctctgcgcttctgggccacttgcctctgtctggggcttgtgtcattaactaagacctgcccttgagtaaaccaccctgaggacagagaagtccactgaggtgcggtgactgaggcagaactcaatcttttagaggtttattctatcagggttgaggatgcaccggggaaaagaaacacaagttatagtaggatctgtgttctgtgctttttccaaagagggctctggtaacgtcagtatttaaaggggaaagagcaagcaggagggagagaagaaaaataaaagacggaagggtaggcattaggcaagtggtaccattcttgtgaggctctgattagcacttagtgaatctgcattttacatgtgaaaagaagggagttggggaaagtgaatcatggtcttgcactcagtaaatctacgttttacataagataaagtaagcttatgaaattagagctgtctgtttgggaacaaaaagaaggtcagtttttgcatgactcacttcccaagcttaactttctttttctttgacatagtgagtttagggccctgaggttttatttttctttcacagcacaaagatacccagttgacctttttttttcataacagaatgatgcattttggttcagtagtgtttcctccaactgctctacccctaatttaaaaaggggagggggtgagaaatcagtcccaaatgtccctgtaagttttggtgtgatgccagcctccaactggctgacatgagcagttttgtaaaggagagaccctcttgatggcttcacgtatatcatggggtgggatggggacagtcattattgacagccagcctgtgccaagtgtttcccagcagctctctgggcgattattccagccaaggatggccatgccctaaggttaaggaacctgcttgaggtcccagagctggaattgagattgacaacctcaggctgggtggctgtacagcctgggcactctctgtgccccctgccctcactcagccactccctccataggtcaccaggggtaattccctactgcccaggcagagggctggggctggaaggggtctagatggtcacttagtggttccccaagctgagtcctgatcaaaatcatctggggaattttaaaaagaaaaagaagacttgaatcagtgtgtgctagggtggtgtctatggatgggtattttcaaacatttcccgggtaactctgatcttcagcccctgctctgatcctccctttcattttccagtccaggacactggggaccggagagatgagatgccgtgaccaaggtcactgggttgtagccagagccagcatcaggtccaaagtgcgatctcagtagccagttctccatgctctgtgtttgttcagaatgccagccctgctcaatgggggtgtggaacttaaggaaggcctttgaccataggctgggcttgcaaaaccttggtaggaccctgcccttggctggaaacgtcagggctccagccagggctcatccccaagaagatacactgccattctccaaagtgtgggggcctctcccctgaagggcgctgcctggagccacctcttgttcacaggcccatgttaggccccctgggacaggttgccttggctccatatgtggttctgcagatcacacccaggcttgagaaatgcggtgacacgtgaactttgcattgatgtgaaaaggtccaaattaaaggtgatggcaagcacagctaagtccaagaaagtgtggctcctatttaggggtggtgggctaagagacaagacacagtaccctttcaccccggtgggtattctaagttgggttagtttgttcatcaattcattcattcaacaaatatttattgggttcccaataaatcatcttactggtccttggagatctgctgtgaacaagacaaacacaaccccacctctgtggcctgcacaaccctggaaggtcacacactagaaccctatcacttggcctctccatgaatcaccgtcatgtagcccctcgacaggggactcttgtgttattactgacaatattgatggttttagacacatattatcccatttaattttcccaaccattctctcaagtggggaaactcaaacttagagagtttaatgaccttgcccagggtcacaccatgagtgatggcatctgaattcagccccagttctctctgattccaaagctggggttcttgacagccacattgtaccacctggtacccttgctttttgtcaggggcaagtataagaagaaggcaggtgacacgcgaagctttatttgctctaaaacttgagcgatttcatatgtcctaaaggaggagttttgcctcttccttcccagcatgaacacttggcatggtgtgtacatcttcattcgtttggtctggccaacagccactcgggagctgaatgaggtgttgtgaccatgacctgggtattctcttggttcaaataccttcttggttggcacattcactttctcgtccttcccttggtctttcttgcttataatatatcccttttttaatttttaattttttttaagatagggttttgttctgtcacccaggctggagtgcagtggcacaaacatagctcactgcagcctcaaactcctgggctcaagggattctcccacctcagcctcccaaatagccaaggctacagaggtgtgccgccatgcctggctaatttcttatttttttgttgaaatgaggtctcagtatattgcccaggttggtctcaaactcctggcctcaagcaatcctcctgtcttggcctcccaaagcgccaggataacacgtgtgagccaccacacctaccccactgtatcatcctaagaaatcagatcaaatccgctttgaaaagacttaacattgaaatcactataaaaaacgagaggatgcagggctaccctccctgggaacctggggcccaagtgtcttggcagctgccttgggctgggccaaaaaatctttttgacagtctgtggtaggaaaaacggtgcatactaacgagtttttaataaagctaaactggccgggtgcactggctcacacctgtaatcccagcactttgggaagccgaaccaagtggatctcgaggtcacgagtttgagaccagcctggccaacatagtgaaacccaatctctactaaaaatataaaaaattagctgggcgtggtggagggcgcctgtaatcccagctactcaggaggctgaggcaggagaatcgcttgaacgtggcaggcggaggttgcagcgagccgagattgtgccactgcactccagcctgggcaacagtgtgagactccgtgtcaaagaaaaaaataaaaataaagctaaatctaatttaaagtaccattttataatcagaggtagtcttccttacttttttttaagcattaaaaatgccctttcttttacaaaatcatgtttgtggtggagggcagtggtgattgttgcttatattgttattgtttttgcgtcctttctgggcaaaataaaaagtttgccttggtgtgtccatttcctttgtggttttaatagctggtgaaatctgaactatgaaaatgaccactaattcaggtgattggttttcaccgttcctccaagccctggggtacctggggctctctgtcccggtgagtgagagggagccccagagagtcctttgcccatcttcaatcagagaagccctccttttttatatgtaggattagattttttttatgattttgtttggagataaaaggatacccctgccaaaagttgaaaagcttctcctctaggatgtgtgttgggggggagtgggggaaggaaggaatccgggaaggatgaaaggaatggtgggaagaaagaaacgaaggatgcacgaaaaaaagaagggaggaagaaagaaagacggattgtcttgactttggtgggactgaaccctggtggatcttctacttggcgagtattcctggcctatattctagtcagagttctccagagaaacaggtaatatgatgtgtccagtctagttgggtttgtaagaccagcctttggttgaagaccttccttgggtcctagcagacagaaaccaggagagacagagacatctatatccggctacatagagaggttatctgtctaactctctgcctgttctctatctatatctgtctgtctgtctgtctgtctacctacctacctgtctctgtctgtctgtctgtctacctacctacctatctaatctacctacctacctacctatctgtctgatctacctacctacgtacctacctacttagaaattgagagatttactttgaggattgacccacatgattgtggggactagccaagtccaaaatctgcaggctggagatttagggagagctgatgttacagtttgagtctgaaggcagtctggaggcagaatttcttccttgagagagacccagtttttttctcacgaggccttcagctgattaaatgaggtgtatgtacccacagtatacaggttaatctactttattcagagtctactgatttaaatgttaatctcatttagaaaatcccttcatacatacatctaaactagtgttagatcaaatatctgggtactgtggctcatccaggctgacccataaaattaaccatcacacctgtgcaagcgcttttccctcctggatggtgtcctagggatgacagaggaggggaaagccaggtctctgcttcaaggagacaaaattatgcatacgaagaaattaagaatgctgctgtgtctgtggagtagccattcttttattcctttactttcttaacaaacttgcttttacttaaaaaaaaaaaaagaaattaagaacaagaccatttatatttaagtgccaacttatgaaatgtaaaaagggatttagaggtgacaaggcaagtgagggctggaggatttggagagatttcatggtgtagggactgaataggagcttccagaacatggaggtttcagataagtgaggacacagaagtcttcacaaccagagtgggcaccacaggacaattctacatctatctaggactctgagtttttgaagggtttccatatgcattgtttggtttgctgcttgcaacaaccctgttgttttaactgaaggtcttagggcctagggattccccagaggccacacaacttgccagtggcaggggaaggtcttcctcttccacagccttctctgtctttctccctttatggagcataatgaaatgtacgtgcacacattcatgtagatttcattatgtccatgtagaattcattttgatttcaaatatgtttccttcccagagaaatcctgtgaaactatgacattgtttttctctctctccttctccaggtcttattttccttctttaccatcctgattaactctatttttgtttgttttctcttcttgcccgctcccagacacgaatgcagagtttgagtccagatcccaaagcccagtacacaagtgtctacggagccctcaagaaaatcatgcggaccgaaggcttctggaggcccttgcgaggcgtcaacgtcatgatcatgggtgcagggccagcccatgccatgtattttgcctgctatgaaaacatgaaaaggactttaaatgacgttttccaccaccaaggaaacagccacctagccaacggtattttgaaagcgtttgtctggagttagaaagttctcttcttcaacacgtccctccccagggtgttcctccctgtgacccagccgcctcgacttcggcccgcttgctcacgaataaagaactcagagttgtgtgtgcaatgcacacccagacacacgcacgcacacacacgcgcgcgcacacacatgcttttttctgttcccctccgctttctgaagcctggggagaaatcagtgacagaggtgttttggttttattgttatgtgggttttcttttgtattttttttgtttgttttgtttttaaacattcaaaagcaattaatgatcagacataggagaaaccctgaatagaaacaaaacttttgaatgctggattcaaaaaaaaaaaaaagttatctggacagcttctttgagactatttaaaaactggtacaacaggtctctacaacgccaagatctaactaagctttaaaaggtcaagaagttttatggctgacaaaggactcgcgcaacgcagaaggcctttcccaccttaagcttccggggatctgggaattttacccccattctcttctgtttgtctgagtctcatctctctgcaagcaagggctgaaatcattttgtttggttgttttgagggagagaggcggggtgggggggtgcaaatctgccagcagctcttacgtaaggcatgttttattggggagggctgagcttttattttctcctctccagtggggttggcttttattgtttcttgtttgggtttggaatggaaatatggatagcagcataaagtacttttattttgacaaaattcatttttttcaacaatggagacatagatttgacccacaataacttctccccctctctttttactctgctcaaaaagcatctctcctcccattacccaaccttggtcataagtgtgcctggctggtttgcagatatttgttctgctttgtaaaaattggccattagtgcatttattgagatgatctctaaagagctatgccctgacctacccctgattctatgacattggggcccttcttttgctgaaactgccttacgtaatggttttactccttgaaagagatttgacggaatccattttatgccaagtgctgccctgcactgtttctgcaatatgtggtgtatgctgtggtgatcttgctgggaatgattataagtgtgtgtgtggtgggggagtgggtattacatgcattgctgaagagtcatcctggtgttcctcattcctcccaccttcccgtggtcattttaattacggggcagtgtcaccgcaaagggaggaaactcaaagccgaaagcaaaattccaggcctgattctggcttttgaggttcctggttcttgaagccaggcctgacccgactctcagatggggtcagtcccgtcgctttgcagactgaccctggaaatctacaaaatgcagattttcctgatttcctcttctcttgcccagttttttttttttttttttttttttaaagcctggattgtaaccagattttcttttttcccccttctcagctgtagatatgatatctcctttcagggccccagcttaagggcaaagtgagttaatgtgtagacaaaggcgagggacaagagagagttaacatctagacagtggaaaaagccatggtgtgtggtttctgggaaccaccaacacttgcaggtttagctttttcccagggttgactacaagaaagaaaaccatgtttttgcaagattaaaatgtggttgagtgtgcctaaattaaccatccccatttttatcatatttccaccatcacttcagggttttaagagtcagtgctcacctgggcggagctggtagtacattttgcttcttagaaagctaagtcctgggttccgtctgattttaggttccaggaacttcctgagaacacccgatcgcagagggtaattttctggagtttgttttgcagggatagctgggagtatggccaccctgctccacgatgcggtaatgaatccagcagaaggtaatgtttcatggtcccagggaggggcagtaggggatgtgcaaaggggcacaaaaaatggttgtgggagagtggagaggactgaaggtgggcagagcggctcctagtctccagtcagagcagacaggagaattgaattttttactacgttatcaaaggcctcaagaaaggacgtgaacataagagtttttggtattcctgtgctcggagctactcaaagtgtgttctacagaccagcagcatcagacatcttgaggggtgttggaaatgctaattctgaggctgggtgcagtggctcatgcctgtaatcccagcattttttgggaggccgaggtgggcagatcacttgaggtcaggagttcgagaccagcctggccaacatggagagacccccatctctactaaaaatacaaaaattagcctagtgcggtgtgtgcacctgtaatcccagctactggggtggccgaggtgggagaatcgcttgaacccagcaggcagaggttgcagtgcaccgagagtacgccactgtactccagcctgggccacagagccagactccatctcaaaaggaaaaaaaaaaaaaaaaagggaaatgctaattctggccggcatggtggtttaaaactgtaatcccagcactttgggaggccaaggcaggcagatctcttgaacccaggagttcaagaccagcgtgggcagcataatgagaccccgtctctatgaaaaatacaaaaattagccaggtgtggtggtgcgtgcctgtagtcccagctgttcggaaggctgaggtggaagaattgcttgagtttgggaggttgaggctgcagtgagtcgtgattgcaccactgcactcagccagggcgacagagcaagactgcctcaaaacagaaaagaaaacaaaggctaattctcaggctctacaccgaacctactggatcagaatccctggagctagggaccagaatctgtttattggtgattctgttgcatgcttttgcactattctaaaacctatgtgtgcatacacacacacacacacacacactcactctcttagcccttgttaacccttatcgatcctagacaaatgtatggggaacccatcagaggctattctttagggctagtgttcaatttgactgtttttaatatgaaagattatggatcacatttcaaacagatgtgaacgtggagagaataatacgatgtaccgcagtgtgtccatcactgttcttcagaaattcacattgggtcattttgttttagccatctctttccacattatcttctttttgttcttttaaatttcgggggtaatatgaagcaagcctcagctgggcagaccagagtctgttccctttttatatatcccggcgtcttagccgggtactcgtgtctgaatagtgagtaccttttgggcctggcactgggcaggccttcagctgggtcattctctacctggcgatggctttaggtgagttgtggagctcttttcacctttttgcctcatctgaaaatagttcctggccagaagggagaattggtgagaaaagtttcaacattttaagtctcatgctataagtttgcctgtcttttgtctttcaaggtgaagctattaaatttgttctcagctaccctccatgtcctagcagatagaggacttggtctgaccttcagggttgtgatggggcaggttgggaggtgggcggggagtctctgtggtctgggtgctgaggttgacccgatgggcaggtgaagaaaatcaccttctccattccccttgatttctttatcgtgtgccgcacgaggcatgctgaagggacacacacctttccccctttttatttacaaagtagagagctgagaaagacagctcatgttctgttttgttttgtacacattatctttctcaagagatgtgatgtccttaagtaaactgacctgccttcatggcttgtcctgtaatgaatgcgttcaagacagtgttttggggacaggaaagaggcattcttaggtaagcggcggtgggggatggggtggggtggagaggaaacccttctaggaagtagttcaatgaaaaacctaaaaatgcccaaataaacattcgcttacatattatatatcttgggcttctttttatgacagttcattcagggacccagtcagtaaacaggtagttaacttcgtgtaaccaagcaagggttttgtttatcttttttaaagtagaaaaaagtgaggctcaaactctctctttctccttgtcataactattggtttacagtctttatttgtttaaaagtaaagcacattgtatgtatttatttggcaatacatgaggccattaaaaccctgagcctaaggtaccacagttagtctcatttgcctcttgtcctgtgaactccacttagaatgtcattgaacttgggcagacataattctagtgtctgttccaaacgcactgtgtcacagaagctagaattaccattagaggcacaaacccctgagaatacacaagggggcacgcttccagtagatgtgttggggaaggaggagggcagaggggacaggggacaggattcagctttgtggtgggtcctgagggttcctaccaggggtagccaggatctgggaaacagatcagcgactctagtctgaagtggctgcctggttcgggggctgccttcagcaagattcaggcaggagagacggaaatagccaccttccaggcgtgagtcctggagataaaaatggattttaacctaggactgccgggagctggccctccgcggctgctcagactagggctgtgtgtgctggctctcgcctgtttccggtgtctaactggcttgtttctctttatggcttggcttcattccgacctggggtggggccacatccaacccactgcccactggctgtccgtctggcctgccccgcggttccaaccacagtggtgaagcagcgcttgcagatgtacaactcgcagcaccggtcagcaatcagctgcatccggacggtgtggaggaccgaggggttgggggccttctaccggagctacaccacgcagctgaccatgaacatccccttccagtccatccacttcatcacctatgagttcctgcaggagcaggtcaacccccaccggacctacaacccgcagtcccacatcatctcaggcgggctggccggggccctcgccgcggccgccacgacccccctggacgtctgtaagacccttctgaacactcaggagaacgtggccctctcgctggccaacatcagcggccggctgtcgggtatggccaatgccttccggacggtgtaccagctcaacggcctggccggctacttcaaaggcatccaggcgcgtgtcatctaccagatgccctccaccgccatttcttggtctgtctatgagttcttcaagtactttctcaccaagcgccagctggaaaatcgagctccatactaaaggaagggatcatagaatcttttcttaaagtcattctctgcctgcatccagccccttgccctctcctcacacgtagatcattttttttttgcagggtgctgcctatgggccctctgctccccaatgccttagagagaggaggggacggcacggccgctcaccggaaggctgtgtgcggggacatccgaggtggtggtggacaggaaggacttgggaaggggagcgagaaattgctttttctcttcctccctgggcagaatgtagcttttctgcttcactgtggcagcctcctccctggatccttagatcccagaggagggaagaaaatttgcagtgactgaaaacagtaaaaaaaaaaaaatttatgtatataaaagttgcattacacagtacaaaatagatggataatgtttatcctttatttttctatgtagaagtttttgaatttgtgtgtgtgcttgtgcgtgtctacacctagtattacggctgggactctccagctgtttttgttgttgttatgtttttaagagggttgaattcttccatcaggtgaacgaaaaaggcaacaaagtaataaatcagtgaatgtggccggcagctgtgtttagcccctccagatggaagtttcacttgaatgtaaaataataaagtttatattttgaatttctcttttcatgggggaaaaaaggtacgttaaaaaaatcaaaataatgatatgtcacttgcagctacctttttttttcttttaaattcaatcagccaccttcatgtgcctttttcctttgtctttccccaaaattccaggaccagagatctggccctggcctattttctcttgctgtgtacacacacgcacacatgctgggtggcaggatctcgcccgctggagggtggtggagcccagtagaattggggtgactgggcataaacctgctgagactgcttccttccctggttgtgagtgatgtgaatgcctgccttccccggtcagcacttagaagcccttgataggcagcatttggcgacttgtggggcaggtgtttgggataaatcctaccttcatcctaggacttatttctgcatcagccttttaactcaggcacttcaggtaacgtgatctatgtgtgttttgactgaatctcatctcctgtgtttccctgtgcagtctagggaagcatgtctccagtctttgtccctgtcttgtcccaaccattaattctcatgtcacagcttctcactgcatgtgacaagagccaggcctatctgctagggccctgcggctgaggtctgacctggaccctcatgcccgagtcggaagacccctctccagaagccattctgcatccttgtctgctctgcgtcacccgagaacacaggcttcgcagcctcgctttctgaaatggtgtgtgccgagtcagattgccgctcagagaaaatacaagcccgttttccctagctgtgccatttggtgctctgccaggctgccgtgcaagggaataccgacgagacgagctgcactgtctctgatttggagccctcaccggagcttgtctttaaaaatgagcaggaagctcatgtatgtttgcatttcagtgagccgggtcctgacctgccgccacccatcacggtcagcgtggtgcatcttaccgaggaggcgcaggcctggattcttttgagtggtgctactgcctaggaagtaacacgtggagaatttccatcttgggaccatgcacacagtgccttggggagtagattttgccctaatagcgatgaagaattttatcagtcagtggagttcctttttcagatcagggatgggaaagagccaaactgggtacctcccacgtgtgccccgtgaacagccctttgcagctgggctgtggggcttggctgctgccctgtcccatctggcagttaacgccttctccctgctctgccccccactccccaaaaccagttgcagcctcaacccacatggggatgtagaaagccgtaaagtccacgctactgttgaaaatgtttacatctccgctctcaacctgccttgggttcgtgttaaatggtgttaaattctgcaaatggaggggaaaaaaatcaaattctaaatttcaaagtagaatttaaagcaaatttgtaaaaaaattatcctaccaccccttttggtccacttaagatatgccacgctgaagcaaggtatttcctactggattttgctttcactggtgtttagaaaataaacttgatttctctaggagcactcctttggttagagggatgcaagaaggagaggtgaaggtggcgtgtggtggctcatgcctgtaatcccagcactttggggaggccgaggcaggcggatcacttgaggccagcagtttgagaccagcctggccaacatgatgaaaccccatctctactaaaaatacaaaaaattagctgggcatggtggcaggcacctgtaatcccagttacttgggaggctgaggcaggagaattgcttgaacccaggaggtggaggttgcagtgagctgagattgtgccactgcacttcagcctgggcgacagagtgactctgtcaaaaaggaaaggcaaaaaccggaccctggagctctgtgggccctgattgcaggcccctccctgtgtgatgagggatgagtcagcttggggagccacttggccagcctgcatgcctggtcatcaggaggttgagaaaagccttgaaagttgtgaagcactgagcagatacaagtgtttgttaattttgtagaaattaactttcccatctggcctttatctccaaagttggtattgttgctccacgcagactgcagtccggtttcttattgtgactttgacaatgcaaagtgcaaaataggaagaggcctccccaccccactatcccaccctggtgaccaattcagtgtaaccattgcacgtactcagtcattggtgtctttggagtgacatctgcagccagttagtgccacctgagtacagcactcgtacttttacatgatgtgtgtgtgagtagctcttctgtccaaaccatgatttgaggttcaactacctgtagatcaaagctttattttagaacgataaactgattttttccaaatgggtgaaatcttctccccatgactatgttttcttaactttgcattgaatctatttactgggttacattctatgtgtagtttgctttcttcatttttttttcttttaaaatgctcatgtcttattccaagcaccttcctccaaagtccccataaagctgcatctccaacacattgttatgccaataaggttttatttaactttatttaaggatgattgtgtctttgaatgacaaatgtactgctgcttcctacctgcaagacgcacaatgtatgtttcaagggtgagcaagtgttatttcttaaatttctcaaatgcctgtagtaactattgtttctgcctctcaattgttgccagctctttgaagaaggggagaattgtgtgtttttgtgtggggatgtttctgatatgctgctacagttgcaaaacactggagctagagaaaataaagtactgatcttcgaagtgttgtgggctctgtggtgggaatcctgaaatgagaagggagtggatggcaagaggggacgtccttcacggggcctatgcttgttcctcttgagcactaaggaccaaggtctgcagctttgataggaacagcccctgcaaccccatttccccagggcaagcagattgatggtggtgtttgcattgtcttgctgggcaggagcgggagccctcccactggcttggctcaccatgctggcgagggtggcacttttctttctcattgtgagagcctggctgtgtgtggcaggctacaagtggttctttggaacgtgctgtgctcatgcctgttttctctgtcttacacctcagcttaagcaagagaacgtgacctcttttggaggtgggaggagggaaggtttggacccctttgagaagccagggatgactctgatgcttcccacaagtttgaaagtctgagcacccaccttcagtatgaccactgaagcccttggcctgccatggtcagggtcagaattgaggtcaggcctgagaactggccaatgcaggggtgcccggaggtggaaaggggtggtggttagcggatggggagcgttgggataaactccctgttttgtaatttacctatggccaatgctgtgctactccaacttgtggttgcttcccctcctctggggtgggcggcacagctggtctgcttccagtagatatggattcattcaacagatatcccccctctccctccaccatggaatcagtcagccaacaaattggctgtgcctcccatgagcagagcctcattcaggtgctggggacagaatgaagtatatgatgtggtccctgtcctcgaaggccttacagcctagtagaagagtacaaggggagatgcaaactccttaagacaatcagatcttgacccatcaagatggtagcaaagtcagccatggaagcaaaacagtagctttgtgcccattagaccaagcttcatgagacagtggccttgtctgtcctatttgctgctttattcccagccagtggtgtgctggggctggccctgcaccagctctctaggttgtacagcgcacattccttcccagcttcacattccatattaccatgttggtagcttgaaatcagcaacagtgggaatatttacaccacagaaatcgtcaagcgctacttatcaaggcctttgcttttccaatagctggttcatcagcacaccactgctggcacatagcatagtgcttggtatgtgctaggtgttcagtgaagatttgctgagaggaaaatatgaaaagtagaacccagtgtcaacctagggggcccttctgtggtgcccctcttagtttgccaccagcctcctcatggaggcatctttctatcactcaagagccctctccagcacgaccacattcaaattccagccctaaaaaggccatgaaaggaaggtatacctttcctctaggggcaaggtctccttactgagttgcatgttttctagttatcagctacctcttccaggagagacctctgctcctacccaaggaggggacttaatgtgacaaacatttcagagaagaagtaatgagcctagtcttgtacaagagaaagacacagccaactgggcagatgtggaggtgggttatgattgcttgcaagggaacaaagcattgcctctggtctaagtctgaatgcagtgagtagcctaagagaaataagagcaatttgggagaaaagagcttggtttgcatccataagggctttgtaggagacaccctcatggtaagtaagctgcacataagagctttgactgccattgtaagaagtttgacctttaagcagtaggtaatggggagtcttatgaagagtatttgagcaggggacaccatgattggagcttggttctagggaaactcatctggctaaagtgtacaggaccaagtgaagaagaaatacggaggaggccaggagatggtcagttccatgtcacagtgaaattgtccagaagagggatgactaagagaaaggtgaaggagactgaaacagaatgagtgggactggatcgatgagagtgtagaggtgaagtcaacagaggcctgggggcgcaggactctagggcatgctgagaacaggctgggctgtctgagaggagtaggaagacctggcggtgaggactaatacatggcggcagagaagatccctcatctctaagtccatgggtctctccttagtcctcctcttctttgggcatggaaaactcatctcaagtccatgggtctctccttagtcctcctcttctttgggcatggaaaactcatctcaagtccatgggtttctccttagtcctgctccttcttggcatagatgcctgatctccaagtccatgagtctgtctttagtcctcctcctccctgggcatagactccacatctctaagtccatgggtccctccctagtctttctccttgaacatgcacaacacttgagggctctctctttagctcccctacttgacttccatttccctgctttctgctggcctcccacctctatgactaccttctctggcccttcaccagcttcagctcctttccgggccacctaagtatggctgcttggaaaggttctgccgctggggatcctgtctctccacacccccttggtgctgatctgccctcctctggaagatgattcttagatatggggctgtagcaccccgattcttctcctgaactccagatttcaatgtccagtggcctgctggagatctcttggatctcaacttgtcctccattcttaagagactatccccccttgctgccagaggcttaccgtgttactcagttgcttaagaccttcaagggctcttcattgttgattgaatttaataggctttcctgcatatggcagttcccagtttagcttcgtgtgtaaggaaatgactagagagaaacagaataggtcagcaggatggttgtgtaagaccctgaggtcttaatcttcttaacagggtggtgctgtgctctttgcagaactttgttcccattggaatgtcttcctttcctgccacctcctctctgctcattcaagtccccttttcaggctgccttgaagatagcatttactaccacattgtggagctcctcctaatttgcctgtctatgtgatctttctttcctctttgtcagtatctacagcctctttgacaggcctccaacctgccatggctgacctcactttgcatttttgctgccttctgcccaaaattatgtgcccagtgagggcagggactgtggtttattcactcctgttttctccatagccctccagcctactgtttcccgcattctgcataagagtgacagttattgttcgttgtatgtaacaaacttctgatgtcctgttaagcttgaaactcctgtgggacatccaggtggagacccccagaaggaaatgcaatattggtggtcaggagaaaggctggaactggaacaaaggacctggcatataggccaagggatgtggtggccaaagccatgggcagaggagagtccctagggagaaaaacaatctcgtggaaggcttacatttaatagtgaagagagaaatgggaaccaggagaggctggagtggtcagagagttatgaagtaaccaagaggtgaggcttttacagaggaggggtagtaatcagttctacaagcttaggagtgaaatataagcaaccaaagctattaaaaaaaaaaaaaaacaaaaacctacattgtctctccctgctcttgtcttctttgttcccggtttgtttttccctgcacttactctcttgcctttttggattcccttttaaatgtcaccttcaccaagttcagctgcttccacacctccccctcccctgaccccctgcacccagcaccattcctactgtatctagcataatatttcagaggctacctaaaggcaataattagacaaacactcaaaactgcacatcccaggcttgttcatgaaagtgaaaagctggaaaacaaacgatatctatcaagaaattaaatggtttatagacaatcctggctgtcctggtatttttgtaggaaagaaatttctttaagggtccccagcaacataccataagatctttattcccaatacatttatcaaatttaggatacttctgagcttccccatttctctggccttgcctcctaaaggtaatgttattttggtaaacatgtgacctctcttttatgaagccatggatattacacaattccagacttccaggttcctgttgccatagcttctttaagaagctcttctttccttatgctcatacttacctatggtagctttgatgtttcattttccatagtaagtgagactctgggcagagcacccagcactactgctaagaggacacaagggccactttagcagagacagacagcccaacccctgtccactgtcagcagaaactcgtctgtgacaaaaagtataaatcaaaatcataccagtgatgttttagtcttcaacctgaagcagttgaagcttgggtgtcgccttggagtcctggtgtatttctattgttgtgaagtgctctcagtgttgaatgggcacccgactgcaacctcatgaagcccagagctgcagaaagagggactgtggacatctggcttcttcattattgtcatgctgccccttggggtggctgcctttaagggaagagggggtttaaaaagaacaaagggagatatgtaccaagggtgtttgtcctcatcagtatgtgagttcgtggaaggagttcttgctgcctgctgaacagtgaaaatattctcttgatggacacctttagcttggattgacaggtgataaatatatatcccaagatttctacgttgagcctaatgcaagcagctggtgaaatataccagcacatcctcaatctttccctgattgtgtctgcataaagtttagaaataaataatgtgtgtattagttcattcttgcaatgatgctataaagaaatacctgagactggtaacttataaagaaaggaggtttaattggctcacggttccacaggctgtacagggagcatagccagggaggcctcaggaaagctacaattgtggcgaaaggtaaaggggaagcaggcttgtcttacatggccagagcaggtggaagaaagaacgaggtgggaggcactacacacttttaatcaaccagatcttgtgatagctcactatcatgagaacaacaccaaaggggaaatctgcccctatgatccagtcacctaccaccaggccccacttccaacattgaggattacaatttaacatgatatttgggtgggaacacaaatccaaaccatatatatatatatatatatatatttttttttttttttttttgagatggagtctaactctgttgcccaggcgggagtgcagtggcatgatctcagctcactgcaacctctgtctcctgggttcaagtgattctcctgcctcagcctcccaagtagatgggactacaggtgtgtgccaccacgcctggctaacttttgtatttttagtagagatggggtttcaccatgttggtcaggctggtctcaaactcctgacctcaaatgatccacccgcctcggcctcccaaagtgctgggattataggtgtgagccaccccgcccagtcccaaaccatatcaatgtgcaaattttaatgtaaatagttatggatattcataatgtcttctgtctgtagctctgggcttcatgagactttaatgggcgctgctttctattagcactttcaacattgagagtccttgaccgcaacagaaaaacctgaggactcaaggccaatgcccaagcttcagcggctttggtctaagactacaaaaacatcaccagcctggaaactggtaatacctaagtgctaggagcttccttgggtttttgcatagtctctagcacatccagtgatccattcagggtttcgtgtgtatccataacaatggaactccatggtcatttcacaatctttaggtagggtccaacgtctgagggcaaattgtcctgcatgactccctctcacatttcccctcaagctcacaaatgagtaaaatctggataaattacacatgaagggggttatggttaacgagactgagaggcagtcatactgggaagagcagccaggagaaaagaatgttctagatgggaagaatgaactaaaccctgggcctattactcatcatggtagaaaaacttcctttacacagaatggaacatgaagttctaagcctcctggtgttccaatgagcttgggttgtcaagagcactcatttaacaaacgtccttagactcttactgtcacacttaatctgatccagcttcctatcttgaagagattatttttgctgattttgacttccatcaaaatctttgtttcttgatgctctcttgaatgtccaccttggcttctataattcttttgtttttaagatcagcaagtttctcaaagccacatttgaaaagcatacaattacctttgagaggattccaatgcaaggataattttcttattggttcatataatgaagtgatttgtttgctctggtccattttagccattgagcatataacagatgggtcagaggcctagatgctagtcctgcaggtcactaaactggttgagtgatcttgggtgatgttgggtatatcacttaatctctctggtctgcagtttcctcagctgcgaaatgaaaggattgggccagatgatgtgtaataataactcctctagcttctctagcctgtaataatgtccacagagtacaggctctatctagcctctaagtctatgattaaaatatgattacatgctttttagatgaaattagaaggaaaatctcacaggccttttaacttacctaccataaagaatcattcattaccattttgctttacttcttctcacttccctcttcctaaactactctacaaataaagactaaaatccaggaacttgatataggagaatgatggatgtgactatttcacatccttttctttaatatgtttttaattacttgcaagtaaataatttatttgcctatatatctttctgaactctgtgtggggactgttggtctctggtac

SEQ ID NO: 515 - DNA, 1779 bp, Homo sapiens
cctcctgcgccccgccgagctggcggatggagctgcgcagcgggagcgtgggcagccaggcggtggcgcggaggatggatggggacagccgagatggcggcggcggcaaggacgccaccgggtcggaggactacgagaacctgccgactagcgcctccgtgtccacccacatgacagcaggagcgatggccgggatcctggagcactcggtcatgtacccggtggactcggtgaagacacgaatgcagagtttgagtccagatcccaaagcccagtacacaagtgtctacggagccctcaagaaaatcatgcggaccgaaggcttctggaggcccttgcgaggcgtcaacgtcatgatcatgggtgcagggccagcccatgccatgtattttgcctgctatgaaaacatgaaaaggactttaaatgacgttttccaccaccaaggaaacagccacctagccaacgggatagctgggagtatggccaccctgctccacgatgcggtaatgaatccagcagaagtggtgaagcagcgcttgcagatgtacaactcgcagcaccggtcagcaatcagctgcatccggacggtgtggaggaccgaggggttgggggccttctaccggagctacaccacgcagctgaccatgaacatccccttccagtccatccacttcatcacctatgagttcctgcaggagcaggtcaacccccaccggacctacaacccgcagtcccacatcatctcaggcgggctggccggggccctcgccgcggccgccacgacccccctggacgtctgtaagacccttctgaacactcaggagaacgtggccctctcgctggccaacatcagcggccggctgtcgggtatggccaatgccttccggacggtgtaccagctcaacggcctggccggctacttcaaaggcatccaggcgcgtgtcatctaccagatgccctccaccgccatttcttggtctgtctatgagttcttcaagtactttctcaccaagcgccagctggaaaatcgagctccatactaaaggaagggatcatagaatcttttcttaaagtcattctctgcctgcatccagccccttgccctctcctcacacgtagatcattttttttttgcagggtgctgcctatgggccctctgctccccaatgccttagagagaggaggggacggcacggccgctcaccggaaggctgtgtgcggggacatccgaggtggtggtggacaggaaggacttgggaaggggagcgagaaattgctttttctcttcctccctgggcagaatgtagcttttctgcttcactgtggcagcctcctccctggatccttagatcccagaggagggaagaaaatttgcagtgactgaaaacagtaaaaaaaaaaaaatttatgtatataaaagttgcattacacagtacaaaatagatggataatgtttatcctttatttttctatgtagaagtttttgaatttgtgtgtgtgcttgtgcgtgtctacacctagtattacggctgggactctccagctgtttttgttgttgttatgtttttaagagggttgaattcttccatcaggtgaacgaaaaaggcaacaaagtaataaatcagtgaatgtggccggcagctgtgtttagcccctccagatggaagtttcacttgaatgtaaaataataaagtttatattttgaatttctcttttcatgggggaaaaaaggtacgttaaaaaaatcaaaataatgatatgtcacttgcagctaccttt

SEQ ID NO: 516 - protein, 332 aa, Homo sapiens
MELRSGSVGSQAVARRMDGDSRDGGGGKDATGSEDYENLPTSASVSTHMTAGAMAGIHSVMYPVDSVKTRMQSLSPDPKAQYTSVYGALKKIMRTEGFWRPLRGVNVMIMGAGPAHAMYFACYENMKRTLNDVFHHQGNSHLANGIAGSMATLLHDAVMNPAEVVKQRLQMYNSQHRSAISCIRTVWRTEGLGAFYRSYTTQLTMNIPFQSIHFITYEFLQEQVNPHRTYNPQSHIISGGLAGAAAATTPLDVCKTLLNTQENVSLANISGRLSGMANAFRTVYQLNGLAGYFKGIQARVIYQMPSTAISWSVYEFFKYFLTKRQLENRAPY

SEQ ID NO: 517 - DNA, 40611 bp, Mus musculus
  misc_feature (1)...(40611): n = A,T,C or G
tccagcactgctctggctcggtcacccagtgccatcactgacaggaggcaggctcatttctcctgctctcctgccctcagacaggttcatctctgtcccatcaaccagggacagccctactgtgctgcccaggtgaggttcagggcctgatctcccgagtgctgcagccatcaaggaacaggacccagggctctcagacaccagggctggctcacccacacctcatcatcaggtccagctccactgcctggatgaggtataggctccgagtgctgccaagggtgagagatgggccaaccttccagagtgctgcagcaagtgaggggcaggaccagttctgccgagcccctggacacccactggtccccagcagctgccatgaacaggatgtctccatgttttctagtggtaatatgagctgtggacattgacactgaaacctgctgttgtggagccaaggacccagacatggcacttagtggggcagcttgtgctaggacttcaccaatggccccaggtggcagggatggctactcacaactggctactcctctccaccctcaagtctccagtttcatctctcttcatgatgctcaatgtactcttcctccctttctctctcatctggccaccacatactcacacattgtggtggctcctgctgcaggctgcccacgggctggcgtgacatcctttgtgctgcttggtgtggtggcaagcggatgtctacagcccgcctgggcctcgtgctggagggcaggccttcgggtggcatgcaggtctgcaggtctctgtctgtcttcctcttctcacgctgcactgtgtggtggtaggtggggtgtgtgctatggcccgtctgagaggtctgtgggaacacacactgcgtggcatagcagaatgcaatacaagtatctgtctgtcttcctccttctctactatgctgcctggatttgatttgatttggttttttttttgttttgttttgttttttgttttttttcttaggtgttctaggcataaaacagcttaggccaccaagccagacatcaagttaggagaacaaaggactgccacctgctctgcccctgtctgatataagagcaaccccacaaagtgtctctttgcccattgtcaggggtcctgatacaacttatgactgagaattgtcttttgtgtctgacttctatttcttggctcattcatgatggcattcatttctaattatggctaagctctattttacagtatggttacaggaccctttgtttatgtattcattggttggtagacatttggaatatttccacttttttgtctgtgatgactctcaagtgcaagttttgttgaacaccctatctcctttttttaaaaaatgagttttttttttctcctggcccaaggtctcagaaaaacaattctgaaactcaaaaagtatttgcaaacacctatgccataagctttggttgtttcccaattagatcatagcgtaatatcctatctagtctaagttctgccatgtggctgcttacctctgctcagctcccatgtttctgaccttctccatgttcccaggctaattctctgcacttgactctagcccagaatcctttctgcctaccacatgtcctgccttctattccaccctttcctataggccataggtttttttttttaattgacaagtgatgcaaccatacagcacaaagattttctctatacatttcttataggtatatgtacctataagaatttctagatcaaatgtacctataagaatttctagatcaaatgataggtttgtgttacctttggtgatacgccaaacatttttccaacatggaaagtttttattttattttgctcatgtatgaaaatctagattatctttcaagtatcaactcagatgtttctgggttagtaaatattttttaatgtcttatttagtttttgattatgttcaggtatctttcttgtttcatgttgattggtttgtatggtttggttttgttcgtttttttgagatgtgctatgagtcttgctacctggtatatagctcaggctggcctcaggcttcatattctcctcctgcttctgtctcttgaccattagagccccagactgtttattattgttttccatctataacatctaaaaatggaacattacttctgcagtggtctcccaaatgcaggctgtttttaaggtaaaagaatattcattgaaaagcaaaaataatgtgtttgttttgacatgtgctttataattatgtagtatattaaagtagctgaaaaagtatgaggcgtataaatgaaactcctttcttgaggggaagggcagaatgaacctgagctacacccacagcccctttaaattttattctgaaacagaatcttgacacatttcccagactgttcattaccttggaaatcatcagcctcttgagaacctggggttacatatgccaccacgatcagtgagtgcttcagttcttgatcctgcttgttttgttttgttttgttttgttttgttttgttttgttttgtttttcgagacagggtttctctgtgtagccctggctgtcctggaactcactctgtagaccaggctggcctcgaactcagaaatccgcctgcctctgcctcccgtgtgctgggattttgattctgcttttattgttgctgcttgagaaagggtctcacagtgtatgtaacctggagctcactaaatagagcaaattatcctgtaattgaagatcctcctgcttcagcctcccaagtgctgaatttctaggcatgaggcacaaatttcagcctgcattaaaattctgtatcttaaagtaaatctggtaggaaagttcttaagattgcattgcccagaaactgagggttccttgttaactgagggtttcctgtttggctcagatgtcagcctttcctcttggtctacttctgctgattaccagagtaaaacttggggcaagtcccttctccacccatttatttcacttctcaaattgatacattagcacctgaactcatgtgagttttcactactgagcaacgatgggaaagagaatgtgcaacggccataggaagttggtcacttgagaatcttgggcaactctatgctctttagagcatctggtgttctctgatcctcagggtcatttgtcaatgtgccaccatgcctattactttaacagctgtcaatcattgctctttatgtttctgacagaaaaccttcagagctattagcaaatctctattactaaacatttgaaccgagaggagtacctatgacatcacccagcagcctctgcagcgagacactatgttcttcctgctgaccttgttacaggataacattgtaaaactttgaccttttaaaatctctgtttattttgatcctggatgctacatagaagcttggactttatgttgctgggcatcttaatgtttccagtttgacaagatggattcagtctgctgcatgtgagggatgtgaatcgttgtttgagtcagtgtctgaagggaagtagacgcggagagagacttaaaaggttatagggaaatgtccctaaatttgatcacatgctacatttgaagatttactcatttttaaccacatttgcctactacttcgtgtgtttagtaaacaacaggaaatcagtaataataaattttctttgtgagaagatgggaaagggggaccttgtatgtttttgatgctaatgaaacagcactgcccttatgggaacactatggagggtcagccaacgttgtaaacagaaccgccaaatgagggagatgtcttatttatgggtaaatatccaaaagaagtgaaatcatcatgctggagacagctgcactcctctttattacggctgctcaatgtaaccaaggtttgtaatcaatttaaatgtccatcaatagatgactaaatctttaaaaaaatacagtatatatacacagcagaatgtagtcaacctgagagaggatgaaaatcttgtcatttttgacaacatgcatacatttaggggcactgaatgtaccaagtgaaataaaccactcagcaagacaaacactaaacagcttgctcatatgtagaatagtccagcacacaaaagcagggaggcaaatggtggttggcagggcctggagaatagacaataattggggagatgtccagtttcgcttagacaggaacaataagttcaagagatttgctctacaacattataactaatgactgtatgtttcaagtgtcctcaccacgtgtcttagttactttctattgctgttatcaaacaccatgaccaaggcaacttataaaagaaagcatttaatccagcatatggttcagaggattagacgatgatatcagaacaaaagaacacccaagagctcacatcctgatctgcaaccataaggcagagagtgaatgctgggaatcacaagaaacctaaaaacctcagtaacgtcctttccaacaaggtcacacctcccgatccttcccaaacagttctacccactgggagttgagtgttaaaatatatgagtctgtagggctcatgctaccataccatgaacacaaaatataagtgagaatgcactctggttaatttttcttcaatctaacaaaagctagagccatctgggaagaaacttcacttgagaagattcctccatcagattggcctgtaggcaaatctgtgaggacattttcttaatgattggtgtaagaggacctagcttgctgtgggtggtgccatacctgggaatgtggtttggggtttataagaaagaaaactgagcaatccacagaagaagccagtaggtagcaatcctccatgctctcttgcttcaatctctgcttccaggttcctgccttgagttcctgccctgacttgttttcatgatgggctataagccgaaacatctttccttcctgtgttagtcagggttctctaaaagagcataattgatggaatgaaacatatatatttcagtgaaaaaaaaatgtgattacctagtttacaggctgtggaacagctagttcaactctggtgatctcctgatggaaaggccaagaatacagtagttgttcaatacatggatgtctttggtatgtagctggtctttggtatatgatgaagttctgaagaattgggttctaataccagtgagaaaatacctcagcagcaggatagatgaacttgccattgggaatgagggaaagcaggcaaaaaataaaagctttctactttcatgttattttatgtaggctggtaccagaaggcatggttcaaatttagagtgggtcccctgtctgtaagtaattcagatatatagtgggtcttcccaactcaaatgatccaatcaagaaaatccatcactggtgtgcttgggttttagttggttccagatatagtcaagttgacaagcaagattagccatcagactcctcaagttgtctttagtcatggtgtttatcacagaagtctaaaacaaactagaaaagaatatccattggctctctcaatttagctattccataatgcagacattttcaaacatcctgtagtcttctataaatacatacatagtccttttagatttatttatttagttttatgtacatgcatgttttgcatacatgtatgtgcaccgtgtgtatatctgatgaatcctcaggagctggggtcgtggatgggtgtgagctgggaattgagtctgcatgctctgcaatagtgacaagtactcttactgctgagccatttctccactttgtatttttgtttcagttaaagatagataataaataaagaatagataaaaatagaaagattatctttcaccagcaggtcttttatttgtgatttctgctccccaacacctttattctaagaaaatggttagcaggcatttaggctgtgataggatttcttctaaagggtattctattctttttaaaaaaaatttactcttctttcatataatatatcccaaccagttttacctcccttctctcctcccagtccttccttcctacctcccctcccctcaggatccacttctcttcaatttcccttcagaaaggagtaggcatcccagggacatcaaacaaacatggcataaccagttacagtaagactaggcaacaccctcacatcaaggctggatgagacaacccagtaggagggaaagagtcccaagaacaggcaaaagagtcagagacacctccactgttaggagacttggcaggtctggcatggccttggtagggataaaatgacatggttcctgcccctgggacagggccagcaggagtgggctttcactagtgtcaaaggctgctgtgggtataaagcttgtttgtataataatgcacatattttatattcctcagtcatagaaagtcctctctgttaacattaatgactccatgataatcagagacagcctgagtccaggaggtaaaggtgtggcagatgtcacaacatagtaagcgctgggatcctcaggctgtggaaaagaactctaaaaaataggttcacaggaagctcaagaagaagaccaaagtgtgggtgcttcatttccttcttagaaggcagaacaaagtactcacgggagcaaatacggagaaaaagtgtggagcagagattgaaggaaaggccatccagagactgccccacctgggtatccattcccatatacaatcaccaaacccagacactattgcagatgccaagaagtgcttgctgacaggagcctgatatagctgtctcctgagaggctctgccagagcctgacaaatacagaggcagatgctcacagccaatcattggactgagctcaggaatcccaatggaggagctagagaaaggactgaaggagctgaaggcgtttgcaaccccataggaagaataacaatatcaactagccagacccttcagagctcccaggaactaaaccaccaaccaaagagtacacatggctccagctgcatatgtagcagaggatggccttgttggacatcaataagaggagaggtcattggtccaatgaaggctcaatagatgccccagtgtaggggaatgccagggctgggaggtgggagtgggtaggcggatgggggagctccctcatagaagcagggtgggggatgggatatgggggtttccagatgtaaagccaggaaaggggataacatttgaaatgtaagtaaacaaataaaatatccaataaaaaagaaaaaaatatgggttcaaaaacataatttctcaaaaaatcaggatgcaatatgaattttatgaggggcttcatgaaggtaaaggaacaaaagtagctgtgctgtaagccaactgtcaggagatactaaggaaggagataaagagatttaggaatggtgattacaggagatcccacccagctaattttttttagtttatacttacaaaggcaggcagattcctgagttcaaggacagcctggaacacagcaaggttaggcccaggtgtggtagaaatggtaatttcaggatggggtcccacccagcacagaggcaggcagatttatgaattcttttgcaatgttaaaaaaaagtgtgtttgctgtctcctaagaattaaggatctggtgtcactggatgctgattcataggataatcaaaaggaagctcctctctcatgagtgtccctgtgtcactgcttgcctgtgactttaggtatactgagattctatggacctgttcagttctaatatgatccagttctataatcgagcggagccagcacttgctggccatttgtgtgaagtggaaaatataaggctctgaaaatccctagagagaaagtctgtgtgcttgttgatctatggtcacttctctgtacagaaggcttacaagtaaggctgacctgtcttaacttcaaacttgcatctgaaaataaaatgtatagaaaacaccatgagttggtcgtggtgcacacgcctgtcctcccagtccctagggaggctgaggaagaagtaacaagttcagcatcaatctaggtgctcacttagcacgaccctgttcaaaatgcaagagagcaacaaacggatgggtaacgttaccgtttggaactgtacatgtttcatgtactccacccatgtaatcatcgctaccccacatcataaacaaacatgacgtacagagaattaagggagcaaagcatgacttccttacatagctctattctccggggaataatggactcattttgaaatttggactcaaatttgcctggtattgtggatgagtaagggtaagagagaaacttgctttctactgtgaagttaaatgtatccaagaggaagaagacagtggcttagaagaatgtgctggctctgaatttgtagactaaagatggagatctagggaagagcataggtcacccatggctcctagattttaggctcaagtgatttagacatagtcttcctgggatggagaaagtaggagaagggctgatttgggtgtgtgtgttagggtctgatttaggcatattaaactgagagtctctgggaaatgtcaaataggtaatctgatagacttacctggagtctggagttgtggggaagtcaggtagaaatgtgcatgttggggtcagctccccacaaagcaatgctgttcagagctctagagtcaattctcatagtcacaggcacatggcatgatactcttgcctgtcaaccggactggacagaacaaacccctaggactgtctgtgacacagtcttctgagaggattagatcttgagggttttcacctaacccatggattcaccttcagatgatctaaaatttgagtcgactatgggaaggcagggctggttgggagaagcaggggactaaggtttgcctgtgaagggcgtgtcttacccaggctcttgtctctgactttgccacacactgccacagccatgaggtactgggtgactccacccagtaacacgaatcatgtgaccaaggactgaacgtgctgaagccaggaaccaagtaaaaccttaagtagcttttctctcaggtattttggtcatggaaagctaaccccacgtgctgtggcactcttcatctgggataaccttgctcagatggagtgcgtctgtgtgaaggctgacttggatagactctctcacgctttgctctcaaagatggacagtaaaaagacatgtttgctgggcctggagagattgtgacaaagggcttcttggtgtgcagatcagcatttcagccatcatcccattcactacagctgaaaccagtcagaatcatttaaaagatggagtcccagcatcatttaggaaatattagcagctaatgctaagttcttagaggtgtagggaatgtttgagttaatgtgagtggcttgccacaaaggttttagtggctgtctcctttcattctgatgcttgctgacttccctgtaatgctagaataaactcccaatacaggggtgtaaatgagtctcttatttttatgtggcatgcccatttttgatttgacagataatcttatcataatacttttgatatattaccatttgcattttgaggttggtcttttgtggccttttcaattaagttcacacttaattgaaaaatgtttcttactcttgcatcaaactcttttaggcttgctgctagtggtttgttttgttttgtttctggtctgatttagtagtcatttatttatttttgcttgcacatacaaggagaagttaatatgaggcataaagaaatgatgtgatttttgttgttgttttgttttgttttcttcttgacaataatttttaaccaaaaacatgacagggctctttatttacctggaatgattcttgctcactacagataaactcttcagacctccagctggctatgtgatgaattcaagagtcacgcccagtggtacaacggccattggagagctgtgttttgagcacgttcactccatacctggaaaaatggtgtcccagtccataggctggggagactctcctgtggacctctgtgaagggagcaaccgtgccttccaggacactgaccaacctgcttgccaattggatgtgaggctcctaagacacaaagcttcctggatcaacccgctgtgtgtgcagcagccacttcaagaattatgcccccaaagaccaaccgtgcagagcagtgagaaccacgtggtgctggacactccctctcccttgcgcctttcgatattgtcctacagggactccctggctgagatgccactgtctgagaatactgctgatgtcatctgcagcaactctgctcattgctccgggggaaaggagggtgacttcttcctggctacagaagagcaagaggttcatcttcagcaggaatctctgctcaaaaaccccaagactgtggccacttccccctcccctaaggagggcagtgcccgttctgagtctcctcatttgacagcttctacagatgatggtaaccctaatgacttcctctattctccatctctgtgtttgtctgggccggcttgaaaatttgcctattgtctttgccatgagaaacaaagttcatggccttctaccttgaccagaaagcaatgcgtgagctcatttaatattagcactatcccacactctgtgagagtcacaataggaggttcagctgtcatcttcttacactgagaagaagaaggtcatcattttagcttagcatggttaataatcagttccaggagccatctttgggatcattattagtttgtctgcaggtagaaccattaggagcatccaacctactgtggatgggaatgctattacagattccaaaggaacttgctgtatagtagtgctcaggcgggaggacatgcctcatctcttctaattctagcacagacagctgaggaaatagcaaatttgaaagcagtcaccacaatactccccaaaggccaaaacctcttggtgtgaaaacaagggcgcctgctgtgaggtcatgcatatattcttaaaactgaaaaacttctgaatggcttagtccactcggagtaagagtcaggtagctggctttattttattttaaaggattcttatgttatattcatgctgtgagtttcgagccctgcttcaagtagtttggaaaatattttgtagttttcaggataaagaggagctttcagatacagaggttgctgatggaaaggtgaggttgctgctagattggcctttctccacataaacaaaccatcatgataacaagttattacaagccactgattgataatgactctgagcccaaacccacttgtcatagccttgtgcaacaagaagttctttaacttagtgttattttgcctctttgtctttctcctagaaaagcaatggtacaaagtgagcccccaagccaagtcttgccttttgtctgaaggcagcgtttccccacaatccttatcggtacctttaaaagctgtccagtgtttttttgaggtgttcttctgtttgcttttaagccagactctcactctgtgtagcagactggtcttagactgccagaaagactggtctttcttagacggaaggaagttctcacttcacgtcctgagtgacaagatcataggagtgagccatcatacctgacaagactctcgagagtcattctatggaattaagaaacaaaagtccagagttacaggttttctcttcctttatgtagagcagcataagggggggggagcaaatattggtcactaaggcacgggatttcctatgacacccacatctctaatggcagctgtgggaccttcttgtgtggatggaagcatttcctgaggctgtaggaacaatatcctgggttctactgcttgaacagaatctacatgtttacaaaataccctctctctctctctctctctctctctctctctctctctctctctctctctctctctctctctctctctctgtctccttatggaataacaggtaataatcccaactcaaggcaggagagatttcgtgaccaaggcctaacaggtctgggcaccctctcttgctttttcctctgcactcaggtctttacgtgtagcttaggggtcaaaattctgccagcttcatgtttttgttgaaaaagacaaaccagcaatttagtttcatcaccccttctagttacagtggcaggatgcttggcagagatggtgaacgattcccacatccaagcctctgaaatatttacctcagtgaagaggtctctctagtcttccatttctgactgactttgttcaacaggaagtattggggtgacacttcctgcatttgtctggcatctgagaacccacagttccccaaacattggcagcatctcttaatttatcaggtcaggacagcatagctcttttgactgtccggaaatctcacttccgtcccaggctgcagttagcagttatgtgataggaacaacttgcattggtgttgcctgttgccagtaaggagtgggtgagggtgtaagattggatgacacagcacagtggtccgagcttgactgaagccctgtttgctgtcagatgacattgtgtgtgcaacaggaagtttggggcaggttgccaccagctaaggaagtgctggggaagtgatcctgtagtcatttttgtaaagaattgtttgtttatttatttcatgtatatgagtacactgtagctgtcttcagacataccagaagagggcatcatatcccattacagatggttgtnnnnnnnnnnnnnnnnnnnnnnnnnnnnnnnnnnnnnnnnnnnnnnnnnnnnnnnnnnnnnnnnnnnnnnnnnnnnnnnnnnnnnnnnnnnnnnnnnnnnnnnnnnnnnnnnnnnnnnnnnnnnnnnnnnnnnnnnnnnnnnnnnnnnnnnnnnnnnnnnnnnnnnnnnnnnnnnnnnnnnnnnnnnnnnnnnnnnnnnnnnnnnnnnnnnnnnnnnnnnnnnnnnnnnnnnnnnnnnnnnnnnnnnnnnnnnnnnnnnnnnngaggaggaggaggcaagccaccctttttatagtgagttaggtagcctggctattgccaggtaactgtggggcagggcctacaaggaaaccccacaattttccccatatttgttctttgtgtgtgtttttcttttgtattgtgggagttcacctgtgcgcatgtatatgtggaggccagaagtcaaagtcacgtgtcttcctctgcgcttctctcagttctccccccccccacccccccccaacacacacacttttggagacagagcctctcactgaatctgcagctcactaattttctaacccagcaggctacgaagccccagggttcctcctgtctccaccgctacactactgggttaaccagtgcctgatgcaataggagcttgaactcaggtcctcagtgttgcctagcaagcactttattgacggagccatctcatttctccatgtttaatggctcgctgtgttggcaggtgatgctcggagcagcagcagaagccatgcttggaatttcttcccactagagacgttcatgctgcccgctgatgtagaaaaggtgagcgcctctcagccacagagggcctgagtctgtcagtagtggtgcgcgatgtgatcatggaaaccaccctgacgcagtacagcctaagaggttcttttcaatatttgatggaggccgccaggggcgctaaactgaagtcttcaggcacggtgtgctcagttgtgcatgactaaggagctaagtcaggttctgggctctatccaccgagggtgttctatcataagacatgcaacttggtggttgggatggggctcagtagtagagcgcttactttgcatatatgatgttgtgttttaatctccagtcctgagaaataaatcaatttagtttggtatatctgtgtctctggatgtatttttcatcatctagttagatcaagttatttttatccttatttgtagtcacttaagttaagtggcgtttcttcaattttgaaatcttatccatactccaaagaaaagttgattatgttcctatttgaattgacttttttgcccccctgcaggaaaatctccacttttatgctgcagacatcattatctcagtaatagagaatatgaagtgcaacctcccgaatcaacagcagccagagagatgggacacagaagacgccagcaggttacgtgggactggagcggaaatgaccttttatacccatataaagcaggagccaggctcctcggcttcttcacacactggctgtgaaggtaagttgggcagatgcttgaatgctgagtgctgtgatctcagctcaagctgtgtcctctgtccgttcccgaaagagggacattttccccatcctttgaagatgtgctcaacccacggtccactggccacatgcatcctaggatcgccatgaatgtgactcagttcagaatgagaaactaacttagaacattatgaggtgtgtgtgtgtgtgtgtgtgtgtgtgtgttattttcagtgactcaattttgagggtctttggtatgtactagtgataactaacgtcactttgcaggtgaaaagttgagcacatgggagcgatctcccgcaaggctgccattttgccttgtgatgtctgcgcatgctccgtcctgggccagtgctccagttctggctttgctcttccttggattttattcttcctttttgaggttgctgctgtcttccatcttgcttcatttcccatcacagagcgttttcccccgtctccttccacattgctttccttgtccacggagtccaccttcattcctttagtaaatagtggacctacctgctcttggtgatggctgggtcttggtgatggtaagatactcactttccccagagcagaagccctggagctggggccaaggaagtgagagggaaaacgccatgcagaggtgtgggtccagcccagtcactaagcaagggcagctgggagcccagggagttccttctggaggaaaggccaccaaagcaggcaagaaatgttagctttcttaaagcaagtcctgtattcagccccaacacccaggttcactttctggcggattttatctccatcagttgcttcctctaggctgatacttaccctcctcctctgagaaacctgggttttctagccctgagcctctcctccaagtgtctttctatgtggctggcacccttcaaacttgcccacctgctgggttcccagatcctctggcttaacactcactattcccatatggcttaaagacactctatttctacattgctggtaaactcatgtctccagcttctgggtgggcggggctagcctctatcttcactcttcatctaatagttcttcacaaccccatggggtgtgtgtgtgtgtgtgtgtgtgtgtgtgtgtgtgtgtgtgcagcttgactttctttcccttttgtctgtagagattctatcgacaaataaggctgcattcacgttctaggtggacatgaactttggagggatatgacttaaccccatagaaccatgtgctctgtactatgtgtctgggaaggttggctttttcttttttcttttctcttcttagccttctttaattttattttaaactttgtattataatgggaaaatatcaaacaaatcgcattagcctatttgactaaattatagtgaatgagagaccctaaactagcttccttcagttgttagtccttgaagctgcacctttagccccctccccaataactgtcagttgggagctatgccattcccttcccttgctcctattttttctctttcttctctctaccttcctcttcttcattgtcttcctcctcctcctcttctgcagaccggtctgaacataccgttttgcttattgtgggattcatgcatatgtgtttaaacaggtgtgtgcttgttcatgtatgaacgagggtacaaatgtgtgggcatgtgtgcatgtgtgtgttcctgtgtgcatccatgtgttcctatgtgcatgtgtgtgtgagggggggagagggaggggaaggaggannnnnnnnnnnnnnnnnnnnagggagagagagggagagagagagggagagggaagaggaagagggagagagagagagaattttggttgtcaagaactgccccgtttttaattttgttttttggaataaattctcccacatggcttggaactctggctagaataggctgactccagtgagttcccagagctcttcctgtgttgggattattacaagcacaaactaccaggagtagctgtttctgtcggatctgggaattgaactcaggtcctcacgcttgcacagcagatgctctactgcctgacccatttctccagccccagtcttgcttctcgatcatgaaatctgtctcccttctctcttcaggttgtgctgcactccaggtcagcccagtggctgagaccctttcttactgccctgtggcaggagaggcctgcaaacatgacttgaacaagttggtcatgttaggtgagactccgaacctcctcatacccacctcctcaccacaccacacacacaccagcagataccacagccaaggctatgtcagggacttttgaggaaacctcttccaggaagaggttttccctgctactcacaggaaaagctgttttccttgtctctgatgtctgctaattgttcatctcacctgtgaagctgaacaaaaacgcagacatacattagttctgctgtgtggtttcgatgtgctattttgatgaggtctatataaactcccatctccggtggttacatggagtctcatactgttgtttgtaggtatccagccattgctggttccctgaatgctgcagggacttcgtatatctttgtattcttataaaattaactgggtgaggcgtgctaaaacaccctaccaccctttctttccttttccacagaacttgggaaatataatgacatcacgaaaggctgcagatgctcctataactcttcaaagaggtatgtgtcttcttgtgtttagacccctggactcctgggctttctatgaagccactgtgccattgacagcacgtattgtgccatgtagccgcagatggggatccttgatggccagtgttcacagtcagcttgatagaatcctgcctgcctgtattatcttgactatgttaactgatgtggaaagatccatctttattgtggatgagaccatcctctgggtggggaaacctggaccagatgagtggagaaagagctgagcaccagcatgttgtatccattgctcttctgactgctgtgtaatgcaaccagctactgcaaattcctggtgcctcagcgtctccaccatgatgggcaatcccttgcacagtgagctgaagcaaatcctttctggtgttactagaagacaccatctcacagaaaacctcctgaccctctggttctaacaatctttcagccccatcttctgcaatgatccccaagtctaacacataggagtgtgttgtagatggatctatccattgagtctggcctccacaactctgcattctgtttggttgtggttttctgtggtggtctctgtctgctgcaaagagaaatgtctttgaggggtgaaaatgtttatagattgtttctaggaagtgtgctggtttaataactataatatcaaaaaatgtaaaagttagtaaaaagtaaaataaatcctttctcccttaggttttttttttgaggtttatttatttttattttttgtgtgcatgggtattttgcctcctaaactacttttatgacagacagcatcaggagaagaaactaagactcaccaggaagtcagccagtcacctctataatagcacttttctttactatgataaagtacccgagacaactaacttactgagagaaaaggtttatttgtctctctgtttcagaggttcaaagacatgatatatggtcattggtggtggaggcagcgtgccttggaatgcatggcaggatggaggataagaggggatgttttcactaccctttggagttactgtctccagtgacctacagacctcctgctaagctctacctcccaagtttccatcgtctctctgggagccaatcccttaaaccctgggtctttggaggacactgcctatattcaagacagagcacccccataatcagtgtgtgttacagtgcatgaaaggctagtgtatgaaggttaggcaagttttacaaatgtatttatgcatttatttaaaatttagatttattttgagtgttttacctgtgtatgtatatgtaccatatgcacaccaggtgcccatgggggtcagaagaagagctctgatcccccagaactggaatcatggatgattgtaacctaccatgtagatgttggaaccaaaccctggtcttctgcaagagcaatgagtgctcttaactgctgagccaactctccagcccctgtgcatttatttttgaaccctgttttatatacaagggaactaaggcttataaaatgatgtcacaatgcgttcccccaactccttttgacagtcttgctatgcagctatagctctcttggaacttgctagagagactaggctggtcttgaactcacagagatcccctgcctctgccatcccagtgctcagattaaaggatgagccatccttgaaatttgactaagcttcagaagaaggatttgaactctgcttttctgactttaaatgcagtactgtttacaccttaccccaggtctcagtactcttgataaatgagaaactctgtttgctgatcacgggtcgactctatcacatcagatgctcagctttgcaacgtgtgcatagttctccagcttctgtttctcatgtttcagtgcgacctgcgagtcaaacctcagtcctgctgggtgcttagccagagagttgttccgagggttctgtaagtgctggatgctgtcagaagttaattgccagctgccaggctcaccgaccacagctagctcaggagtaagtacggaagtcacttgagatggaatgaaatgttcttgatttctcactggcctgctccattcaaatatttatcttcccctgtcgggcttataggtgtttaggaagtctcaaaatggatatgagcagtcattcagcatcaggggatgtcctgaacaattcacaccatattactgttttgaggaaaggtctcgctgtggtgtgcaggctggtctctaacttacagagtcctcttgctctggcctgcctagtgttgggattgcaggcttcttaaaagtgccgtactctcaagtatcctgaggtgacatctcatttttccctcttattactacttactatgttaatgtactgggcccagatcttatcagggcaagtcaatggtaaagcagatatcatacctagctgacagctatgaaaacatacaagactttgcttgcaggaaatgctgttctccaagaaaactaaaccctggtggtagcaaatgctaagagttgaaaaagtaaatcactacggaagggccagggtgggcaggcatctaattctatcagaggaaagctaactctccagcttagcccccgagccaggtgttagttagccaggcagttctggggcagatacagtctgtggggaactgttcttagcaagagctattggaacacagatggtggaggtctggaacccagatgagcagggaaataaatttagctgtggttggataaagggagtgtgtgtgtgtgtttgggggggggtcagaattcatgggaacaggcttgaatgatagtagtcaaactgtggaggttttcaggatgctgattggaagagtttggatgttcaatgacaataggaaaatgtaagatttcactgtaagttgttgagttttgtaagccggggttctacagcaagaccaagcaaagctctggtaggctgccgctttaggcagcggatgctgcctgtttcatagagtgtctctggtcaaagagcccttcccattacatgggaagtctagaaagaaatgagctaaaactattaaaaaaaaaaaaaaaggcaggctcaggcatagtagttaaagggtgctactgttctttcagagtgtagagttctcactacatcagacagttcacaactgcatgtaactccagctctaggggatctgacaccctcttctcagacacctcttcatgtacacggtcattcaaaaataaaaataaaaataaaaataaaaataaggagtaggctcagtgggaagtagggcacctgtgccaagaccgttagttcagctgaaaacagtttcagtttctggtggtaaatttgaatgggaagcacacttaggagtccttcttaattcaacctctagattgtgccttctgaggttagccctgaatcctctcatgtgtcctgcaggtcggggatgaagaatatgctgaggaagactttgactccagtgtggatgctgctcgggaagtcatgcttaagtctagggtcccaggaactgaagactgggtgctccctcgatgccaaatcatacttactgttcacccaccaatcaagtaagtaaggggtactgcctggaaacccaggttccacttgggatatgctgtgatgggtcccacctggttcctatggaaacagatgaggagaaaacaatgtgcggagggaccaaggcaaatgtatttctggcttagttttctttgcactctgttgtgggctttggtggggggggggggcggggcagcaaagtactcaagttaaaaatgtaactctgtgtcttagggtttgtattcctgcacaaacatcatgaccaagaagcaagttggggaggaaagggtttattcagcttacacttccacattgctcttcatcacgaaaggaagtcaggacagaaacttacacagggcaggaacttggaagcaggagctggtgcagaagccatggaggggtggtgcttactggcttgcttcccctgccttgctcagcttactttcttctagaacccaggactaccagcccagagatggcaccacccaccatgggttgggccctctccgcttgatcagtaattgagaaaatgccttacagctggatctcatggaggcagttcctcaaggaaggttcctttctctgggatagctccaacttgtgtcaagttgacacacaaaaccagccagtacactctgcctcctcagttatgagcattacatagcactggtagattaaaaaggcctaagaggatttttaagtggctaatactgaaacagaaatcaaatgcaacaatttaaaaacgatgagaccactctaattctattttccaaaccagttagtgtgcaataaaaataagtgcgatgcataaaagttttaaaagaagaatttactttcaaggagattaactgtcattgagaaatgttaacaggatgcaaatataatctttattctatgaagccatagaagctgggagacagctaaaattccgtaagagagaactaaacttctacagtgtgtgtgtatggggccacacttatcgcatgtgcataatagtttgttggcaatttgttctgaggatgtgtaatggattacaagtagagattataggcaacatagtttaactatctgcagtctttctattctcttggtctctcatgcaaacttgagggttatgaagccatgctccccatgctccccgtgctcccgtgctccccgtgctccccgtgctccctgtgctccacggaggtctcttacttatctttatctggtgtctttgctctctggcttagctgatgccaggaaggatgttgtgactgcttgggcagaatttgtcctctatagacactgagccatgctagtctcgttgtataggatatcttttccctcctttcccagaatcctctgtaagacatgggcagagatctcacatgttttttttgtttgtttgtttttttttttttttaaaccttggcaatttttgttgaccttgagataaaaatgcaaatttaccactttacccataactctaggtccccgttgaaatcaggacacagctgtttccagagcactcctcttcaagaggactttataactttgtcacatcgccttattctaatgtttttattacatctattcacgtgtgtcctttccaagcatgttagactgttgtctcctcggctgtcttgtgtaccctggtttctgtgccaggtagtgggaagccccaaggattctataatagaagagttatatgtgatactgacttctaatttgggcacaattgagatgtttaaagaatcctagctttagaaggccaacagattccaaccagaaaaacatattggataagtataaacttttcttaaaatgaaaagatgacaaaattaaagcccctaaactgagaaacggaccacgatgtccactgcttttccatcagtgaaaaacgctgtactgaccagctctgaaaacgtgtaacagttgccattttctgtcctcaggagggacatagcagtggtggcccagaacttcttctgtgctggatgtgggactccaatacagcccagtaagtacaggtcctgcgctgtttgcttgttccatgataacagtgaggatctgcagggctggactatgtgttgctttagagtgagactgacttcttggtgtgagcgtgttgtgaaggagtcgtggaggtggccctgtcttttgctaggaggagactgtgacctacaaagctgcatgactagccaggtacaaggagggccagcatcctggctgctcctcaattgggcactcagacaacccagccgtacctgtcttagggggttgaaactattgtttcctcttcccagaatgaacccctcacccccatagacttccttccccatgactcttggttttcttcatatctttatgctctttttctacccactccactccccctctccttttcctgggatcttccatggttgccttgtggatcgtgtggtcgcagacagtcgcgtgtgtgcttcataggatcttcctctgcaatgcttattcagcatttatctgtctccatcaccaaaccataaattccaggaaggcagaagccttgttgcttttgctcattgttcatctccagcctctatagctatgcttgcttataagacggtcctctaggcatacctgcagagtaatcaaatggctcctggcaagacttctctgagagctgaggatatggtaactcatttatgggatggccaaggtcctgcaaactagtcttccccaagtgacaccatgcaagactttcagcacaacctggggattgcttgttctccagagaagatgtctgtttcaagacattaaaattgaaagcagaaccagccagggcttcctctatctcactacacgttaatgacaatcacagtgtgtcctctttaaatgactcattttcccagctagcctagcaagaggcgggtctgtgagttgatctgtacaccctaatgccacaccaaatgccaaatgcatgagtcagaaaccacatagacgcgagactccatcaatccgtttaagtaccttcctgagtccattctttcctgccagaacggcaggggatcttgcaggtcctgcccccatgggatctgcttccatttttgtctgtcctcgtggtctaaggaagaaggatgggcatgatttattctgtactgatgatagcacagtgggcatttgatgaagtttggtgaatgagtgagtggatcctgagatggtagagactttgaggctgggaaaggtgagttatatcagtgtcttagttaaggttttactgctatgaacagacaccatgactaaggcaactcctataggcacaacatttaattggatctggcttacagattcagaggttcagtccattatcatcaaggcaggaagcatggcagcttccaggcagtcatagtgcaggagaagctgatatagttctacatcttcatctgaaggctgctagtggaagactcgcttccaggcagctaggatgggggtcttaaagcccacgcccacagtgacacacctactccaacagggctatatcttctaataatgctgctccctggccgagcatatacaaaccatcacaaatggcatgctcagtattatactttttgatcctttagtctgttggtgatttgactgtacacgcagattatacctctacacgcaggataatccattaggcagagacaccttctccttcatcacccgaaggagtgggatatgctggctacactagattcaaactgagctcgcctgctctctgcctgtgtgtccagctctctgcctgtgtgtccagctctctgcctgtgtgtccccactatgatgcttcacctcgctgacctgttttcctcaatgaaagagggaaatataagttcctaagtcatggaattagaagcttagaataacatacattaaccattcaccagattgggaaacagactaagtgcccagtgaagacttagtcctgtctactcttcaaggcattagttggaaaaatgttatctgtatctacagtgtgccagggaatggagttgccgccttcccacacaggtccttcaggtcctgccaggcactaatgctgagggatggttgcacaggagattttagctgggttgtttttcttcgtagaccagataatacacagtattaccaccttcatccctacatcttttgtccatcagaatattttattagagaaacctcagaagcaccatgtgttaatttccccatgctacagagatgtgtatcattagctctttgggggtctagggtctaggtttctctctctctctctctctcattctctctctctctctctctctcccaggtattgtttcctttctctctttggtgtatatgtgtatgtatacacacatatacatacatatatagtatgtacatatacacacatgtatgtgtgtatgtgtgtatgcatgtatgtgtgtgtgtgtatgtatgtatgtatgtatgtatgtatgcatgtgtgtgtgtatgtatgtataacctcttttgtaagctacatcctgacactgtgcatgcactgctttagaatatgctcttcctatgtgggccatttcctgcacccagttgtgtgctgcattttattagcctgagattctgagttgttgctggagttcctgtgagtagcaggtagcatcttcaaagccaactagattcccaggccctacatggaatggtcttagaggctgcactgaagtttgtggtgcccgtctttgacgtccaagagcattagggaggattctgtttctctgggatctggcttactgtggcgaaccacaaatggccacaggtgacatcctcaagtcaatgccagagctgcgctgcctggcagttgaatctggcttgagcacggtggacattcatcagactctgaaccttgcataggaatggggaggtggcctagggcagatcttagcatcatgaatatggtgttaccctcctgccctctgcagagtttgtgaagaggctccggtactgtgagtatctcgggaagtacttctgtgccagctgccactcatctgcagagtcttgtatccctgcgcggatcctgacgatgtgggacttcaggaagtaccaagtcagcgatttctctaaatggctcttggacagcgtatggcatcaacctgtcttcaaactgttaggtggccatcacagcctctatgcaaaagctaaggaactggatagggtgaaggtgagctgaggcctccatggaggaagtaggtccaggaggttagatgtcccatggtaggaaatgcatgccactctggcttcaggctgtccccagacccttcacaaggcagatagactgaggggtgaatgatcccagggcctctcgcctgtggagcccaaggcccaactaaactgtgcctgttcaggactcaagtatcaaataattcagctatgagtccttgctgaaggggctgttttcttggaagttgggttgcttgccaacacagtatttcaaatatcatttaaaaaaagatttgtttatttaatgtatatgagtgctctatcttcatgtacacctgcataccagaagagggcgtcggattacatttatggtagtgagccaccctgtggttgctgggaattgatctcaggtcctctggaagagcagccactgctcttaacctctgagcaatctctctctagcccctgtttcgaataactttaaggtttgttgtacacactgtcagtggccaggcatctcattcccaatggttggcttcttgctttaggaccttcaggagcaactttttcatatcaagaagctattgaagacttgcaggtttgctgacaggtatgatttccagggggaatgctctgtgctcctgcctggcatattcttcctgatcttggttcctccagtatctctggcttcttagaaccttttattcttgacccccaacactgaaaggaacaaaggtgagctaataagagggattggacaagataaaagtctacctctgccagtggctacagtatagatacaatgtaaatatagtaaatatgatacctctgccagtggctacagtatggatacaatgcaaatgtagtaaatacaatagattgtgatgaacacgcacaacaaggttgtcttctcccacccactacaagctcatggacatagaaagtggttttctgctaccactattcatctgcagaacctccatctcttgcaggatgcaatctctggctatcctcctttcccttttcttcctgtatcctggcccctgacaacctgctttctctctccatggatttgaccactctaagtacctcatggatgtaaatcatagactatgtgtcttttatcactgaattgttttacttaatttcctaaggtctatccacattgcagcatgtgtcagggtccccttccttctggcggctgaatagtatttgctgtgtgtgcatattgatttttttatctgcccattgagggaaggggctgcctctgtcacttgtgagtggtgctgctgtgaggattcccatggcctcacagagacaggatgagggtcacactaagtgagaggatggcttccagaaatgacgtctcaaagcttaccctagggatgttcttatgggaagacatttacttaagatataagtttaggaattaacagagaaatctaccaggtgttcagtaatgggacaatagccaaatttacatcatatctacattatcaaatgcaagtttatagatagttttatatgtgtatttgtgtgcatgtgtgtgcactttgtttctgtgcatgtggaggccagaggttgatgttgatgtctcttaaccactctcctccttatttttttttcttgagacacagtctctcacttggcctagagttcactcaccaactggctagctccagtgagccctggggaccctcctgtctctccccagtgctggaactacaggcatgcactccaatgcccaactttttgtggggatgctgcagatctggacttgcatcctcttgcaccacaagcactttactaaccgaaccatcgccccatccccaagagagctttttaacccaggggtgggaggtgggggaccgggggaagcatatatgacctcaggaactgtctcctctctggcagtgtgctgaaggagtttgagcaagttcccagccacttgactgatgaatgccacatattctccatggacgacttcctcaggaccaagaaaggactgttggcacctttgcttaaagacatcctgagagcttctcttgcccacgtggacagctgtgaggtaagggttcacctgggagaggttcccttcctagtgccaggatccagggagggaggcgtttcttctccttgactcttgatcacatttaactttctcagccccaagcatggagagcattgacccacagccccgagttagctagccagagatatcccattgggactcaagtggaaccctgtagctgcttggtttgaaagcccataccctgtaaagcccattctgtcctgaagcagacattttgaagtgtggtttctgttattgttctgattcattcttctgaaggctaaaatcatagacatcgataagtagatgcttctacagttcccagtttccccaacacaagaagcagtgccaccttgtgaccatagatgccttcttttgcagctgtgccaggggaagggcttcatttgtgagttttgtcagagcacgacggtcatcttcccatttcagaccacgacttgtagaagatgtgcaggtactgaaattactttaataacatcagcttcattataatcacttcacttaattgcaaagttcacttaagtttaatagcttcatcataatgctagcttaaactgaagaatacctcagtgtctcagttagggttttgttgctgtacatagacactgtgaccactgcaactcttataaaggacagcatttaattgtgggtagcttacaggctagaggttgagtccattgtcattacgacttggtggtgtgcaggcggacatggtgtgggagaggtagctaagagatctataaccagatctaaaggcaacgggaaaagggcgatcctgggcctggcttgagcatctgaaacctccaagcccaccccagtgataggcttcttccaacaagaccacacttcctaatagtgccactccctatggaggggccattttcattcaaagcagcacagtctgtcacttgagtacagttagggctttaaagggcagtgaagccgtgtgtacttgaaggtagatgggaggcagtgcagtgtgggacccacagtgaggaatattttgcaggatggggataaagaatgaaatctcttggggtttcgggtaaagtggatggacccagtatggcctgttgccaacactggttttcaactatgttataatcccatccaacattgaagggttgtttctatttttaaaccatagtggagagtggacttgctgttacagagaccatatgattaccaaagtccaaaacttgtgcaactggctcttgtgtgtgtgcgcacgcggtgcgtgcacgtatgccagcatgcatgtgtgtagaggccagaggtctaccttgggtgtcatttctcttgtcacagtccatgttgatatttgagacagaatctcccactggcctagaactcaccaattaggctagactggcccacagtcgttgtgatcccagtccctgtctcctaacactgagttacaaacacacaccatcatatgtgtatgtcttatatgggttctgggggaattgaactcaggcccttgtgttcatgtggcaaacactttaccaactgagctctcccctagggccaattatttgtctctttacagctggggctgcagaaggaatcctatgctcgttggttgtgttgcatgggaaggatgtgggtggggaccctgccctcaactcttctgtgcacatgattcttcttaggatactctagtcttgcaggacagggtctccagaattgaaccagggaattccaggccagaagtaactgaataccaggcaacagacctaagagggaaagattccatggtggtgtgtctataagaagccccgagctatctcactgagctctgggcagcagtgtaggtagcatctcagcactgttccaagtccacagcaccaacctctggatacaggctggtgtcaaggaaagagcatgaccctggatgaggcagctttgcccatttagacccatttccagagaagcaatgccaccttgcaagagccatcagccaccaagttaagattaggtggactgccccccagtacttgggctgatctggaaggatgcagtattgaccacctccattgggctcctgagctcatagccaagagctgctgactaactgatagtcctgagagttttggcatggttggtttctttctgtaagattccgggttctgggtcaggtttcctctctccccgggatgggagtgagtatctatatgtatgtgagaaattaaggagtgcatttgctgacaaccaatctcctcacttgcagcgtgcagggcctgctttcacaaacagtgtttccagtcttcgagatgcccgcgctgtgccaggatcatagcccggagacaacatttggagagcttgcccactgcagcaacatgatggcccaaagttgttccaaacctctcatgatgttaccacattgtgtctgctcctggtaacattcattgtttcagatactaagtatttttgtagtaagaaaaagaggaccaaaattgccctcttgtacgcatttaatgctttcaaggagtatggaagttttgttattaggtatagggttgttgataagggtttgtttacaatgtttgacattgttttgctgctactggctgtttttttttttttttaaagaagtcttttttcatttaagttgcactgggataggttttttttttttttttgaagctaaatacagaacctatttttttatgaacttaactgacaaggtgatgtgttgtttgtgaaatggattggcgccacaaaggagggaagtggcacaagaattctgtttggccaagcttttgttaaagacgactgttgaatgttgctttgtgactatgtcagtttcctgtcttattcattccatggtttggcgtagagtacgtacatgacaacgctgccccaacattcctttctagatgatggtttcagtcgcccaccaaggtcctggtgaactgtcatttagaccagttgcctctagatggcaatgtttggtgagtgcatgctcgacaggtttgccatcccccaccccccaggccctactattcctgttagtccctactaaaaccaagggagccagaggagacaactccattctattccttcatgatctagctttgtggatatatatccagaacatagagactcggaaagctgagcgtggtggtgtccacctgtagtccctgcatttaggaagcaggggcagagattaagactttctatatgaacatagaacgtcacatgcaacctgtactttttttccaaatcttaaaaagactggaattttaaaaaaagatttatttattactatatctaagtacactgtagctgtcttcagacacaccagaagagggtgtcagatctcattacagatggttgtgagccaccatgcagttgctgggaattgaactcaggaccttcagaagagcagtcagtgctcttaactgctgagccatctctccagccccaagaatggaatttttaaaacaagtaaatttggataaaatattttttcttttgtttggtttttgtcttgtgggacagggtcttcttttgaagccctgcctgactgtgaacttgtctcccgtctctatgtcctgagtgttaggactagaggtgtatgtcactattcctagcaagaaagtgctcttaatagtatgctctcagttaccactttaacattgaggcatcccttaagatgcataggggtgccttttctcacaacggtgataaaatgcccatcagagccgatgtgagggaggaaaacctgactggaatctaacggtttcagctctgctggaacatggaaggaatggcagagttcaaggaggagagcatggtgcagactcctgcatacaaaacaggtaggaagcagagagctagctgggagtgaaggctgggatagacccccagaggcctgccccaatggtaagctgaccccaggtagagagcaagtgttgaaacacacgaatctgggttaacatggcggcactctgcacataaaccaagttcagtggattataaaactggtgaaattttctttctaatgattcttatacatacatcttcctagaacatgggtaagcccgtgtttcccccttctctcctgcatagctgctcctacttgaggagaattagggtcaaatcccttcctggaatatcttcaggctgaccagttctcaataatacttgggtatcatgttgcctggcgctgatgcttagattgagcttctcaaacagcaaaggcagtcaacagtgtgctacagatatccccagccccacccgccagggtctcctactgtctgtgttggggcaggagaggaggaggaggaggaggaggaggaggaggaggaggaggaggaggaggttgactttcagtgagagaatactaagcagactgaaacatcagcgtctcctctgtctggatattctgtcaactatttctgttacacgcttccagggggagggtggcatgactgtcaagcctggtgtggcctgagtggggaccaagtgacatgaggaaatgtgcacacagcagacacacagagaaaaagactctgaaagcagaaaacctaatctcttctcaaagcctggggctttcctaaagcgtctcatgagttgttctcctgtccttagggttagtcagtttgaaaacagataggatgggtgatcaggccttgaacttgccaagacagtccatcagcagggagcctgctctgctagtgggagacagaagctcccaggcatttgtctcaagtcaagatggtaaggaagaagggggccatcttgggaattcgccagatttcttagctctatccgtgtcctctccctatcggtttacctaccagagagtctacctaacttcatccctctccgtagaataagtccctccctgaagcagagatcccatgacttaaatgcctctcagaggtcctcagagattcacttacgaaaaaccagttccacaattttgagccacatttgaaacaagctttagttaaatattagccaagaagatggactgaccacgtcccctgggtttccagggaatggtaatgagtcacattttgtagaagacgaaacccataattcactcgttttcaatcgggtccaatcgggggcaagcatatgtcctgacattcttcctgccctgcctacgtgtgatcaagcacatctggtgtagttagttcaaacaaaccatttagggagggaaaacatgtgacttatctcccaagaactgtcgctcccagcgttccaggaaattatcttgtccttgggcaagtgggcttacaggctaacactggctcttccagtccttcctcagcactgtccacaacagcagctaaacttccacagaagttctggagaaggcattaaaagccaagaaggttcctggactgcctcatagtgaactctggagggcagtctgtgagaccacacctcccttcctggcctcccatgggtgggggaggaggacagaccagaagtctgcagcagatcactgcccatcaacagtactgagcaggccactctatcaatgtgggatagggatagagccatgaggtttgttttgggtggccctgggaaataagtccgttgaaaagaaaactcttgttttccaatcaagtctgaggcatcactgggatatccaacaaatggaaggagaggcagaacacttccggtgaaggcagatctgaggcagaggctggggagtgaaccagatgtcagagagggacaggagaagggctgaaggctaggttggagctagcacaatgctgctgcccagtcctgggtgacagtaaagtacaggctctgctccagggcccttaggttttctagtgtattgatgggaggcaggtgaggggtctgcagattcactaacaccgaggtgctgtcaaaatacaaaatggcttcctcttgcagcaggagggagatccccaaaggctaatcagactccatattgaagaaaagggaagagggcagcttcttgagaggactgacagcccagatgcattgacgtgggaagccaggtggctttgacaaagggaaaggggagtgtgtgtgtgtgtggggggggggatagaaggatttagtggggaacggagctgcaaggtagagcccacagtgcccagcccagtgaccggaggatgtttgcagtcctcacagcgcaatgctaagcagggttccaggggacacagctgggcttctgtttcaggaagacagcagggattgggtgctgggtgcactgaggacaaaacagaggcttagtagttgacataggaagacctacatacactagggcagctacagagaaggggaggggaggggacctgggagaggcaggaagaaccaggtccagagagtgtaaaatagaagggacttcccaaggctcagccaaaaaggcaaagcaaagttcaatagtgtcttcaaatgtgatgttaggggcccgggagatagcccagtcactaaactcctcgtgtacgcgtacagtataatcactggggaggcaggagcaaactgccttgcttatatgaatgtaagagttccatgttcacatttggtgcatcgggtccctaggattgcagttaaaggatagttgtgagccacccaagtgggtgctgagaactaaacatgcaagaacagcaagtgttcttaagtgctgagccatctctccaagcccccataaatataaacctttttttaaaagcacaaacatcggctcgcaaactgtatgtctgagatggaatcgttcccctcctactttatgaagataccttcacgggctcctgagagagcggttctgcctcctgttcttctcaggagtgtgacttgtccctcccgatgacactttggctctctcacaatcccccttggtaccatattccagaaaattctaggttcccaggtatccacagcttcattctaaagaggagtggagttgtgggtaatcgtggcccccatagcctctgtctcccacctgtgtggagagagatagcagaagaaaggccatagcaaagagctcagcttcctggctctcaggaaaagcctggtcactacctaacatggacagatgtgcagacgttagcagcaggaaactagtgggctggggtaggatcacaagaccttggaatgagaggaggctagaggcaggcagagaggcctgagaaggagtcagtgctacctcacacacttcagttatgtgattgatccccgatggctaggattgcggctcacacactcaaggatgtgagaccattgtttcctccgcatgctgggagttccaatttctgtttgagtctgcttgtcagagcatcattcagaaaagaaccatgtggttctgttagaggcatgagaaaggggaaccaggatttcccctttcaaaccagttaagacattacttcttaagacaggtcctcaaatgttggttttaaggaagcagccttcacaagggatgttgccagtgagaaagggtttctctgccttgtccccctctggcagtgagctgaatagggcttgttcatcagcagcagtccctggacagtgtcggatcgattggtgtcaaacaggacaggtttagacctaagggcggggactaacatcctatatgcctgcagatgtgtctacaatgatctcctgagccggaacaggaagctggggcccagggcgaggctaaaagggatacattgaatcactaaccttacagataagtctttcaccatgtaacttccccgccgccacattcctggaccaaggcagagaaattttcagccgccacattgtttgcttgtttgtttgtttttgaaagagaaagtatcccttccgccattctgtctctattcattgtcatttattatcattttctggccccggccccattcacccgaagaacattttaacattaagaagaaactaatgggtggatatgggggacttttggtatagcattggaaatataaatgagctaaatacctaataaaaaatggaaaaaaaagagaagaaactaacaaagtttattgagcaagtactatttcctgggcacttaaagacccctttggggaagggcttgatagtagccaccagttaccagttctccttgctcattatggtccccagaacagtgacattagagcacacccccttacctctgaaggctctaaggaaatcacttctgttgtggtttgaaagtgaaatattcctgtaggcacagtgtttgaacacttagttggtggtgctgctatagatgtggataaggtgagatttagccagatgaattagggcaccgggggcgggtgcttagcactctgacatccctggcttcttctgtcctattccctgctccacacctctcacaccagtcacgctagaatctattgcacacacaatgggactatactctgacaccagtcatactaggatacattgtgcacacaatggggccacattctgacactggtcacactaggatacattgtgcacacaatggaactacactctttatggcacatctcctctcactgaacacaaattattttgtgtgtgtttgtgtgtgtagtttatgactgtgtgtaatatgttcatgtgatgcgtgcctctgtatgtagtagatgtgtatgtacacatatgtgtttgcatgtagaggaccgaggttgacatcaggtgtcttcccaaatgctttctatcttgctttgtaagagaggcactgccacagaacccggagcttatgaattaactagactggccggccagtcagaccaagcggttctcttctgtgtgggattacaggtgcacacctctgtgcactcctcatgtgtgtgccggggtctgaagttgagtcttcatgctagtgcagcaagcacttcaccaccatgtctaaattggtaactggttataccaaagaaaacaccatttcccacaagtgaagctggagtccctctaacagtagtattaatattttttagcacaatgctgagaagacaaatgaaacctgagttaagtcaattcagacctctagcccacatgctggaaggagagaacaggctcccacaggttgtcctctgaactccacgtgtgtgccagcgtctttcctttagagtggttctaagtgtgagggagacagacagaaatcaaagagtacagatgactcttcgtgaagaccatcattgactaaagcaaagctttgtggacctggttgtttctagatccattccagcctccagctacagtatggcaaaggaagctgaggcagggtcaaaggccaaaggccagagttgatttggaagcacggctcacatcactcaggatcgagtctttcacttcagtgggctgccatttcctgaggcacagtcggtctgtgaagatgtgagtcccctgtgactttcattggtcagttggctcaggaagagcagagctctatgatggaaatcaggggtttcaacaatggaggctgctgctggtgtctggtgagtggaggacagagatgctattaaatgctcccaggacaaataatctgactcaaaatattagcatgctaaccaatagggcctggagagatgctcacctctaataagtttcgggaatagagatctattaaaaattttaggaaaataagtatgttatttgattcagagtctgaagagcttcagtgcccactgggcagtgtgagcagccagctctaggctggccacagcctcaaaggaaagaaatgacctgactggttctagctctacacttgccttatttatcatggtctcatctatgggattcctgtgattggctgtagcttacagcttatgactggctgacctactaatatatgtactatatatgtgtgttataataaatatatatatatatatattataacgtataacatatactatatataacatacgtacataacatattacatatacatttaatatacagcatactattatatattagtaaatacatttaggatgtttatatattgaggttgaggagtctcagccttagaccaatggcctcctgcttctttgaatactctttcttagttcacagtagcatagtgaatagcaatcataagtaaatttttgtttactcaagcatctctccaacttcttgcatcacagaacccctccctggtacataatcttgacatcatgtgtgtatgtgcatgtgtgtacatgtgtatgtgtgtgtgtggcatgtgtatgtgtggactagtgtgtgtatgcgtgcatatgcttgtgtgtgtacatgtgtatacctgcgtgtgcttacacatgtatgggtatttctgtgtgtgcatatatgtatatttatatatttgcacatgtgtgcatgtctgtgtgtgtgtgcatgtgtatatgtttgcacatatgtgtgcatgtctgtgtgtgtgcatgtgtatgtgtttgcacatatgtgtgcatgtctgtgtgtgtgtgtacatgtgtatgtgtttgcacatgtgcacatagaagccagaggatgacacagtgtcaggagtcacgcagtcacaatcacttttcactttccattttgcgatagggtctatcactgattccacagctcatgggtttgcttaggctgactggccagcaggcttctggaatccttcactttctgcctccccagggctaggattacagaccacagtggctttcatgtggctgaactcaggtccttttatcaagtgagtcagctccccagcctcttgatagtgagctgtagttggaaaacactggccggataatctgtgtttcacctttggaaagtatgctttctccatggccgacttcaggctcactcagtgacctcagacctgtgactgtggacgtgtcattggtctctggtccctcagcagcctcagttttgctggtgagagtaacaccatctacacacgggggtcttctgagggtcaaatattcaatgtcggcatgtcagcagccacccctagcaatcctcaatccaaatttagcctccaagtgtggttttgtctctgtaatttccctttgggtttaccgtaatactagatatgaccagcagagggaactggtgacacggccttgccctgaatgttatttaatgtcctttgcaaggcttagcgagtgaccttttgctgatttcctgtaaactggagttttagagctgaggaagactctggcaatgacaacatagattctgagtggtccatgcacaaggtcagatgcggacttgaccttcatggctctcaacccagctccaggaatggccgcacgatctttctgagggaaaagccaccaaatgtattagtattagcaagcagctgaaatgaaggggtggtggctggtgacacttgttgccacagaaaaatgggctcagcaggccacagaggaacaagcctgatcacagagagctacctgcttttgcctttcaagagctgggattaaaagtttgtgtcacactatcctggttgagcatggttttgttttgcattttgcaacaacgtctcactttgaatttgcaacccacctgactcaggctccaaatcttgggattgcaggcctgtgtctaccagtttatggtagttttttagaagctttctgtctgtagtttgtacaaacgggcatctgatttccagggcctacaactttcaagtggctctcatgaattctaggagtccctgggcttggctcccacctctatgtttccacacatgattcagccttataccaaattacaggcataaagttcaactctttcaacactgaaaacattcacaccaccgtgttgttgctgatggttggttagatttttgtttgcttttttgtgttggctgtgtttgaaacaaggtcttacctacttagcccaggctagccttaatttcatgattcttctgtttcggcttactgatgactggcattgtaggggtgagccaccgtttttgagtttaggaagtgcatttcccatttgagggcctctgggagataccatataaccccttacctaccatctaagctgctggccttgtgtttcctctcaaagctatgtatgctgccactcaggctgacagctccttgtaacctggacagtgggcatcagagctgcacctcagggacagaggtatagggagtgctgcggaagggagccctgtagttggccgacatggttgccgtgggagcagcttccctgtccagaccctgcatctgcagctctgcctcaccctcttcttactctaccctcttgcttctgctattttctttcctgatggtactccgtctccatgccactcccaaatcatccctgtgacgtcctcaccagtggccacatcttttctgaagctgtatctccatccctcctggccacttgctctgctctccttatccagtatcagccctagtcctagtttcttcctctgccccagctcgccatacttatttctctgcctgcctcnnnnnnnnnnnnnnnnnnnntccctcccttccttcccgagaagcatccagttgccttcagtttcacctctgcccttgaaatcttttctgcctggagtattctcctgtatttttgtttaaaaagactttaaaacaatgaatcaataactaattgacaaatcaattaatcactaatgattatggatggattgttgaacttttacttcaccaggttcgtacttacagagtctaggccatgtttagagaacaatgtatcttgtacttaaggagcaggtagctgtgcaagccactatgaaggaccttcagcgattcctaagttattttcattgctacttcataataattttgctactcttatgaattgcaatataaatattttgtatgtaggatatctgctatgtggcctctgtgaaa

SEQ ID NO: 518 - DNA, 2005 bp, Mus musculus
atggtgtcccagtccataggctggggagactctcctgtggacctctgtgaagggagcaaccgtgccttccaggacactgaccaacctgcttgccaattggatgtgaggctcctaagacacaaagcttcctggatcaacccgctgtgtgtgcagcagccacttcaagaattatgcccccaaagaccaaccgtgcagagcagtgagaaccacgtggtgctggacactccctctcccttgcgcctttcgatattgtcctacagggactccctggctgagatgccactgtctgagaatactgctgatgtcatctgcagcaactctgctcattgctccgggggaaaggagggtgacttcttcctggctacagaagagcaagaggttcatcttcagcaggaatctctgctcaaaaaccccaagactgtggccacttccccctcccctaaggagggcagtgcccgttctgagtctcctcatttgacagcttctacagatgatgacatcattatctcagtaatagagaatatgaagtgcaacctcccgaatcaacagcagccagagagatgggacacagaagacgccagcaggttacgtgggactggagcggaaatgaccttttatacccatataaagcaggagccaggctcctcggcttcttcacacactggctgtgaaggttgtgctgcactccaggtcggggatgaagaatatgctgaggaagactttgactccagtgtggatgctgctcgggaagtcatgcttaagtctagggtcccaggaactgaagactgggtgctccctcgatgccaaatcatacttactgttcacccaccaatcaagagggacatagcagtggtggcccagaacttcttctgtgctggatgtgggactccaatacagcccaagtttgtgaagaggctccggtactgtgagtatctcgggaagtacttctgtgccagctgccactcatctgcagagtcttgtatccctgcgcggatcctgacgatgtgggacttcaggaagtaccaagtcagcgatttctctaaatggctcttggacagcgtatggcatcaacctgtcttcaaactgttaggtggccatcacagcctctatgcaaaagctaaggaactggatagggtgaaggaccttcaggagcaactttttcatatcaagaagctattgaagacttgcaggtttgctgacagtgtgctgaaggagtttgagcaagttcccagccacttgactgatgaatgccacatattctccatggacgacttcctcaggaccaagaaaggactgttggcacctttgcttaaagacatcctgagagcttctcttgcccacgtggacagctgtgagctgtgccaggggaagggcttcatttgtgagttttgtcagagcacgacggtcatcttcccatttcagaccacgacttgtagaagatgtgcagcgtgcagggcctgctttcacaaacagtgtttccagtcttcgagatgcccgcgctgtgccaggatcatagcccggagacaacatttggagagcttgcccactgcagcaacatgatggcccaaagttgttccaaacctctcatgatgttaccacattgtgtctgctcctggtaacattcattgtttcagatactaagtatttttgtagtaagaaaaagaggaccaaaattgccctcttgtacgcatttaatgctttcaaggagtatggaagttttgttattaggtatagggttgttgataagggtttgtttacaatgtttgacattgttttgctgctactggctgtttttttttttttttaaagaagtcttttttcatttaagttgcactgggataggttttttttttttttttgaagctaaatacagaacctatttttttatgaacttaactgacaaggtgatgtgttgtttgtgaaatggattggcgccacaaaggagggaagtggcacaagaattctgtttggccaagcttttgttaaagacgactgttgaatgttg

SEQ ID NO: 519 - protein, 519 aa, Mus musculus
MVSQSIGWGDSPVDLCEGSNRAFQDTDQPACQLDVRLLRHKASWINPLCVQQPLQELCPQRPTVQSSENHVVLDTPSPLRLSILSYRDSLAEMPLSENTADVICSNSAHCSGGKEGDFFLATEEQEVHLQQESLLKNPKTVATSPSPKEGSARSESPHLTASTDDDIIISVIENMKCNLPNQQQPERWDTEDASRLRGTGAEMTFYTHIKQEPGSSASSHTGCEGCAALQVGDEEYAEEDFDSSVDAAREVMLKSRVPGTEDWVLPRCQIILTVHPPIKRDIAVVAQNFFCAGCGTPIQPKFVKRLRYCEYLGKYFCASCHSSAESCIPARILTMWDFRKYQVSDFSKWLLDSVWHQPVFKLLGGHHSLYAKAKELDRVKDLQEQLFHIKKLLKTCRFADSVLKEFEQVPSHLTDECHIFSMDDFLRTKKGLLAPLLKDILRASLAHVDSCELCQGKGFICEFCQSTTVIFPFQTTTCRRCAACRACFHKQCFQSSRCPRCARIIARRQHLESLPTAAT

SEQ ID NO: 520 - DNA, 65590 bp, Homo sapiens
  misc_feature (1)...(65590): n = A,T,C or G
ttatgttcaaagcatttggataattagggaaagaaaaaaactgagatatttccaggtgagtccaggaaaccacttggcaggtatacgaaatccagaaactgtatttcatcagtgcaaccaaaataattcaggctctcagggtcctattagtttcctcttgctgctgtaacaagtaactataaatttagtgcttaaaacaatagaaatggctggggacggtggctcacgcctgtaatcccagcactttgggaggccgaggcaggctgatcacttgaggtcaggagtttgaggctagcctggccaacatggtgaaaccctgtctgtactaaaaatacaaaaagtagccaggcatcatggcatgtgcctgtaatcccagctacttggaagctgaggcaggagaatcagttgaacccaggaggcggaggttgcagtgagctgagatcacaccactgcactccagcctgagtgacagagtgagactctgcctcaaaaaaatcaaacaaacaaaaccaatagaaatgtattatcatatagctctggaggccagaagtctgaaatgagcctagcagggctaaaatcaaggtgtcagtggggctctgttccttttggaaagctctgggaggatctgattcccagtctcttcctgtttatagaggctgcccatattctttgcctcatggatggcctccttccatttttttcaaaggcagcaatggctggtcaaaattttgtcacaatgaatcactctgactctgactctcctgtctccccctcttttactataaggatctttgtgatgacattgagctcatatggataacccaggataatctcttcattttaaagccagctgattaactagcaatcttaattctttttaaaatttttaaaaatattttattttaaatttttgtttatttatttttaagactgcattatgagactggccaatttttgtatttttggtagagacaaggtttcctcatattgcccaggctggtctcgaactcctggcctcaagtgattcacccaccttggcctcccaaagtgctgggattacaggcatgaaccactgtgcccagcctagcaatcttaattctatctgcggttttaattcccccttaccgtgtaacataatttcaggctcctggcattaaaatgtggacatctttgggggaccattattccacttattacagggtctgatgtaatcggaccaaactcactagagattaatatataagcaagaatgataatttattactatgtactataaaaatataacattaggggagtggagtaggtgggaatgtccatactggttggtaaatggcttctctctctcttttttttttttttcagtgtattttctcttttattccaacgctatatttactttttttttttttttttttttaagatggagtagcactcttgttgcccaggctggagcacaatggcacgatctcagctcactgcaacctccgcctcctgggttcaagcgatgctcctgcctcagcctcctgagtagctgagattatagatgcccaccaccacccccggctactttactaatattttatttagggtctttgcaaacatgtgaatgagttaaattgttttatttattaattatactgtaagttctgtgatacatatgcagaacatgcaggtttgttacattggtatacatgtaccatggtggtatgctgcagccatcaacccctcatctaggttttttttgtttggttttgttttgtttttttgagacggagtcttactctgtcacccaggctggagtgcagtggcgcagtctcgattcactgcaacctccaccccctgggttcaagcaattctctgcctcagcctcctgagtagctgggattacaggcacttgccaccatgcccaactaatttttgtatttttagtagagacagggtttcaccatcttggccaggctggtcctgaactcctgacctcgtgatccacccgccttggcctcccaaagtgctgggattaaaggcgtgagccaccgtgtctggcctgtcatctaggttttaagcccagcatgcattaggtatttgtcctagtgctctccctccccttgccccccaccccttgacaggccctggtgtgtgatattcccctccctgtgtccatgtgttctcattgttcagctcccactttgcacgcatgtttattgcagcactattcacaatagcaaagacttggaaccaacccaaatgcccatcaatgatagcctggataaagaaaatgtggcacatatacaccatggaatactatgcagccatacaaaagaatgagttaatgtcctttgcagggacatggatgaagctggaaaccatcattctctgcaaactaacacaagaacagaaaaccaaacaccacacatgttctcactcataaatgccttctctttctataagcaaatttacatagaaagtccacttttaagtagatggcttggtgagcataaaatcagagcatcacattaagctgaatgactttaatggctggtgaagttaattgatgcaagagaagctggatctataaactttatagagatgcaacctctgttcaggtcacagaccagtatccgttggtattcattgtaccagtgcattagaatttatgaaccactgtggcaggataatttattgaggaattcatttgtattttgcggctgctgataattaataaattgctttgttttgttcttactgctttgtggaaaaatctgaatcaatgagacctcttttctctcccctcctgaaagacggccagcagggctgggagtcccaaggggcagagttaaagatttttgtctttagtttttttgtctctaagatacggtatgcagagaggcaggagttgcctgactgggaggtagcttcttcaggtaggagataagggagagggattttttgtttgtttgttttgctgggaagtttgaagaaggtgtttgaatgaggaagagactctctgaaagggtagcatttggatgctgagccattaaacctctaggggcttggcaaaggatccctgtacctacactgggcatagagtgatagaacttcctaattaacacaggctttgaaaatgggaacttctgcagtgataatgatggaacaaaggccagaaatctttccccagatgttccataagtacctgagctctcaagaagctctaggggggtaagagtaaggctctccaacatgtggcagactccattgcttgtcatttactcaagtaggaaataccaggtcaatttcatttgagttagaagaaattttggaaaaataaggtaatgtcacttttttttgataccagagttatagaataaaattcatactagccacctaagattttatctaagtcttttagcctttccttatcaaacagtccatgtggaaatgacttggggattatctagactgggctacaaggctacccccaagacaaaggaaatgtcaggcacaaaacactgaagtatagggtcaacactaggaagtacatgtgaagaatataagatgtggtcaatgacttggggtacgagggtaggaaaatggagaatattcccagaacaattggtagctattgtggattttagggtatttgaggcaggcttgaaagaagagactgaaaattaggttgaaatttcagacaacactataaatgttagacgaagactttgaactttggacatattaactgtttccaagcatgggataatcttagtttaacgtctttctgttttgcaggatggcattcaaatcataccgcacaagccatgagagcagttaaaaacatttacaaaacacctaaaatatataaagtacatggctaggttctggatgggggatggggaagaaattcaagaatgagtaaggttttcctggctccacaacccagtgggcaagacagaatacaaacaacttaatgtttttagttctaacggtagattgccattgcactcatgtggaaccatggattttatctataccacattgttagtcataaaagtagaccacaagacaggtgcagcttctagttctactagtccagctaagagcatcttcaaagaggaaaagtggcaactgtgtactgaagacaccggaggaaggactaaaagtcaaaggttacttcttgttatctgtcagaccaagagcacatcccctcatacagtcattttcaggaacaggcttaccctggggataatggtcagcctgaagctatgggatggtcctaactggtcatcttggctgctggaagcaaatagtcagttgggtctataatccttttaatttcttcaatttctctctctctctctctctctctctctctctctctctctctctcattccctccctttccttctccctctctctttgtaaatagtgcatagatttaatatcaaaggtgtcgacgaaaagagtcaaactctataaaatatttgaagagatttattctgagccaaatatgagtgaccatgaccagtgacacagccctcaggaggtcctgagaacatgtgtccaaggtggtcagggcccagcttggttttatacattttagagaggcatgagacatccatcaaatacactgaagaaatagttggtttggtccggaaaggcgggacaattcaaagccggcggtggtggggcttccaggttataggggaatttaaacattttctggttgacaattgattgagtttgtctaaaaacctgggattcataagaagggaatgttcaggttaagataaaaattgtggtgaccaaagttgttttgaagtcttatagtgtctgcccttagagacaatagatgacaaatgtttcctattcagatcctagttaatctctttagattgggagggtctggaagaaaaagatctagctattttaatagagatcttttacagatgtaaattttcccccacaaagaacagctttgcagggtcatttcaaaatatggcaaagaaacacgttttggggtaaaatattttgattttcttccttgtctcgtgatgttatgccagagtcagattggaaagtaagtcacgacatacagggttaaataaaacccatctgatgagaatttatgatttgtagggcatgactccccagaccgcttagataggaatttaggcaagaaaaaaaaatgagtttagtcctcaaaggtaaagagtcccttttagggccacatctctgactatgccaccacaaacccccagctacttaacaccagctggatcagagagtaaaatggcagaactactcttccttctgaataaggagctgcaacaacccaaaagctgggccctgggcacccctaaatggaaagaaaaataaattaagatttatttatttatttgattattttgagacagagtcttgctctgttgctcaggctggagtgtagtggcactatcctggctcactgcaacctctgcctcccgggttcaagcgattctcctgcctcagcctaccaagtagctgggattacaggcatctgccaccatgcccagctaatttttgtattttagtagaggtggagtttcaccatgttggccaggctggtctggaactcctgacctcaagagatccacccacctccacctcccaaagtgcttggattacaggtgtgagccaccatgcctggcaaagatttattaacattcatagagccaggcgtagtggttcatgcctgtaatcccagcactctgggaggccaaggtgggaggattgtttgagcccaggagttcaagaccagcctgagaaacatagggaaaccctcatctctacaaataacttaaaaaatttagctgggtgtggtgctgtttgcctgtagtcccaattattagggaggctgaggtgggaggatcacctgagcctgggaggttgaggctgcagtgagtcatgatcatgccactgcactcaggctgggcaacagagcaagaacctgtctcaaaaaaaaaaaattaaaagcaaaaaggctgggtgtggtggctcacacctgtaatcccagcactttgggagaccaaggcaggcagatcacctgtggtcaggagttcgagaccagcctggccaacatggtgaaaccccatctctactacaaatacaaaaattagctgggtgtggtggtgcatgcctgtaatcctagctagttgggaggctgaggcacaggaattgcttgaacctgggaggtagaggttgcactgagccgagatcatgccactgcactccagcctgggtgacagagtgagactccatctcaaaaataaataaataaaaattaaaaagagaaatgaacaaaaattcaagtgaagaatttccagatgtaggggccctgtcagctgattgctttcacctgggcttttactccaaagaagtattacatcatgataatacatttatattttttacatatatatgtatatgtaaaatatataaataatatatacatatatacatacaccatacacataaatatttgtggtaaaatataacaaaatgtattatcataaccatttttcagtgtacaattcagtggcattaagtacatttacagcattgtgcaactatcactacaatctctctccagaactttttcatcaaccagacagaaaatctgtgtccatcaagcaataactctgtattccccatcctgccaggccctgccaacttctgttctactttctgtctctatgaatttgtctcttctaggctcctcatgcaagtgggttcacacagatgtgtccttttgcagacagtggctgttaagtcaggcaaggaggaagagaaacagccaagccaaatgcagctttcctcggttctttccttccctggtgcttgtctgggcttctctcccatgcaaaatcatcagtctttcttcctgggacttctatgtggtgaagatgccattaggcaccctctggtagcttataatgcagttcatttcatctcatttccttcctgttttgtacagagactggtttcccctttgctgactgtcagctgagttcaaaactggggtcaaagctctgctcacagcacaaatcacttcttgtgaagcctggctgggttttggcaggcagctgctaggctttcggtcttttatgaggctatcctggccacaatggagctttgtgtgtgatcaatgggtgctgggcatgagcccggctgggctagctgacacagtgagttgtccctgacactcatgactttcaagccctgtgtcttggagggcactgtgatctggaagttcaccttccccatgaaaaaacccaaaccagcctctccttttcctgcatggtgatccgtctgtaatgatcagtgacattctcagaattaaccaatcaggaaattcttggaaagtccacgcctcagcatttagtgcttgggaaattctacttccagatcccagaggggacagagcagatttccagtgagcattcctaacttgaaaaacctgtccttgaatgtttctccttagtcctagagatgctctttcagaatgtgaacctcctgcgtctgtgacgagatgtagaaggtctatactcagagttagtaggatgtccacgtgatagtgcctaggcctgccttatggcagttttgagaaaggtgatttcagagtggcttcagaggggatgactaaagcccacaatcttggtccaaaatatcctaatctccctacaaaaacgattttcttgccttggactatgtccagtctgccaactagtacagctgtttctggtttttgactcactgatttacctggcatgacatttcctcttgtttcaagattctttctctaagttcctcctgactcctctttccctttaagtattcctgaaactggctcttgcctggtccctttatttcattattcttccatcttgctggtagtatggtggaaattggacatagggtttggtgtcagatacacctgccttcaaagcctaactgtgctacctattagctctgtgaccttgggcaagttatttgaacctaagtcatagatttcccccttgcgaaatgggaacaaatgatttgttattctcagggatgttcacagacttgcttaaaataataagaaaaagtacctggcacatagccgatactcaaaaaatgttagcacacacccacacctttttctttctgattcatttaaggtaagcccttcccaatcggccttcagctgacctgaattcctgggatactgtatttggaattttaaatattccaaatatccagagttcttgcaggtcaaagctggtctatgctccaaacaggctgcccccaagggaagcagggtaattggcagctagtattcatctgacttttgtcatattgattcaatattttatctgaagatggcagcaactagtacatggtgccaccgtttagccactccatgccagaggtaccaggcaagtaaaagccaaattaccagtgcctctgctccatcctggaaatgacaaaggacaaagccaaggaacccaggaaagtgcaacgggatttggttttatgcagcagggaatcttctaagaaagccaggaccggttcacctacgtgtcattaccagtgcaggcagctcagaggtccttccccgggagaagtcagggcaccgcgagagagagcttagcttccttccttcctccatccctccctcccttccttctgggacttaggttccttccttccttccttcctttctacttttctttccttccttccttccttggctttggttccttccttccttctaccttccttccttccttctttccttccttcctgggcttaggttccttccttccttggcttagattccttccttccttcgcccttccttccttcctttctttgctttccttccttccttccttccttggcttaggttccttccttccttccttccttcttccctccctccctcccttgggttccttcctgcctgcctgcctgccttcctccctccctccctccttcccttcttctcctttctgtttttttttttttttttttttgacagtcttgctctgtcgcccaggctggagtgcaatggcgcgatctcggcttactgcaacctccgcctcccgggttgctcctgcttcagcctccctagtagccggcataacaggcacccgccaccacgctcggctaatttttatatttttagtagagacaggctttcaccatgttggccaggctggtctcgaactcctaacctcaagtgatccatccgacttggcctcccaaagtaggtgctgggatcacaggcttgaaccaccgcacccggccagagcttaggtttctattcgtgacaactttctgtattggttggcaggttctcctagcaccaccatgatctcaggactaaccactgcacacccgtgatgggattccaaaccttcgctgcaagaggacaaggtgacgagttgctgacagtgaaggctaaactaacgcggacagtgaagtgctacatgagtcggactcagactccaggtgaagcagccagcagaggtcagagagagacagctcacgttccgggtaagttgcaggtcgatttcagggccgactcatccagattactcattcttcatttcaggcaattgtatgactgctaaatactgctgctgggggcatctggggttgggaagtcatttctgccaggtctttgacccctgaaagcgtcgttgcgtctcgcgccgcgggtaggcagggcgggatttctaggaggaccggcagaggcgcgcataggtgcgtggtgctgggcccgggcgccgcggcaccggtgtaggagcgcgcatctccagagtttcttccatctgggcgacgtctcggtgcctgcggcgggaacggcgctttgcttccctgaggagcttctagagagctacggtggcccccgtgtgggaggcggggggcgtggcggcgtcggggcgtcgctgtcccctcctcggtagctctcctccctcccctttctgctgttaccgggagcgcggtggccacggaacgctgcccggagccgcgcgagggaggacccgacgcgcggcgtttacccagcgcagcgttccaccgctcgggtttggctgggtgaggctggcggggccgggggcgagatgggagcggcgcggggtggagagggtggttggagaaagggaagggagggccgcgggagaggttggatggtggaagtggcgccagagaggtttgtgcccagcagagacacccaggtatcttagggtcgctcagagcagtgtcggggaccccttggagacagtaggaaggggctcctcgcggggtggcggatttctatccggttgactttgtagagtgaggttgaccctgtgttcggcttgggccgggaagggcgcagaagcgggacctcaggacacttttacgcagggcgattctcagagactacaaagcctgcgccctgcgtcctcccaggcgcagtgttctgggatcagtgtcttttctctgttttcgtcctcaacacagccaaagtcgtggatatgtggtgacagaaaaacatttggctacataactgagctaggctggagtgtgaaatcgcggcgtgttatttggtccgggcgccctacatagcaacccccactcttctcgcccccaaccccccgccacgccggacacggtcaggcgggcgttcccccaacccgccccttgtgaagtccacctgctgagactgatacagatcccctgcgaacttgatgctgtccgcttggaaaacgtggagaactttcagaggaggggttatttcgccttgagtgaaaattaagactcaaaggaaaaggtatactcaagagctgcccttactgggttatttctgtggaatttggaaggatctttgaattgaagatgtggtgggagcgcgcagagaacagagaatccgtaagcttgagtttcttagacccagtttcttaaagccaaagtagcggggagatcttggcaagtcaagaaaccttcttgaacttcagttcccttgcctcagggggagaatactccagccataccccactgtgtggtttagaaggttaatggcctggagggagggaagtgttttgaagcctataaagtatcctgtgaaggtatcaccacattgctgcccactgaaacactgccggccgccgacagaactttgtttggagccgagttaagacagcatctttatggcagtgctggggtttttgtgattaccggtccagagtgtcaggacacctctgtttctcaaaccccagtttctgcactgccacatgaaactgctcattactgagtgacagcagaggacaggaactttgccttcttcattaacttctttagggcctttacaaagtgggagatggtaggaactttgatgaaaattgagggtcatagccttggagcggggtgaggggttagatttgactggacatagtcttcatgcaaccgtttaacaacaaaaacattgttggctgagttcttgttttttgatacaaggaacattctgtcggagccaaggttaaacatccaagagtaaacgtttgttggttttttttttttttttgcatgatctttagaggataagtaaaaaactaaagaaaggctgcattgcttgctgacacattttttccccacccatctgaaggcacacaaataatagcactggcaaatttgaatagtttcccttgttaccaaatctacgttcttatttctaatatggaacgattatttctagtatggagagaaatatggaatttctaatatggaagatttagcatggtgtgtcattgtaaaaatttaggcagttcttggataagtatgtccagccttccagagactataagtgtagtaatattagtgcctgttagtcatattgtgtatcttcctgatacccaattagatctctgattgttttttctttttaattaaaaggagctgaaagatgactcagttaagaagctggaaaataaaaccaggtctctgtaactgtgctgtcttattctgaactgaaagtctttctgcaataataatgatggtgataataaagctaaccttcataggacattgtgtaccagactgatacacgtgctacaattctgttcgttctcacaccatccttcatgggggaggttaagagcattgctcaaaatcacacagctaataagtcatttttctcagattggcgttaaaattatatttaattgggtcctgtgtgtgcgagtgttttaacttttgcattgtcttttatcccacacacggaggcaacatggatggtgagactaggggctatggacaaggttccagggtttggacttgagcatgctgctgagtggctatgtggtcatcactttacttccttttctaacccgtaaaatgatgataataattctacattgaatgaatcctttgtttctactgagcccaaagtctgctccgtaaaggtaaaatacttctcagagtgtagaaagaaaagtttcagattcaagcctttttgtcatcagtaggctggaaaatgaatagaagttagaataaactatacacttaatgtgatttttccaacaattatgttgaaaaattgttcaaaaatgcattcattccaatgatccttagctttatatttattaaaagaagtaaatgtaaattagacctcaacgtttttttttaacaggtaacgttgaaaagcacccacagtaagcaggtactgtttgctggttgattttagatgatgaaaattgtagagtaagtacgtttgcagaaaactgtagagtaagtacaattatagagtaagtataagaagaattgtattcaaaggtattgtattattcttataaagaaatgtattcttcttatacttttttacgttcttttattccgacaagctagagttgatcagaaaagaactgaattccaaaaatatgtttagggcacttccctattctctctgtatttacttggaaatgattcttagaagtttttggcatgggacttttaagtttgttaagtgaagggactagcacttatctatatgcatattttgcaagtatttttaaaaatatggctcaattgttaaatcattttattcgtcccatgacttatataaaaatctgggggttttttggttgctcacttttagtttaggcttggttttatggtgatctgggctcagggaggtagacatgtcaatgtcattagcattgccaaggtataggcagtctgctgcatgctgtgtgaatattaatattctgaagagatatttgagtccacaagatttaaagatcttctgttcaccgctgtgcttgtagaattagggctaaattagtttagcctgggcctcctgggtcttggtcatttgaaaatagctcctcaagtaggctggctatgtgtcttagtatagcagaaacaattcattattcactccatgtgtcgtctattatactgtgaaattacagatgatagttttcttgctttctgtttttccaaacagtgccacctggacttgtgggtttggctcatatactgactgtttcttaatcaagatagctttaatagtcttcaccctacccccatcctccagctgccctttggatgttgctgtgtagaaaccaagagagttcatttttgttgggggctgggctaggttgctaataatctgaagcaccatgaaggattctgacctaatcaaggcataaggaaatgatgtgtgtgtgtgtgtagaaaatttggaactgtgccaggcacaaagtaaatgtcatataagcattagttatgaattgatgaggaggaaggtgtcagaagatgaatgctgtagagaaggctatggggcagtacatggagagagtggttatctgtagagatgtggttttgtcataggtgatgggaaaggtctcagtttgaaggtgatgggtaaggtcttcatttgaataaagatccacaagagagtatgggtagaggggcatagaggtgtccaggtagcagataaggaggtcagataggcaacctagggactcctggacagatgtagcaaattgaaggtttttagaaaacttaaacgggaattttttaatggaaaatttcaaacttaaacatagaatagtacaatgaacaaccttctcccttctcccagcttcggcagttatcaacatggccagttgtgcttcatccatgttgcccactggcattattttaaagcaaatttaagaaattctaccaattatttctatttatcgtccccactgacattctatcagttatttctaaatacttctgtatatatatttctaaaaaataggcacttaaaacataaccacaatacttaactttttttaccttgtttatcatctgtaaatcttggccttagagccttcttgcagcactggttgaaagataagcatggataggccaggcgcggtggctcatgcctgtaatcccagcactttgggaggctgaggcgggtggatcactaggtcaggagatcgagactagcctggccaacatagcgaaacccagtctctactaaaaatacaaaaaaaattagccgggcatggtggtgggcgcctgtaatcccagctacttgggaggttaaggcaaggagaatcgcctgaacctgggaggcagaggttgcagtgaactgagatcgtgccactgcactccagcctcggtgacaagagcgaaactttgtctcaaaaaagaagataatcttggatgtctggattccttagggtagggtctgacagtaggtgctcaattgctagtggtcatctgttgtctttaccagcccttgatttttttttttcttttccttttctagatagttctatcatgacaatttcacttttacttcctctttcttctccttacctatttttgacacatttattcagtatttcccgtatctactctctacttctccttttaactttctcctatcctttcagtatttttgttcacagcctggtgtgtagcttgtgctcttttgatccctgtagcccatgaaatacagctccctttagttctagatctttttgaagggagatgagcatttcctattcttattttttaaaaaatactgttactgagattgagatagaatttacatgccaaatgcttcactgatttaaagtgtacaagtctagccaggcatggtggctcttgcctataatcccagcactttgggaggctgaactgggaggattgcttgaggccaggagtttgagaccaacctgagcaacatagtgaggtctttcctctacaaaaataaaaaattggccagatatggtggcacacctgtggtcctagctgctctaaaggctgagacaataggatcactagagcccgggaggtcaaggctgcagtgagccatgatcatgccactgcactctagcctgagcaacagaggccgaggcgggcagatcacctgaggtcaggagttcgagaccagcctgacaaacatggagaaaccctgtctctactaaaaatacaaaaattgccgggcgtggtggcgcatgcctgtaatcccagctactctggaggctgaggcagaagaatcacttgaacccaggaggcagaggttgcagtgagccgagatcgcaccattgcgctccagcctgggcaacaagagcgaaactccgtctcgaaaaccgaaaaaagaaaaggaaaaaaagtgtacaagtcagtgattttcagtgtattcacaaatatatgccatcattaccacagttgattttataacattttcatcacctcaaaaagaaacctggtaccctttagctgttcccatcccaccaccctaagcaaccacgaatctcctttctatttcaatggatttgcctattctggacattttatatatatatatatatgaaatgtcttttgtttctggcttttttcacttagcatagtcatttcagtgctcatccatgtcagagcataaattagtacttcatttctaatgatggttgaataacatttcattgtacggatatagcacactttgttaattcatcaattgatggtcatttcatttgtttccactttttggctattatgaatagtgctgctagaaatattcgggcacaagtttttgtgtgaatgtgtgttctcatttctcttgggtatatatatccaggagtagaattattagattaaatggtaactgtatatttagtatttgaggaactgtcagaccatttttccaatatggctttccattttatttgcccaaacatggaaatctagccatttttcaagtgcagctgcctacctttactttgggtaaatttctgtattaatattttttcactgtcttagttatcaaattctgttgcatgtaaatctggttttttttaatatatgtaaagtttttaggtagaatgttaatttagtggtggtccccaaagtggagggcatttacctttaagtgtaagatgattcattggaaagaaagaacaaaattctatttttacatatgctgtatgtatcctaatgtattagcatagctgtacacatgtaaggtgtataaattaatattcttatattagatctgtgtggtgcaaagtttttttatacaagtatgaataataataaaattttgtgaacaattgtccagaggcatgaaatcaaatatacctatgtaggtcttaatcctatattttatgacatgtctgatgggaaagttcttaaaattactttgctaatgaaattgaaaatagcctgctaatttcagcccacacggaatgtgtgaaataccagtggaaacagctttggatcaggttcagacttttgtttttgtcctacttctgctaattactaatggcgagactttgggtaagtcccctaatggtctccatttcagttctcaacttggcataataacacctgaaattttgcaaattataactttgcagaatgagactgggaagggcgtcatatgcagcgaccagagggagttagtcatttgggtgttttgggcaaccctgcagttcttttaggtgaaatattcaattttccatgaactttgccttccccttcttacttacccatttctcttgattgctttctgtccttctgttgtgttcttctgacagcaaaccttcaaaattaatggtcattaccaaaggctaaatcagctggagtggagtcctttgtgataccacccagccagggaaacagtatagcactgtttcctttctgctgcttttattacaacatagtatagagtatatagatgaaataagaaaattgcagtttactgcaattcctggacactgttttggaagctgttgagttaaattattgggcatcttgatggtttctatttgatatgtgatagttttaggctctgttattctctttgggatgtgaatctttgcctaacgtcaaagcatgaagagaagtagatcctgagaaagaagggaagaagttctggggaactgtggtaaccaaacagctcacatgctacagttgaagatttattcatgctctactcagtatttgtttattactggctgtgcttagtaacgtaccataaaattgataaaaatgaattttacttttcactctagactcttatttatttgtgatttctattctctagtatcctttattctaaggaagtggttgatgaacatttaggtcatgatttctaatttcttctaaagggtgacatccattcttgacttcctttcttgggtgacaaggaaataaacaacataaccatatctaggtatcgtttgataatttgttcatgatttcattcataagtgcaaagaatatatttattgaacacctattattgccactggtctgggttctggggacaaagcagtgtccaaaatacgttattttaaaaagtgccctcggccgcctgcggtggctcatacctgtaatcccagcactttgggaggccgaggtgggtggatcacctgagatcaggagttcgagaccagcctggccaacatggtgaaaccctgtctctacagaatactaaaaattagccaggcatggtggcgggcacctgtaatcccagctacttgggagactgaggcaggagaattgcttgaacttgggaggcagaggtcacagtgagccgagattgtgcctgggcaacaagatggaaactctgtctcaaaaaaataaataaataaaaataaaagggccctcatagatttaacattctggggggtactagtcattgaggttagatacaatgagatttgtgctaaagagagaaatagagctaaagagagggataggaactgtttgggaggggcaattaccagtttttatagggtgaccaaggaagcattactgacaaggtaagatttaaggtgtgtctttactctgatgcccccagttgtgtattcaataggcagttagtattggggcatagaaaatcctaaaacctaaatctgatgtacttttgcctattcatgaaataacttgaagactgttatacatagtgggagctaaagctgctctgccctccaagtgctggctgcttatgatctgaaagacttctgtgaggtcaccgtaggcatcatggtggcactgaggcatctatccctcctgcagaagttgcatctttgctgttaatactgtgtctctggtggctctagtgatgcaatcattctcgatggggccactgactctgatgtcacaatgacttggctgaaagtgtcctgaagtctcttgtttgtccagggcctttgctgcagcttatatgttcactagtaatctggcctgtgcctaccttttaatcccagctggaaaatctcagtaagaatgatggtaagctttgagattggtatctcttcccttaaatgtttttggaaattgattttattgtttgtacctaagtatctctgattcaaaggaccccctttgtgacagtggcaggaagtatgttgagaagatgctaagtattgcttagacctgtattatctctgcttatcaatccttgaaatgattgtgtgtctgaatgtataaatgtatgtctattcactatctcccttcctccagaacataagctgaggaagggcaggaagcttattttagtcccgtctgttaccccagtgctaccaaaacaaaaacaatgccagacctgtagtagatgctcagtaaaaaaatatttcttaactgaataactaacacactacaaacaatatggcaacaagtaacatacctggcagtggtatcatagcatctggcaaattgttttttgccttacagataaaataaaaaatggggatattgacctcctgtcactactgcatggactttgatggtttccaatcattactttctcctctgtgtcaatctgcctcttcgagaaattcatactcctggtgagtgtccgacctggccttttgtcttctctctgccactgcccagctgtgaccttagacatggttgtgaatctattatgggcctattctaactctcaatgctttgattttataacctggcaaagcagcacctgctggttatttttgtgaagcaacaacacttttctagaaggaagtgaagaaagcacctgcttttgacggttgttttttatgaggacgttggtttttgctcaattcacttaggtcagtccatgtatgggaagttccaaataaggtcattctctttgaactattaactataacttgtttataaaaaacactgggatcagccaggcacagtggcccacacctgcaatccagcgctttggaaggccgagttgggtggatcacttgatgtcaggagtttgagaccaacctggccaacatggtgaaaccccatctctactaaaaatacaaaaattaggcaggcgtggtggtgcccacctgtaatcccagctgctagggaggctgaggcatgagaattgcttgaatccacgaggcagaggttgcagcgagccgagatcgtgccactgcactccagcctgggcaacagatcgagacttgtctcaaagaaaacaaaatgaaaaacaaaaccacctggaatcactactgctttaccatttgagactgcatgtttttcatgtgatttcacatctatagtcatctccccccaccaaacacacaaaagatatgtgtagaaaattgaggataaaccataacttacttatatagttttattctcttggaaataatgaggctatcatgaactatggactcagactaagagtggaactagtaagagaaaggaactaaaaaaagtcaaccaaaaaatgacatgaacaaggatgttcattgttataaactgtataactgcaaaaagctaaaaataaatttctatcagtagggtctggctaagtaagtatgatatatttatactatagaaagtgataacacagtttaggagaatcacatagaccctcaagacataatgttgagtgaaaaagaagataagttgtaaaatatctccagtatgatcccatggatgtgtatacaaaagaaaacatatcttctggtctgaaatatgtacgttaattcatagataaaggtctagaaagaatagaatggttaacaatgttatttctgagaataaagtaggattgtggggcttggggtgatgagcgctgttcactttttactctaggcttctgtgtttgggcattttataaaaatgtagtcatggtttccttttgtaattataaaatccagaattattggagacgaaaagatgtgtgacaaagagaaattggtgcacaaggtgggatttgaggtcaggagaaggaagataggcattttgggctggtgagttctggcggttaacacaaccagctgtactctgtgatattttgtgaatggtgatttggggcttttgtagtgttttcaagatgcatgtatatgtttatatatgtatgttacatacaaaagatgcatttatatattaatatatgttatatacaaaggtatatatatatctatatgcctccagaaacaatatatgtcatatgcaaaagatatatatatacacacacacatagagttgacccttcacaatgcaggggttagggacactaacaccctgtgcagttgaaaatctgcacacaacttttgactcccccaaaacttaacactacttataacctactgttaactgcagccttactgataacataaacagttgattaacacatatgttgtatgttagtgtataatactatataagcattcttacaataaagcagaggaaagaaaatgtcattaagaaaaccataaggaagagagaatatatttactgttcattaagtggaaatagatcattataaaggtcttcatcctcatcctctcatgctgagtagactgaagagaggaaaaagaggcgttagtcttgctgcctcatggtgacagatatggaagaaaatccacatgttagtggacccacaaagttcaaatccatgttgttcaagggtcaactgtgtgggtgtgtgtgtataaattataatccttattactccagaaggtataaactaaaatatagggccctcaaatcaagaagtctccaaaactcttgagacttaaagtctcaagaacagttttcatatgtaccttattttggtctactgaacttttattattgggtgagaacaatttcatgttttaggaaatgtggattcacttctattcctacatgagtaattctgccccattaatagaacagttatatctgccacagaggtcttttctctagctctttttttgttttgtttttgagacagagtctcgctgttgtctaggctggagtgcaatggcatgatcttgtctcactgcaacctccgcctgccaggttcaagcgattctcctgcctcagcctcctcagtagctgggattataggcgcccgccaccacgcccagctaatttttgtatttttagtagagatggggtttcgccatgttggtcaggctggtctcgaactcctgacttcaggttctccacccgccttggcctcccaaagtgctgggattataggcatgagccactgcgcccggtcttttctctagctcttaactttgtctccattttgttggatttgttctttccgttcataaacatttattgaaccctgatatgcagctctaggtatggggcatgctacccggcagggaacagacaaggcccctcctctcatgaagcttacagttaggtgggagtagggggagaatggcggtaatgaactaaaaaatagcaggaagtgagcacctctgtgacgaaaactaaatgtttatggtgatgtgagaggtaatgatgggggaactaccttaagcagaaaggtggttaggaaagatatctttgaggaagtaatttataaatcaaggcatttatgacaggaaggagccagatgtgtcatcatctgggggaggagcatttcagaaagaggaaacataaaacagcattcctagggttagaaggagcctatagggttcaataacttgcagtgtggttggggcttatggaggctggatgaagataagtgagagaggtttacagggacagcatcatgtcaggccttgagggcaaggtaaggagtctggattttattccagatttgatgggaagtctttgggggatttcgattagggcaatgacatgatctgatttaggtttataaaagatctcttgaatacctcttgattataaatgggcaagagtaatcgcttctcggccttttggctaagatcaagtgtagtatctgttcttatcagttaatatctgatatgtcctctatccgaggacaatatattaaatggatttttggagcagggacatggactaggagcttgctccgtccactccatgcatcaacttggtattgctgtacccctaggaacggcgcacccctctgggtgttaaaacacggtgttactggccgggcacggtggatcccacctgtaatcccagcactttgggagtctgaggcaggtggatcacaaggtcaggagttcaagatcagcctggccaacatggtgaaaccccgtctctgttaaaaatacaaaaattagctgggtgtggtggcatgcacctgtaatcccagctacttgggaggctgaggcagagaactgcttgaacctgggaggcagaggttggagtgagccgagattgtgccactgcactccagcctgggcaagagtaacagcagagaaatctattgggaagctatggctgcacgtccaggtgtgagaagacggtaactcagactaagacagcagctatagctataaacttgctgatggaatgaagttggagagctaaggaaagataggatcagaaatgactcctaagtttcaggcttgggcaattggaagagggaaaagcagggaaggagcaggtttcaggagaagtgagtgactgttttggatgtatcaggttgcagtgcccactggacagatgtcaaataggcaataagatttgctagccgggaaatcagaaatagagatacatgtgggagttgcctgcatgcacagcaatggtatttacagccctgtaattgactccaaagtctcctgttcaccactgtgcagggtgaatgtggcataggccacccttctatctctaggccttcccctgtctcttcttgctttttgctgttgaaagttgcttttagcttcacaatgcagagggcagtggaagaacagaaaagcaaaacatttcccgagcctgtaattacagtgacaagagtgcttcttgtttgtgtagctctcaacattttaatcattacgtcttcactaaagctaaaatctgagcttagaagtgagtgggttttaaagatgggttctagattcatactgtgttctttaaatgttatgaactgagaatacattgatactgatattataagtatgaaaggtaatataagttacatgaagcaaagttttcagtgctatggatcatccctctgttttatgtaccactttgcctactttgttgaaacacaagaacaaactaaatgaaaataagaacatatggaaatggctgggcgcagtggctcatgcatgtaatcccagcactttgagaggctgaggcgagtggatcacctgaggtcaggagtttgaaaccagcctggccaacatggtgaaaccccgtccctactaaaaatacagaaatcagccaggcgtggtggcacgtgcctgtaatcccagctgctcgggaggctgaggcaccagaatagcttgaacctgggaggcggaggttgcagtgagccgagatggccccactgcactccaggctgggtgacagagtgagactctgtgtttaaaaaaaaaaaaagaaagaaagaaaatgtggaaatgtgtctttacttccagatagtattcctgtcttggatttgacatttaattttattaaaataattttgatgcatggatgttttacatttttatgggatttatcagttgatcctttgtgatttcttaattttatgctttgaagaatgtttcctctcccaatgtcaagcctctgtaggtttactgctagttttatggctgatttatttattttttcacttataaatccaagcgggctttactatgttggatagagccaagtacagacttctaaattttttgggttttgccatctcaaaataatttgtagccaaaatacaattgaattcttacttattttgaatgattccttgctcattgcagaatagctctccagacccccagctggccatgtggtgagttcagggcccaaatcaagtagtaccagcaatcagggaactcctatctgttttgaatggattcacaccagccacaagcctggaaagatggtgtcacaatctacagtcaggcaggattctcctgtggagccctgggaagggatcagcgatcactctggcattattgatggttcgcccagactcctgaacactgaccatcctccttgccaattagacatcaggctcatgaggcacaaagctgtctggattaacccccaggatgtgcagcaacagccgcaggacttgcaatctcaggtgccagcagcagggaacagtgggacccattttgtgacagatgctgcctctccctcaggcccttcaccttcgtgcctcggggactccctggcagagacaacgttgtctgaggataccacagactccgttggcagcgcttctccccatggctcgagtgaaaagagtagcagcttctctctgtcctcaacagaggtacacatggtccgcccaggatactctcatcgggtgtctctgcccacaagccctaggattttggccacctccccatatcctgagactgacagtgctttttttgagccttcccatctgacatctgctgctgatgaaggtaattttagtaggtgacctccctcattcctctctgttcacacccttgcttcgccttgctctaaagcctgccttgttgtcttccccatgggacaatgcattgcctcatctaatattgtcagcagcccagccatctgggcggtcacaacaggtgaaatcaaatattggctttctccttagactgcagagaattgttatctttttagcttaatgtagttgataatcagtgccatgtgccatctttaagctggcgtctgccttcaggaacttagagctcattaaattgtctacaggggagagcatcggaagcactctcaagtcagtgtggaggttggaggtgtttccagacagccacggggtctgcatttcacaccagtacctagtaggtggtgaagtcacttcacttgttatatttacctgtatagaatctgacaggaaaatggtaagatttttaaacaataactacagtttcccccgaagactatacaaaacccctttttattaaaacaagggctctcactgctatgaagtaatgtacatattcctaagaccctaaaattcctaaaaattggataatccgtgcgaagtactactcaagagtcaataaattagctattattgttataatctgtgacatgtttatttcattttaaaatatttgttatagtcacacttgtcattattaatttacatttctattcaaaccctagtataaataatcaatgaagctttttctttcaaagcaatttaaaaagtcatcagtctgcctgctgcctgcctgtctatttctctgtatatttatttctcactagcaggagctcatcttcccccttacctaaaatatggagtttatgtgttcttttggaaatgtttgagcaatcaaagatgatgacagtctttaacacatttattcattgcttaagaagaacaaattttggacaatctttcaatggttaattttgagataaggaccaagtttgagcaaaatgacaagactgattacaggccttttttttttttttttcctatttttttgctcacttgcttggatagttctaaggattaagagtgacttgcaaatttagtagtggctaagtgagagattagtcttaatagattgtcttatagaggaaagccctctccccaacagagaaccaccataatgacaagttataataaactgaagatgatctttggggcctagcatacccttgcctgaaactttttattctatcatggtacaggaagtagttctacaatttaaaattatcctttagctttttcttttactcagaaagaaaacagataccccagccccttttgcccaaagacaaggactcccaacagctcctgtcagtgcctttagaaacaactcacggaatgttttgagaatatctcttaaactcagtaaggggattcattctttaagattaagaaaaagaagccttgagtgatctggttctttctttctctggtgcggaggcagcaatagggaaaacagccattggccactaagatgtggacattcctatgaccgctgcatctcagatggcggcaaaagggttttcttttttcagaaaatactttagggaaagactatcggcctctgtaagcatttcttaaggctgtaggaagggattccacagtttattttgttggcataggaactacacatttacaagcactttcaccttcctttatctccttagtgtcctgataaatatcccaatttaagggctgagagcgttttgatgcagaggcacagctggtgaacggacagctggaactggaatccactctgttccgattcttctctgtgctctttcctctatactcagagtctgcaaactatgacctgtggaccaaatcctgccagcttcctgtttttataaatgaatttctcttgtgtctatagctgctttctcactacagcggcagaagagagtggttgaaacagatactgtatggctctcagatcctccaatatataccagctagctgtttacaggaaaagtttgccagccatagcttctgaagctaagaagtccaaatttttccatgcaacaactactttcttgaacatgaagcaagggatttgaatgactctgcttgcaactccatcatgctgagagctgtgtcaccaccatgtgcagcattttgttctaatttagcaggttgggacatctcagctcttgacacagaaatttttgctttaaatgctgcagtaagaaatcacatgacagaaaaaatgtttgttttgatggtggtcattgccagtaatggagtggctaagggtgcaggaatggatgtgtcagcagaatgtaccttctgcagtttgttggttttgactggaagaagactaacttagagaagcaatgctgaccttttttggatggattttatttctctagacaggaggtttagggctgggtgcagtggctcaatctgcctgtaatctcagtgctttgagaggctgaggtggaaggatagcttgagcccagtgatttgagaccagcctgggcaagctaatgagacccccatctctgcaaaaataatttagaaaatcagctggtcatggtggcacctgtaatctcagctgctagggaggctgaggtagaagaatcgcttgagcccaggaggttgaagccgcactaaagtgtgatcacgccgctgcactctagcctgggtgacagagcgagatattgtctcaaaagaagaagaagaaaggaagtttaagatcaatcacaatgagctagagaagcgatctcataatccttaggaccctgcttttggactgtggcttctcactttaccccagcccctgttgggatttcccaggaccctattctctttctaccctcttttcctcattggtctcctccactccggtggctgaggatacctcccagttactccaacagcctctcctagaaatgatcatcattaaagcaatatctgtaagacctgccatcggaaagatctttcttttcctgtcatctgaatttattctagaattgtgcttatttttttacattatttaaaagccacttcctataattgttttattttattaggtaatctttaaactcccttttccccatttttaacaatttgctatattggcaggtgctgttcaagtcagtagaagaaccatttcttcgaattccttctcaccagaggtatttgtgctgcctgttgatgtagaaaaggtgaatgctatcttctttctttttaaccatagagtcttaatcctttagatagtgttgttctgatttaaatctggaaacttcaatttgatgaatcattacaaataggtttcctttcagcatttgattgatggagactgccagaaacactaagctaagaagggttccgaggccgtgcctgtgctcagctggaaagttttctgtgattgatgaatgatgtctggcattaggcttcccccaacctaaggttttgtataacaagaaatccaatttgagttgtccgttgattatagtaagtcgaatctatgtctctggacaatgtgtgctataagtcatagagtgacctatgataactcagttaaatgaatatttatactgatatgcattaattccacttaaatagagcatattgatttttcaaatctaatataccctccatgaaaaagttgattatgcttgtattttaattgatttctttttctgcaggaaaatgcccacttttatgttgcagatatgattatatcagcaatggagaaaatgaagtgtaacattctgagtcaacagcagacagagagctggagtaaagaagtcagtgggttacttgggagtgatcagcctgactctgaaatgacttttgataccaacataaagcaagagtctgggtcttctacttcttcatacagtggctatgaaggcaagttgggcaaatatgagaaagctgtatgttatgtgtttcacatatatctcctctataattaccccttatccacggggcatatattccaagacccccagtggaagcctgaaccttcagatagtaccaaactctatatacactactttttttttgttcttgtaaccaagagggttactaagtgactagtgggtgggtagtatatacagtgtggtatgctggacaaaggatgattcatgttccagaggggacatggcaagacgtgtgggagttcatcatcctactcaggatggtgcacaatttaaaacttaagaattgttcatttctggaacttttcattgaatatttttggaccagttgacagcaggtaactaaaaccacgggaagtaaaactgcagataaagcaggacaaatgtatgtctttaaatcctttgtctaaaaacttcttgagtaacctctgtaatcctcaccctttctgccatcttgggtcaggattggttatcatgctccgttcagttgtcaaatcctatgttttgttttgttttgttcttttaatcttggacttcatcctacttttctttttcactggaaataaacgtggctgatgtctcctcgtcctttgttttctgtcacatggcattctcctagctgttcttacaccatctttccttttccaatgaatcttctttttttcgttcagtaatgggcctgtgctgtgctaggtgctgaacatcaacagtatgcagggtgtgctccttccctcaaggagtctgcgtgctggagcatgggaccgggaagccctgtggggtaacctgtagaacagaggtggggacccagcacagtgcgtcactgtcactgaggaggagtgcctcggctcactctgggacctgggggctcttccccgagggacgagtgcctaagccgatagctcatgttagggtttgctactttcttaccatttcttaagtcctgcctccagtcctatattctttttttaatctgtatttgcttcctggcagatttaacctactatacaccttcaattattccttctcagctattatctcctgaatctatgttttcagtcctggacatctcttctaagtgcttgctctctaaggctggaggcttgtccgtctggctggccccccaggacctgtgacttaatacttcatttctgggtgacttaaaatgcttcattttattcattgttgatatatgttcactgcaacataaaggtgggtgtagttaacctataacttaatatgtctaaactagtcatctctccatcactctctcacaatccccttctttccaaagaaaaccactgaagcttgcttttcttcttgacttcctttactacacgttaatcaggaatactcaataacaaaggaagaactcactccatatggtgtatagcataatgcctggcacagaataggtatatgatcaaatacctgttgaatgcactaactggctcaaattaaaagggttgttttgtcttaagatatagaacattctcactgaacccagtggtgggaaatatatctgggacacatatgaccagtgtagacaaagctccagtgtctatcttttcggggactttgggcctctcatctcttcttttctagcaattgcttcattctttttctgtagcctacctacttctacccacccctggcatctagtttcagctctgcagtcttcctgaccactcagccaggtcacatctcaacaactcagttttgcaggaccctcagtccagatcccaggacagagcacctgatgggccttaccttggttagatgtccataactggttggtcagatgcagccagggggcggggaaatctgatatggacgatcgtgccctctgaggctaccagtagggagaaaatgaatgtgggtggagaagaagtaattcctatttagtatactggactcttccttcttctgtggtcttgtgctcctgtcccgtttctagttagtaaacaaatcaatcctgacttctcagtcgtaatcacttctcttccatccatttcccatttctatcccttacctggcccgctgcagtagccttctggctagtcattttgtaaggactacaatttagttctttaataccgatttggtttaattttctctctttactttcaacttgtttcccctagttgatcctgcatgtatctgtcttcctggatcacaactttttgtcctctataatggcttgctgagcttttgccacattttattctggaatttttagccttgtggcatccagctgcttcctgccttttaaacaggaatctcgtgccattccccttggctggatggtgggctgtagttgaactagactgtgtatagttgctggcagacatttccccccatggctttgggaaggatgtcctgaaatgtgggttcccccagtaaccacacatcaggtctttcatccttcgcatccttcagaagcaatgtcctgccactgtcactgtgacatgctccctggtttgtatcccaggggaggagcaccatccatgtggaatgaaacacaggttgtgctccagaatgctccagtgccatctgcatgctcgtctttccctggagttgtgtagtgcagaaccttgcctcagaacttctcaaggcccatgcaatgcaactgtgttttttgtgtgtgtacgtggtttaggtctgttcgtatctcagctccttcatgagatttttttttttttttttttttttttgagatggagtctttctctgttgcccaggccggagtagagtggtgcgatctcggctcacagcaacctctacctcccatgttcaaaccattcttctgcctcagcctcccaaatagctgggattacagccgcacaccatcacgcccagctaatttttgtatttttagtagagacgagctttcaccatgttggccaggctggtctcaaactcctgacctcaggtgatccgcttgcctcggcctcccaaattgctgggattacaggcacgagccaccacacccagcctttcatgagattttaaactcttagatggctgagaaattgtcttctttgtatttgtgtttagtataatgccttgtctgaaataggtatttttataaatagtggttgggtgtaaattgatggtagctgaaactttaagaaaacatgaataaatatgaatatgttaaatgaaaattaagaatatttctatcctccaaatataaatatttatcttttattaagtacttcttttgtgacatttgtggcaatagatgttcctccatgaggtgggttggtattactcaaactgccagttggtcctgagaacattaaaaaaaaaaaaaaaacaagggtagaaaatagcagagtgcatctcactgagggtgagcaatgtttcctgaaagttttttttttttttatcagttaaacatattattgtgtctgtactaagtcacaatgtaaattgtacgttactatggatgatgggcaaaagacagtgaaaaacacagatgggtgctcttacccccattctatccatgaggaaactgcagctggaagtggtggttgtccatcgtcacccagctagaatgggttctgtcttaaagtcagccagcctactgtaaaacccttcacataacttctttttttttttgagatggagtctgtctgtgttgcctaggctggagtgcaatggtgtggttttagcttactgcaacctctgcctcccaggttcaagcgattctccggcctcagcctcccaagtagctgggactacaggcacctgccaccacacctggctaattttttttgtatttttagtagagatggggtttcaccttgttggacagtctggtctcaaactcctgaccttgtgatccgcctgcctcagcctcccaaagtgctgggattacaggcatgagccaccgcgcccagcccacataacttctatgtaaactatgggctaggctatttccttaaacaactgtattcctttttctgtgtttctctcctatgtttattcaaatgaagacagttttacaaatttatatttacaatgattatataattatattaataatataataatgattattaatgctattatcagtattattaatagtattaatactattcatactactagtattaataatcatgttgctatagttttcacttttttttttttttgagacagggtcttactctgtcacccaggctggagtgcagtggcatgatctcagctcactacaatctccgcctcccaggctcaagtgattctcccacctcagtcttttgagcagctgggactacaggtgctggccgggccaccacactgggctaatttttttgtattttttgtagagacgggggttctgccatgttgcccaggctggacttgaactcctgggctcaagtgattctcctccctcagcctcctgagtagctgggactacaagtgcacgcccctgcccctggcagatttacatttttaaatgatagtatttaatcgtgtgatttgcaaaatcaatttcctattattaaacgtttagatgctttcagtgtttcaatattttaaaacattggatggactgcagatagcttctttgtgatgaaagccttccgaatagctgggactacaggcacttaatcatagtgagtgcaaaaagaacacacaaatagttccccagttttttaattctttaagttgaaatgtttaattctcttaaacttttagccctcttcatttcccaatttctatttagttgggtgttgcaggttgtacagtttttctttttcttcttattggtaaaaacctccttcctttctttgtctaggttgtgctgtgttacaggtcagcccagtgactgaaacacgtacttaccatgatgtgaaagagatttgcaaatgcgatgttgatgaatttgttattttaggtaagatttggaaactgtttggatgtgactggctgcctccccaatcccatccgcatgcacacactaacatgcatcacacacaacattacgttacagtggcattcaaaccaacttcttccaaaatcagattatggccctgatatatatatatatatatgatgttcttgtttcaaatgtctggatagctaatctctcatctcacttgtagagttgaatgaaaaagcagatattcattatggtcggatatctctttggcctctcagttatattttggtgaaatttcagatgaaatcccatctttgatcattatctgtcctctcattatctgttctgtccatttctcagaacctgaagcatggagatgctgaataatttgctctttctgagatgcagggagtgattttagtgttcttataaaatggactgcgattaaatgaaacagactaaaagacctcaccactctttcttttattttcccacagagcttggagattttaatgatatcacagaaacctgtagctgttcctgcagctcctctaagaggtatctgtcttctgtgcacagtgcacatagacccttgggctgtcacctctgaggcagtgtgaaacctaggcctctgacattctgggcccactttagctagttccagtgatttgttcccatgaatctaggagagtatcacctagaaatgaaacaatcacccccaaagtttctatagtgttttacaatatataaaaggcttttgtatgcattttcatttaatcctcatttcagttaaacaggttgggtgaattttatgtatgcatgtgtgtgtatatttatgtttttgttgttgttgtttttgagaccgagttttgctcttgtcacccagggtagagtgcaatggcccaatctcggctcactgcaacctccgcctcctgggttcaagcaattctcctgcctcagcctcctgaatagctgggattataggcacccgccaccacacctggttaattttttttttttttttgtatttttagtagagatggggtttcactatgttgaccaggctggtcttgaactcctgacctcaggtgatccgcctgcctcagcctcccaaaattctgggattacaggtgtgagccaccatgcccgaccatatatttatgtatttttaaacctcattttatagacataaaaattgagactcatatataggatgtgcttcgggacacgaaggctgtgaggtagaagtagggcttgaatgcaggtcttctgactctaaagccagtgctctttcaccacacctctaagtcttagcgccctcagtaaataaaagatgctttatttattgaacatgcaggagccatgttgagtaagatgcctggtgagtgattcatgcgtcatctcatatgacagcctcttctgagttttgggggctgggaagaacagttgaaaacctcaggaagaccctgaacatactcctcatgaatatagttttccagtatttgcatctcttacatttcagtgtcacttatgagccagacttcaattctgcagaactattagccaaagagctgtaccgcgtgttccagaagtgctggatactgtcagtagttaattctcagctggcaggttccctgagtgcagctggctcgatagtaagtatcaaaaaaaattgaccttgaattgaaagttcctaaatcctcattttgcctgccctgttcactttaaacatttgtctttccttgtatggtcactggatattaggggagactcaaaatgaatgaggaaactggcatgtgttgagtacttattgtgtaccagagactgtgctcagcagtccacattattttattttatttattaatttttttgagacggattcttgctctgtcacccaggctggagtgcagtggcgcaatctcagctcactgcaacctccgcttcctgggttcaagcgattctcctgcctcagcctcccaagtagctgggactacaggcgcacgccaccacgcccagctaacttttttgtatttttagtagagacagggtttcaccatgctggccagctggtttccaactcctgacctcaagtgatctgcccaccttggcctctcaaagtgctaggattataggcctgagccaccgtgcccggccagcagtccacattttaatcctcataagtatcctgttaggtagaggctgtccttatttttatttttaagtggtgggcccagcctcccagcagggctggtcagctgtgaagcaggagtcatgcccaggctgcctcattggaaagtacatgttggttccctcatggaacacactgctcactgctgtcagagagcaagcagccttctgagggtagagaacattatgacaaaggctaaaacaggggtagggaaaatgccctcgaagtgcagaggaaggagtgtttaattttaccaggggaacttaggaaggctgactgcagatttcagaacttgagctaagtattgggctggccagaactgtggcaggtagaaaggttgggggaggacgttcttggcaaaggggagctgcagcaaaagtggaggggcatgctatgccgttgagcagagtgattcggtgcggttggataatacccgtttgtgagtatttgtgtctgagaggttgttctttatggaaataaggtttgaatgatagtagccaaattgtggaggatgtagaatgctaatttgagaagtttggattttattttattttattttatttattttttaagatggagtctcactctgttgcccagggtggagtgcagtggcacaagctcgactcactgcaacctccacctcctgggttcaagcaatttctggctaacttttgtacttttagtagagacagggtttcactatgttggccaggctggtctcaaactcctgacctcaagtgatccacccacctcggcctcccaaagtgctaggaaaacaagcatgagccactgcacccagctgagaagtttggattttaaatgacagtaggaaagtccagtggtccagcggggaggcactgaacatttgtaagcaaggggaaaggtcttaatagagctgtttctggggaagactaataatgataggggttctgattggtagcatttgtcagtctgttgactaagaggggtgaggcttctgctattcataaatgcattccaggtcaaaatgacctacttacagtaaatttgaagtctggaaataaatgaactaaaaatactaagaaaagtgatctcatctgggtggtgtttaaagcaattctcttgcagatggctttagagatgtggagggctcttggtatgccctttagttcagttaaaagcactgttaatttttcatggtaaattttaatgttggaaatacatttagatgtttctttaatttaaattctttgaaatatgcttaagttgttcctaaatcattttatgtcttatgcaggtcgtaaatgaagagtgtgtccgaaaagactttgaatccagtatgaatgtagtacaggaaattaaatttaagtctaggatcagagggactgaagactgggctcctcctagatttcaaatcatatttaatattcatccaccactcaagtaagtatgggctgttgcttgggcctccaatccatttaaatcacattgtgacagatcccacctgactctatggcagtaggtgaaaaaaatacatatgctaaagaacacaggaaaatttgttttagggaaaggaaagttggctgtattttctggcttaggttttttttttttttcctcttgtttaccatggacttttgggggctctgtaagttttgacaagttgagaattcagctatgcaaccctaattgtcaatattgcgtagcaactgaaaattaaataggcttaaaggggatttttaaaagtggctaatatcaaaacttaaaaattatatacaataattttttaaaatgtgtttcctttttaaaaaaattagagatggggtttcaccatgttgcccaggctggtgttggactcctgggctcaagtgatctgcccacctcagcctcccaaagtgctgggattacaggtgtgagccacctcgctcagcctatgataattttaaaagactggaccactttatcttccagaacaatcagtgtgaaataaaaatgaatgaataaacttctaaaaaaggaacatttaatcttagggaaagcacttatagttaagaaatgttacagaggccgggtacggtggctcacacctgtctataatcccagcactttgggaggcctaggctggggtcagggatcacctgatgtcaggagtttggggtcagcctgggcaacatggtgaaaccctctctctactaaaaatacaaaaataaactaggtgtggtgggtgcagccctctaatcccagctactcgggaggctgaggagcaagaattgctttaacccaggaggcagaggttgcagtgagctgagattgcaccagtgcactccagcttgggtgacagagcgagactcgatctcaaaaccaacaaaagaaatgtaacaaaatgtaaataaaaatatgtttgttctctaagaagtaacaaaagttctaaaagacaaaacaactaagattatgcaaaaaaggaaataaacctataaatttaaagtaatagtttaattgtaatttgttccgagactataggacagattatgatcaaagattatacacaaaacattttaaccaagtataatttttccatccctcttggtttgtattcaatttggtgtgcaaactgccaagcgttacaaagggaccggtgagggttgttgactgtgcccaagggactggagagaggttgactctgccccacggaggtgccttatagactagatctttcttttgtttttcttcttttgagagaatgccaagaaagtctgtggggctgcttgggcagaactccctgtctaggcatcgtgagaggttgctttccttagcctggggtatcttttctttaggggtttcctaggtcctcactatggcacctgggcagagatttagcatatttttaccttggccatcttttgctgatcctgaactgtaaacaaattttacaatctccttggtatttccaagtcacatgtaaaactatgggataaacagttcaatagaaaatccctcaggccgggcacagtggccaatgcctgtaatctcagcactttgggaggccgaggtgggcgggatcacctgaggtcaggagttcaagaccagcctggctaacatggcagaaccctgtctctactaaaaatacaaaaattagccgggcatggtggtgcatgcctgtggtcctagctacttgggaggctgaggcaggagaactgcttgaacctgggaggtgaaggttgcagtgagctgagattgcaccactgcactccagcctgggcaacagaataagactccatctcaaaaaaaaaaaaaaaagaaagaaaattcctcaatggaatggaatatctcttaccagaaatgatttgatttctttgtcttacgttacctcttattcgtctaaatttctttagatccatttgtgaatttcccaagtgcatcatcttttggtgtatggcctccctgagctgtcttccttgtataacatgtctctggttctctctggagctggaaccctgtacacgggcatcgagacctccctaaaaaccccttggagttatcagtgacgctgacttctgctttggttttagcagaagcttttttttttttttttttttgagacggagtctcactctatcgcccaggctggagtgcagtggcgcgatcttggctcactgcaagctccgtctcccgggttcacgccattctcctgcctcagcctccgaagtagctgggaccacaggtgtccaccaccacgcccggctaattttttgtatttttagtagagacagggtttggccaggatggtctccatctcctgacctcgtgatccgcctgcctcagcctcccaannnnnnnnnnnnnnnnnnnncagagtcaacctctctccagtcccttgggcacagtcaacaaccctcaccggtccctttgtaatgcttggcagtttgcacaccaaattgaatacaaaccaagagggatggaaaaattatacttggttataatgttttgtgtataatctttgatcataatctgtcctatagtctcggaacaaattacaattaaactattactttaaatttataggtttatttccttttttgcataatcttagttgttttgtcttttagaacttttgttactttttagagaacaaacacagtttcatttcccctggcctcaagtcatccccctacttcggcctcccaaagtgctgggattacaggcgtgagccaccgtgcccagcctagcagaagcttttaaagagatgtagctttaaggctgggcacggcggctcatgcctgtaattccagcactttgggaggccgaagtagggggatgacttgaggccaggagttcgaaaccagtgtgggcaacatagagagaccctatctctaccaaaaaaaaaaaaaaaagtaaataaagccaaaaaaagctagctgggcatggtggcgtgtacatgtagtcctagctacctacacaggaggctgaggattgcttgagctgagccgaggagtttgaggcagtagtgaactatgatcatgccagtgccctccagcctgcgtgacagagcaagaccctgtctcaggaaaaaaaatgaaaaataaaaaaaattagtcatagctttaaaagacccagggatttcaactagaaaattgtattgaataaatctatttctttcccaaatgaaaagtgacaaagttaaggcccttagttagaaaagtatcacgatggcaatttcttttctaattagtgaaaaatgtgccattggccttctctgaaatgtaactagtattatttttcgtattcaggagggaccttgtggtggcagcccagaattttttctgtgccggctgtggaactccagtagagcctagtaagtacggataatggatcgcctgcttattatgtgatgacaaggtccagaatagcaaagtagggcagcgcattgcttgtgtgagagatgcctttgatgagaagttgttataagagcttcagagaagttgccctccttttcatgaggagtccatcatgactgacaaggctgtgtgatcaactaggaccgaggacaccaggaccagcctcctagttctctccctgttgggcatcagctccagccacgtggcctcctgctgccccttgaaaatgccaggctcacttctgacatatttgcgtttgtggttttctctcccccaaatgctctctctgcagacacccccatgactaattcctttgcttctttcacattttcactccaaagtcacgaggtcttcccttgctgccctatctaaaatacctgtcttgccccactgctggccacagacaatcccatgaacgctttatattacccatccttattttttttctttattttcttgcacaatattttcttagaagttccttcttattttgtattcttagcacagtctttctaaaatagtctcttatattttactaatatgtcttattattatctgtcttcaacactagattataagttctgtgaggccacatgtgttgtctgttgtatttattactttatttccagcttctagaagagtgcctggcacatagtaggtcttcaaaagatatttgttgagtaaaggaatggcttaacaaggagctagccaaacttctctgagagtttgaggaggtagcctgagaggatcattcctgggccaactgaggcctagaagattaggctttcctgggccaggcacggtgtctcccacctgtaatcccagcactttgggaggctaaggtgggtggatcacctgaggtcaggagtttgagaccagcctggccaacattgtgaaaccacatctctactaaaaatacaaaaaaattagccaggcatgggtggcaggctcctgtaatcccagctactcgggaggctgagacaggaaaattccttgaaaccaggaggcagaggttgcagtgagccgagatcacactattgtactccagcctgcatgacaaagtgagactccgtctcaaaaaaaaaaaaaaaaagctcgggctttcctcagtcacaaatgcaagtttcccccttgagactgggaatcacttgttctgctctgatggtacctgtatgtctgacctgcaaaaggctggaaagaggagctttgtggaaagagttcccttagcctttgatagtcggtttttgaaggaaaaagactatgaggagctcctacttcaagagataaaaatagcaagcaggaatcgatctgggcttcctctcctacactggatgataatgcctgacgggcatcaccattgttgctgattttctttgaatgagtcattttcccagcacatctagtggggaacatgtctctttggttaaccactgtatcctggcgcttctgtaaatattgaatgcatgagtcagaaactgtacacatatgactatcgctccaccaactttttgttatttccctaagcttgttcaggtatggagatgtgtgtctgcacttttgtacagtggccttgccctcagggagcttgcttatcatcttttagggaagatacactcatcagccaagtaagtgtatgtaacacaaagtgatgtacgtaacaaaagagtcaagagtgccgtgggatttacagcaagggaacttcatctgagcttgagaagctgggagtaagaggtttcattggaaagtgattgcccacagaagtaggggtgttcgtcatgtgcaaagggcctgtggcaagtaaaagaaaccctgtgtggccagagagtaagaataggaggagaaaacatgctgcagatgtaggcggggcccagattgtagacagcatagaaataattttgggcttttcctgttaaattcctctagcttctaggatacattttttttaacttttgtctttgagataattttagatttacagaagagttgcaaaaagagtagagagagttcctgtacacccttcacccagcttcctctactgctaacatcttacataatcatagtttcaacctgagaaattagcatggggtacagtcctattaatgaaaccccaggctttattcagatttcaccaggttttcagtaacatcctttatctgtttcagaatttagttgtcatgttttccttagtctccttcaatttccacacactgaacatgacattttaccctttactagttcagtatatcccaaaaataaggataagaaacaagttatcacaccaaaaaaattaaaaacaattctctatattgtctacttcctagtcctttttgttcttaaggtatcatttatggctattttttccatcaaggttgcaatcaaatttcatacattgcatttagttattgattctctttagttagctttattctagaactgcactatgcagtatggtagcactagtccacctggctatttaaaattaaattaattgaaattaagaattcagttcctcagtcacactaactacatttcaagtactcaatagccacatgtaactcatggctactgtattggacagcacagatatagaacacttttatccccatggaaagttataccggacatctctgttctagaatatttctcttccacccaaccccctgatgctgacttttcataaaatgaggacaattgtgttttggagcaggatttctcaacttcagtaccatggactttgtcgtggggggtcctgtgcactgtaggatgtttagcagcatcagtaggtgccagaagcagctcccagtggccactgaaaatggcgccagacatttgcaaatgccccttgggaggcaaaatcacccttggccaagaaccactggtttaggtcactttgtattctgttttagttaaaggacttaggaaattaaaaaagatggacattagtgtattctgtattgatagtataacagcatgtattcaatgaagtttgatgaatgagtgaatggatattgagtgtgtgttgaggagtagatgaaactgttgctaccagaagctcacaggtgcctaaccctgaatttcccccaggagcagtggttcagtattgactaattcagtgttcatggcgactctagagaacataactatcatgaataacaaaaaacaactctttatttgtttgcttttaaacatcaactcagagtgtgacctgggtctgagggacaatttgggcaagtgcaaaggcgttagctccctctccctttcccaccatcgaatgcagcggaggaggagtgggacatgatggctgtgggctggagctttcgcagtccaggcttgggttggaatcctgcctgcctacatactgttcgtgtggccctgcgtgttgcctaacttcagtgtcttgtgctttcatcagtgaaataggggaaataactgtccctctctcacagactttcgagcacagaatgacatagtaaatgtaaaacatttaactgatctgtggcacagagtaagtactcagcaagattcatttctgtggtcgctcccagccaggccttgtttattttttatttttatttttttgagatggagtttcacgcttgttgcccacccaggctggagcgcaatggcgcaatcttggctcactgcaacctctgcctcccgggttcaagcaattctcctgcctcagcctcccaagtagcagggattacaagcatgcaccgccactccaatctaattttgtatttttagtggagatggggtttctccgtgttggtcaggctggtctcaaattcccaacctcaggtgatctgcccacctcggcctcccaaagtgctgcgattacaggtgtgagccaccgcacccggccaggccttgtttatttttaaagccattatttggaaatgatcttcagaatctacagtgtacgggttctacagcagctgctttcccatccatgatttcattaatcctcccagtatatggcaactaagatttctgttatgctgtatggtattttagttacaaagacgtacatgactcaaactatgaatgataaatatcaaacttggttcatgtcagaacctagtgttgagggaggggcacatagaagacttcaactgaattgttttctttctgaagctgggtggtgagtgcacaggtannnnnnnnnnnnnnnnnnnnnnnnnnnnnnnnnnnnnnnnnnnnnnnnnnnnnnnnnnnnnnnnnnnnnnnnnnnnnnnnnnnnnnnnnnnnnnnnnnnnnnnnnnnnnnnnnnnnnnnnnnnnnnnnnnnnnnnnnnnnnnnnnnnnnnnnnnnnnnnnnnnnnnnnnnnnnnnnnnnnnnnnnnnnnnnnnnnnnnnnnnnnnnnnnnnnnnnnnnnnnnnnnnnnnnnnnnnnnnnnnnnnnnnnnnnnnnnnnnnnnnnnnnnnnnnntcccaactactggggaggctgaggcaggagaatcacttgaacccaggagggagaggttgcactgaactgagatcatgccactgcactccagcctgggcaacagagcgagactccttctcaaaaaaaaaaaaaaaaaaaaaagtgtaaagagcaaaaattccttctttcccctaccctccagaaatagtcactgttggctttttggtggggatttagacagtgaatatatgtttatgtgtatgtttatatatatgttcttaaataaaattgagatcacattatacctatttgtaactggatgtccacttcctatgctcttccgtgtactttatgggctgtacagcatttcatgttgagtgcaccatacttatttaaccaattgccttttgatggacattatggctgccacccccattataaatgtgctgtaatgaacacctttttatatcactatgtgtgcctgttagcacttctgtctgatggagtaacagaagcaggattactgttacacatgtgagaattgaagtctatcacaaaaatgtcttgctacaaattagttctatcagtgctagacgtaagtgccctcctctagatactgcaccagttctgggtcttctaaatttatgacaggctgagtcaaaacagagtatctcacttttcttttctttcatttcatttcaatttaattttattatttgtcatcaatttgtgacagggtcttgctctgttgcccaggctggatggaatgcagtgacatgatgatggctcactgtagcctccaccttcaagcaatcctcctgccttagcctcccaagtagctaggaccacaggcacacaccacattgcctggctaattttttttttttttctgtggagatggggtcccactatgttgcccacgctggtcttgaactcctgggctcaagcagtcctcccatcttggcctcccaaactgctaggattactggtacaagccactgtgctcagcctcacttttaaaatatgcatttttttgtttctgagattgtttttctctgttagttatctgcatttcttctttccgtgaattacctattcccatcctttgtgcatttttgtatttttttctcattgatttatcaaggtctttatgatgctgcttcctaacattgtatatatactgcttcacaatttataaagcacttttcctatgtgtaataacactcgatccagttctgagttgcattttgtggtctcagaatagttagcctaacctgccttcagtcttcctgctagtgagaggagtctggactcccacccagatttccagatcctaaaatgaatgttccttttgctacactgcagtttgcaatttccatcttccaaatccaggagtattttgggaaggttttgtttttctgacgtctgttccacaagagcagagctcatgaatggccatgatttaattccccaagtctctgctggagccttcccagctgtcatgaggttgagtatggctttatcatcatgaaacaagtcatcagagtctttgaatcttgcgtaggaattggaagtcggggtataccaggataggttttcagcaccaggtgtggcactcaccctccggtatgcttggcagagtttgtgaagcggctccggtactgcgaatacctagggaagtatttctgtgactgctgccactcatatgcagagtcgtgcatccctgcccgaatcctgatgatgtgggacttcaagaagtactacgtcagcaatttctccaaacagctgctcgacagcatatggcaccagcccattttcaatttgctgagcatcggccaaagcctgtatgcgaaagccaaggagctggacagagtgaaggtgagccgcagccccaaccccatccctctcattggaagtgtcctgtggcaggaaatgcacatcacactagcttggggaacccacagatacatcctctaagaggcaaatggatcataaagcgagtgaagcggctgggcgcaggggctcacgcctgtaatcccagcactttgagaggccaaggtgggcggattgcctgaggtcaggagttcgagactagcctggccaacatggtgaaatcccatctctactagaaattaaaaaaaaaaaaattagtcaggtatagtagcacacgcctgtaatcccagctactcgagaggctgaggcaggagaatcgcttgaacccgggaggtggaggttgcagcaagccgagattgcactactgcactccagcctgggtgacagagcaagaccctgtctcaaaaaaaaaaaaaaaattagtgaagcttacactttggagcccctctcctgcacaggctctttccaaggccccacactgaatcttatacttagtattatgtttttcttgaagaaggccccaaagttctgtaagttttaggttctacaaaacctggatccatccagggcacactttgtggatcagcagactcagttgtgaaggcttgctgtataggcggtttgctttcaaggtttgttttatacaagtgcagcatttcaagcttagaaataacatttaaatttgacttgcacttttcccgtgtcatttattacatttaacttttccccgtgtttggtttctcccattaggaaattcaggagcagctcttccatatcaagaagctgttgaagacctgtaggtttgctaacaggtactattctcagctgggacaggctgccttccctccatacatctgctaatcctattagtgcctcctgcatctggctcccccattacacagggcttcttagcacagtgatgacctcatggctttccttgggaaatcatgccatctctttgaattactaagccaatagtgggatgcattagtctgttctcaagtagctaataaagtcataccagagattgggtaatttataaaggaaagaggtttaattgactcacagttttgcatagctggggaggcctcacaatcatggtagaaagtgaacaaggagcaaaagcacgtcttacatggtggcaggcaaagagagagcatttgcaggggaactctcctttataaagccatcagatcagccaggcacggtggctcacacctgtaatcccagtactttgggaggccgaggtgggtggatcacgaggtcaagagatcgagaccatcctggccaacatggtgaaactctgtctctactaaaattacaaaaattagctaggcgtggtgctgcatgcctgtagtcccagctacttgggaggctgaggcaggagaatcgcttgaacctgggaggcagaggttgcagtgaatcaagatcgcaccactgaactccagcctagagacagaacgagattccgtctcaaaaaaaaaaaaaaaaaatcaaatctcgtgagacttattcactaccatgagaacaacacaggaaagacgtgcctcatgattcaattacctcccaccaggctccttccatgacatgtgggaattatgggagctacagttcaagatgagatttgggtggggacacagcctaaccgtataatggagaatttaactcattaagaagaatggtttagttggaggatgaacaactctagccagtgacctttttattattattattgttatcattaaattgtggtaaatacatataaaatttaccatcttaaccatttttagaatacacttcagtggcattaaagtattaacatcgttatgcaatcatcaccaccatgcagcccccaaactcttttcatcttgcaaaactaaaactctgtatcatttaacaactccccattccctcttcctcttagcctaactcctggcagccactattctactttctgtctccatgattttgcccacacacatgccttatataagaggaatcttacagtatttgtctttttgtgactggcttgtttgacttagcataaagtcctcaaggttcattcatgttgtagcatgtgtcagaatttccttccttctttttttttgagacggagtctccttctgtcgcccaggctggagtgcagtggcgcgatctcggctcactgcaagctccgcctcccgggttcacgccattctcctgcctcagcctcccaagtagctgggactacaggcgcccgcaaccacatccggctaattttttgtgtgtttttagtagagacagggtttcatcatgttagccaggatggtctcgatctcctgacctcgtgatctgcccgcctcggcctcccaaagtgctgggattacaggcatgagccaccgcgcccagccagaatttccttccttcttaagtttgaataatatttcattgtatgtatatactacatttttttaatccatctattcatccgtggacactagggttgcttcccctccttggctattgtgaataaagtggatatgaccatgagtataccaggggccttttaaaaccccttatagggaggcatgtctaaccaagtggaaccatggtcttcaaaaattgtacttttggaagtttatcctaaggacataccgatggatataggtagagatttaaagtatagttttttttgttgtttttggttttgttttaagacagagtctagctctgtcacccagtttggcgtgcagtggtacagtcttggctcactgcagcctctgcctcccaggttcaagcgattctcgtgcctcaccctcccaagtaggtgggattacagacatgtgccatcacacctggctaatttttgttatttttagtagagacaaggtttcaccatgttggccaggctggtcttaaactcccgacctcaggtgatccgcctgcctcagcctcccaaagtgctggggttactagttttgtttttaaataagaaaaggcattaaaagtctattaagaggtattatgctctctccctgggtgatgggatcattgatactccaaacctcagtgtcctgcgatatacctgtgtaacaaacctgcacacatacccccaaatctaaaataaaagttgaaattattttaaaaatctaggtgttcgtaatagggcagtacttacattaataccatgtccgtagaatagaatactatacaaccagtaaagacttaggcatgaattcattgagagagagatttttaagtagaaaaagcataggttgctcaaggaagttaagattgtttattgtacttggtggaattatagagtttttaaataaatggtttagctttaaagcgttttttttcagtctctaatctttaatgatgatgtattgctttttaattaaattttgggggaaggagcatgtattctggagtcatttggttttgagcctttgcttcatggccttggcatggcattggtctcagggcctcggtttttgcatccacaacatagaacaatacctatacttcctaccttgtacaaaaaatcttgaatatccattctgggcttcagataaaaaaaattagtagatctgtattaagtccagggggatggtcagcaccaaccgatcactgctggactgagtgttagacacgtgtcgggggaccatgaggatacaaacggaggcagcatttagctcaggagtgagatagggtagaccgcaagcaaggattccaggagaaaaaggctgagcttgaagagtaaggtggagcaaagaagagggattggggattctccaggcagaggatgccgcaggagtgggcacctcaggctgggtgcagaattgaagagaatttggcattgtagcatgccaagtccagtgtaggccatggctgtcttggaagtgcagggaatagtgcttctactagccattgagagaattcaggtcgacacctgccgggtttggagaagatgaagttttgaatgccctagggaccatgaccactggcagttggctgcatgagccttaagctcagtgcctgactcgtgcatttggaagtcataggcttgccgagtgagtgagaattttcgcagctgagccaacagtccataaggctgatagacttgaaatgtagctggaagaaataaggtaggaattttgattacttggtaatcaaagggtactaggttcacattctttaagacctaaaaaactaatgctcagttttcttttgctcaatgtgtgcatgggcaggctgtaagagatacaggtctctgcttattcagctttttgaaatcagctttcatggaattttaacttcctggcttccaagcaaacttgcaacatgtagaatggtggcgagcatggttcactgttgttcttggagctatttattttttaaattgagttaaaaaaaaattaagtgtgagtgccaagagaaaacaactggccccattcttccctgtcctctgtgtgggtgggtttctgaattcctctttgtttcctctctggcagtgcattaaaggagttcgagcaggtgccgggacacttgactgatgagctccacctgttctcccttgaggacctggtcaggatcaagaaagggctgctggcacccttactcaaggacattctgaaagcttcccttgcacatgtggctggctgtgaggtgagggtgcacccagagcagattcgttcccgatgcaccagggcctgtgctgggtgttccgcacttgacttcatttaactctcacaaaccctgagggaagtgccggtgacctagttagagatgagaaaactgaggtcagagctgtgaagtaacagctgagatacccctgctggtaagtggcagagccgggatgcaagcctggaccaatggacttcatctgggtgcccagttctgctcagggcccactctgccctgatgcaccaagtatagtcatgtggaaccaggattcaatggaacaggaggctctgtgtctacacggattgaagaattgtagtgcagcaatgataaatgaaattagatcatttcagagtgcatgtttacaattaggaccttactctggtactttaaaactgctttgatatggaattggatgaatgtacatttttatcttttttttgattctgacccattcattgctgcaaaacacaacatccttttccttctagaggctggaatcatagacactgaaacactgatgtttataaagttctgtaatagtgaaaactcagcttatccatcaagagaaggttgtaactttttgatgtcttcttttacagctgtgtcaaggaaagggctttatttgtgaattttgccagaatacgactgtcatcttcccatttcagacagcaacatgtagaagatgttcaggtatttaataacttaataacataagcttaataataggttaactaattaaactaagtttagtaacttaagcacaaaattaacttaagctgaataatagcttaataatttaagcacagttatttaaagtacagtcatgctggtgtgtgcttgtatgctggattggagataatgaagttttgggcacagaaggaggagtatttgggtggggcagggataaaggataatgtcttctggtgcagggtttggatagaggagatggtccctttgttgcctgtgcccacctctctgtcttgtaattggatcattcatgcccagtggtgaagtctctggctgcttttgtgccacggaggcagagttgagtagctgttgtagagaccacatggccctcagggtctaaaacatttgctatctggctctttacagaaaaggttgccgacccttctgtggtattagtgcccgagagaatcccgtgttctgtaaactctgtttaatgggagagatcctggtaatgaactctgccttcacccttgataggggcatatcctcctctcaggccactccagtgttgtctccccaaccctttaggcagtgttgcaggactggctccccagcaaagagactctggggcagagacttgcctacaaaaagtttcatgttcttcaacttaatacctgtaggggtgtgcaggcagcaagactgggagagggagaagttgaactgtggtggggttgcagtggagccctcagctcatctcacggggagctctggagtttggtggcctttcagcattgttccaaactggggacaaattggggccggcctactcactatatagtgatcagtcattgaatgcaggctggtgccaggaaggggacaaagcagctttctcgatgtagggccatatctagagaaacaatgtggcttcccaagagttatcagccaccacctctcttggcagctggggaaacgcctgcctcagtgcttgagcagatccagggggcactgcagtgtccgttacatcaggctctctgagcctcctgttcatgacctgttggaagagtccaacaggtctgctgaaatgtgacctgctgaaacgtgcgtttcagcctggctggtttctttttagaagactctgggctctggattcagacccctctccctccctaggatggagacgaatgtctgcagaaatgtgagaaaacaagatagaccgtttgctaacggctctcttccttgcttgcagcgtgcagggcttgctttcacaaacagtgcttccagtcctccgagtgcccccggtgtgcgaggatcacagcgaggagaaaacttctggaaagtgtggcctctgcagcaacatgatgcccctgagtactgtgaaaaagactgttcaacatgccttatgataacaccgatttgtgtctattattggtgacattgttttagatattgggtattgtatattaaggaaaaagatggtctatattctctttattgcatatacttaatgtttcaaaagaatgcagattctgtgtttaagcacagggctgatagttgtggttttgtttacaaatgttctgttttggctgctattggttttttaaagaggttttttatacttttgtatttgaatagttatgtttcactgatgctgagccagtttgtatgtgtgtgcatatatgtgaactgtaactgacaagatgaattactcagtttctctttctctaaagcttgtttgatgaaactggttggtcctttcagtgaacaaaaatatgaccccaaatctgtttgctctggcttttatttcttcaggaagcagacttccacttaaatgccattttgtgattgtgtcaatcatacacattttatttacttcagagtttgaatagagagtacacatttcttctgcagatttatttcatgatgagtttgagttgcttagcagggcgtgtgggtcccgttgaagtgcagtttgaagcaactgcttctagatggcactctttcaggtggcacaaattgaacctgtatttgtcatctctgttccacacactgcaatgtcaagggatgcagaagtgagtagaattccatccctgcccttgaggatcttgctttaacagatgtaaaactgaacataaggtatttgcagatttaaacgaactgggggaaataatgaacagtgtgactctagtaataacattaaaatcatagacattgactaataaggttaaatgaatcacaaaacctttatgaatttcttttttctaatagttcttatatgttttcctgaaacatgtgagcctattcttttttcttctactttctatatactttctcccacttgagaaaggggccttgaggctgggtcccttcatggtatacctttagactgaacggtttgcaacctagggcttgggcattacattccctgggattcacatgccctaactaaacctaccttgattttctcagacagcacaggcaggcaataaagcgtcacagattgtcccctaaccccatccagccatgtgtatgggtgtgttttattcaatgggatagtactgagcacatgaaagaaatgaatgacttctgtcaatctcttttcattcagtcttctcattctgtcaattgttttctcatccgcagtgcctctgccagaactgtgctcacatccattatttaagccagatcttttctaagtattatagaagtgtagaggcacatagaataaataaaaccagacttcaaacaatgtttcattcttgcccattgctcctattccctgttaagaatcaagggtaagagtggtatgttcacattcctttctgaggcagatgtctatatctccatttacaggcaaggaaactgaggcctagagaagagaaataactttcctaggttcccacaggaagtgcatgatggagctggggttgacattcaagtccacctgcctccaaagcccatgcttaggccctgcttcttttgtggtgtcttttcaagacaaaggagtaaaaacaaccttaactggtaagtgttgctccaacttgcagaagtggcattgggcagagtgttttctcacatcagtgttgatttaaggcagctgctatggctcaagcattgcttgaagggctctgtgctcagggtttgtatgtttgtaaggcactgatgagcctgtgtgtgttacatatctttgatattaaggaagagtgcacagcagttgccaggaagtgatgcttttgattttctattttgaggaagaatgaggtcatttaaataactgcagtatgggatttgtctgagactttgttcctctccaatgtgataatagaggcttcttcccaggaaggcacctgttagggaagtgatcttcagcccacatggagcaccccataaggaagtaattagttgtggcatatatagctgtttaatgggtcttcctgattgtgtgggttttctgttcaactcttccttggctgccggaaagaagatgaatgcttggtcagaccattacccactgtgaggcatcagttgcagtgctgtaaaggtcagtgattcattttctgcctctgcactcttcacatgggcaattccagtagtgtgtcatttacagtcatgattctcaactgcagggaggaagttacaccatctcaaggcagaggctataggatgaggaggagcaagccatcccaaagatgtctggtgtgttgacctgggtgagaattattggccacaacttcagattagatcccaaatatgccactttctacctacccatggtgacttggtgctctagtttggcttgtttgactcctgcaaacctcatggtgaaatttgatccccagtgttgaaggtaggcctaataagaggtgtttgggtcatgcgggtggatccctcaagaatagcttggtggcacctttgtggtgatgagtgagttctcactcttagttcccatgagagctggttgttatgaagcctggcacctccctgccctctctttgcctcctctgtttccatacaaggggagtctgcacacgcaggctccccttcccctccaccatgagtggaagcagccacaagtcctaaccagaagcagatattggtgcgatgcttgtacagcccgcagaaccataagccaaattaacctcttttctttataaatcacccagcctcaggtattcctttatagcaacacaaatagactcagacactggggaagccatttaaattatctaagcctctgtttgtaaaatgagggatatgactctctgcagttgagataaggattagaaatgaaaatgaagcacccactaaaaggcctggtacaagcaagggcaaatggtaataatgaggtctagacagattacaaactgagtcataccccttattttctgtatctctgggtaagttactccctgggtctcagtttataatctgtaatacaaggattagaacaatagctactgttgtgggttgaattgtgtcccatgaaagaatatgttaaaggtctatgctggtgtctgtgctgtggccttttgggaagtagggtctttgcagaggtggttaagttaggatgaggacatagtgcattaggatgagttttgatctagtgactggtgtccttataagaaaagggaaattgagagaagagagaagatgcagggaagaaaaaaagcagaggttggggtgatgcatctacaagccaaggagcaccaagaattgctggcagcccccagaagccggagagaggcagggggcagattcttcctcagagccttaaaaaaaaaacccaacatggctgaccccttgatttcaaacttctgacattgagaattatgagagaataaattcctggggtttttttgttttgttttgtttttgtttttgtttttgtttttttgaaatggagtcttgctctgtcacccaggctgtagtgcagtggtgcgatctcagctcacttcaacctccgccacctgggttcaagtgattttcctgtctcaccctcccgagtagctgggatcgcaggcgcacaccaccaggcctggataatttttgtatttttagtagagacgggttttcaccatgttggcaaggctggtctctaacccctgacctcaggtgatctgcctgcttcggcttccaaaagttctgggattacaggcctgagccactgcgcctgaccctgttgttttaaaccacccagagtgtggtcatttgtctgagacttcggaattcaaacctgctggaaggaacgtggtagacatgtcaggaaggggtttgacattcagtttctgcccccaggtctgagcctgcatggctggcttagccaccgtcagatgctacctgcaggaagccttcctgaactcatcgccaaaggagggtgaagtgtgtcatttttagaagcatgcttccttaaaacaagcatttaaggatctctgtctttaaataatttctcaactggtatgggaaggaaaaccatagttcccctttttcacttcactagaaactaaaacaatacttttatgagtaatgctgaggtagcaggctgcagacacaattgggaagcttcagcacaaacatgagaaatcgagaacctttgcatcctcgcatatctgggcagctctccaagccaaggggactgaggattgaagagcttaaccacataggttaagcaaattgtatatttttccttgcacttttttttttttttttgagacagggtctcgctctgtcgcccaggctggagtgcagttggcgtgatctcagttcactgcagcctctgcttcccggttcaagcgattttcctgcctcagcttccctagtagctgggaccacaggcatgtgccaccatgcccagctaatttttttctgtttttggtagagacggggtttcgccatgttggccaggctggtctcagaagtgatctacccgcctcggcctcccaaagtgcttggattacaggtgtgagccaccgcgcccagcccttccttgaacattttctggcctctgcttgtgcttccaggcttctttctccccagggctgccccctcttttctagtcctgccgtgttcctgcctccatggtcttgttcttcttgcatcccttgcctgggatcaggactgccctttcatcctggaaagaggccctgctctggccttcctcgggctacgtacatccccattggtgaggagacaaagggcaagcgcacccaaagcccccacccctcctgttagatcaaatggagccccagacagaatcccctgccctgtggtctcaaccccacttttagggctgctcaggtctttcccctggtccagcctcctgaaagtgaactgcgctgctaagaccaagaggcagccaaggggcagctgcttgtaggatggagccaaagtgggaagagagaggggcaggggttggcccaatgctagctatacctgagccaccatgctccagagcagagcactgaggagtcaaagatttcaaaattcaaacctgctttctcgggtcctgatgaagggatattcaccatggtaggaggataaaacatatttcaaattttaaatacttggatatatggcatgtggacctgtatttgtactcttgcatgggctctgcagatgggagtggtgggcgcttcccctttccatctccctcccgatcttgcccattcttcagcgtactgcacgtgcacacacatgctcccttctccttacactctgatatctgcatttacctcattattctactggggacagctctctgaacttttggcagcctttgatcctttctatctgcccttgaaagtctcttggaagctatgagagagactttattctccctttgctcctgcagcccctgaaggtccacattcctgagggccctacccagctccctgagtgattgtttgaaatagaactactcaggagtgcggtgcctgcattggactttttacaagcaagaataaacctttattttgttcagttcctgagatttttgtggggctggttcctacagtgtaacccaccctactctgactaacataagatgtcctgatacctgttgtccaggggatgagtactgagggaacaggtttgtcactgtcgtagtctgtttaggctgctataataaaataccttacgctaggtggataataaacaacagaaacttactgctaacagttctggaggctaggaagtccaagatcaagacaacagcagatttgatgtctattgagggaccacttcctggttcatagatggcactatctcactgtatccttacatggtagaaaggagagagagcggaccaggcacggtggctcacacttgtaatcccagcactcccaaagttgagatatatgcctcaggctgagacaggcatatcacgaggtcaggagattgagaccatcctggccaacatggtgaaacccagtctttactaaaaatacaaaaattaggtgtggtcgcaagtgcctgtaatcccagctactcgggaggctgaggcagaagaatcgcttgaaccagggagttgaaggttgcggtgagctgagatcacgccactgtactccagcctgacaacagagtgagacttggtcccccctccccgcccccaaaaaaagaaaaaggaaaagagagagagagagaaccccctggggtctgttttacaagggcactaattccctttgtgagggcctcaccctcatgacctaatcaccacctaaaggctccacctcctaatactgtcacaattgggggttaggtcttcaacacatgacttttgaggagatataaatattcagtccataacagtcatgcagacatcaaaaactattctactcctctgagttatccatattatctagtattccttacattaaaaaataaaggaatatgcagagagaaaaaaattctttaacctcacattcctttccagttctacctctatgatcttattcacagcaacatttttgaaagaacagtttttaatgtttgccatcgcttccacacctctttcttcctttacctacaacaatagcatttccatctcaaccattctacccaaaccgtcaaggtcactagcaatatctaaattcagtagtcactgtattgtcttcacctacctctctaccacagttgcttgcattcttcttaacaaaagagaatactgttttataataaaatataataaaataaaaagtctagctaagaaaagctagactataatgaatttcatcatattgtggtggtgattatctctgtatagtgggattagaataattttcaaaaattttctttgtaaattttaccatatagactagatatcattttaaataaatgatagatcatttaaactaatgacaaattacagatgataaatgagatcagtactatacaacttttaagagtaatggttgcatttctactgtccatgcccacagtggagaaatcagattagctgttggggaccacctgaaactccatcttcgtagagtctgatgatggaggtgctgcctggtacccaaagctcctggttttcttggttatttagtaaattactaaagaccacgtgaacaaaaaagaacagggccggctgtcagatagaccagatggatggatgcaaccattcaccttcctcctggaagctttggaacccggaaacatcatgacatttgtgatttctccccttcctctgtagacagtggtctcttttcttggtctcctttgtaggttttcctcttctttctctgtccatctctaaataaagacaaagattccagggctcagttttgccatctcttttcttctcttgggatggtcttatccagtgaaatagctttgaatgactctaaatttgtagcttcagcccagaggctggtactcagcagcccactgatagctgtgcttgtattagtatttctttacaggcttttccatctcagaaaatggcaccaccatagacccagtcgcttaagccaaacacctaggagtcatcctttccctttccctcactccccagatccagtccatcagtaacttctgtcagctctacctacaaaatatatcttagttgatggctcaccacagccactgacattattacagtacaagccaccatctctctcctgaacttctattagattgaactacgtagcattgctgctattttataattgttgagctaccaagtggcaatttcatgtgtggttcaacctaattaaaaacctcctatctcctctttccacacttgcccctctatagtccattctccacacaacaccagaatgtttataaagcataaatcagatcgtctatctccctggattaaaccctctgaagacttaatttaaaattaagttgggtgggtgctggctcgtgtctgtaatcccagcactttgggaggccaatgcaggaggatgacttgagcccaggagtttgtgaccagcctgtgcaacatagcgagaccctgtctcttaaaaaaaaaaaaaaaacaacaacaacaacaacaacaacaacaaaaaaacacaaattagctgggcacaatggtgtgtgccagtattcccagctacccaggaggctgaggtgggaggatcgatcgagcccaggagtttgaggctgtagtgaggcatgatcccgccactgcattccagcctgggtgacagagtgagaccccatctcaaaaaaaaaaaagtccaaattctttacccaagtaggtttcctgttgggcttgacctgcaccacttcctgagctgttcctctcttccctccatcaggaacctctttaaaaattcctcttgcccttagtatacccccaaatcttcccccactttcctttggggtacagtgagtctaagtgatccagaatttagagccagaagcacttggatcctttcacttctagtcctgtgatttgtgataagttgctcaaatttcttaagactccggtttcctatttgtaaaatgctgataatctgtctcacaaggttgtcgtacagattaaatgatataagttatgaaaagtatgtttagcatcttgtctatcactttgtgtataaaattcagtgttttttttccccctggcctccaagctcccctgcctacccttagtccatcccccttcctttctgaatcataacttctctataacctctttattcagccctggtataattcacacatctgaatcattatacctccctcctgctcgtctgaccctctgagtcttccataaaaataacatcaactttcctaagggaccctttcccattcaatcagttgtcgtggggaggaaagagtgattgttttggcccatgggcatcatgagaatgtagagtggaccgttaacagtcaggaaacctacatggaaagggtggcttagacactttcaagtgcagtgactttggacagctcatttaatctctgcgtcttggctcccttatctggaaagtggcacataacaccaaccttgcagggtgattgtgtgcatccaacaagataatggaagtgaaagtgcagtaatgtaaagcacaccgagatgtagcttagaacagttactctcttctggtgctagtgcttatgaaaacctaatgctggtggtttccaccttcagagcacatgtcagttgccattggatttcctcagagtcacctccctgtcaaccgtctttcactgtcagagtccagattggccacatttcggctgagcttcctggggccccgtctttggatgagagaattggtgtgggagtggcacagccctagtaggccagatttggcacataaaaattcaggcacctaattaaactgaacttgagatatatgagtaagtttttactgtatatatgtcctgtgtgatatttatatgtttcttccaaccctgaactctatagaaagctgggtggacacctttcctgcactatggccattcacggtggcctgtgagctaaagtgacattctgaccatgtcctgactagtcacagaacatgtgccaccctcttggctagtcattttactcagggagctgctcttggtggccatggccaactgaggatgctgatatatgtgcatctgcacaaagctctcctggtactggaaaactgaccacaattttcaggtctccatcgcccatcttctgcatctttactccttgggtgatctcatgtatccagcaattctcagttgaagacaatttaaaaatctatcactgagcatcagccttgctccggaagcacaggtgtgaacctgacccagtgtgtactctagagacccttgcagcctccgaagttgacagttttaaacagtcagaatcaccttctgattccagctcctcctcaggctctcacttggttctaaagcatgacctataaaaatgctccaataagtacatcttcctcacaccatgggggcaggagagtgggtcaggctgcataccacaaatgccaccaggccctcccattcccttgcagagtagtcctaggaccccctggagaagtctcccaaagatgcatgctagggaacactctccatatacacacacattacaaacacaaacacaaacgcatgcagaatttattgcctttttctggccaaacctgattccaattaggttaacttcctctgttaactacctcctctcctccccaacctgaagttgtgacatgttgtctctgctgtagcgtccagatggccaaagcatggggcagggctgaccctgatgccccatgccaggcccctgcccctagcccctgcagccatctgggtccgtgtggatccatgtgggatctcagtagctgcccccttccagttccccacagaggaggaaaaacgtcagaaaagggaagtggggttaagatggtgcagacgagttagtgggtgcagcgcaccagcatggcacatgtatacatatgtaactaacctgcacaatgtgcacatgtaccctaaaacctaaagtataataaaaaaagaaaagaaaaaaaaaagaaaaaaaaaaaaaaaaaaagatggtgcagtcagttacagcatatccactgacattccggctcccaaagttttgttgctgatgtctcttccttcatcctttctgttcttgtaagttcatgtctttagaataattccttaattgttgtttttgagcagtctttctaccattgctttagagggacttcagcagtatgcaaaagtaaacgtacgttcaggctgccatttttacaggaagctagagctcacagcctttttattttataattgtggttaagcttaaactcttaactgttgcgctgtgcctcacctctatgtttcactgtctcggaagtctttttttttttttttttttttgagacaaagtctcgctctgtggcccaggctggagtgcagtggcctgatctcggctcactgcagccttcacctcctgggttcaagcaattttcctgcctcagtctcctgagtagctgggactacaggcgtgcaccaccacgcctggctaattttgtatttttagtagagatggtgtttcaccatgttggccaggatggtcttgatcgcctgacctcatgatccgcccacctcagccttccaaagtgctgggattacaggcgtgagccaccgcgccctgcccagaagcagttttaacaggggactaactatgtttgtgcctttagaaagttaactgtggtgatggcatggaagatggagatagaattgtggtagggaagctgttctgaggctagtattgacaaaactctgttacaagaaggagca

SEQ ID NO: 521 - DNA, 3462 bp, Homo sapiens
ctttctgctgttaccgggagcgcggtggccacggaacgctgcccggagccgcgcgagggaggacccgacgcgcggcgtttacccagcgcagcgttccaccgctcgggtttggctggaatagctctccagacccccagctggccatgtggtgagttcagggcccaaatcaagtagtaccagcaatcagggaactcctatctgttttgaatggattcacaccagccacaagcctggaaagatggtgtcacaatctacagtcaggcaggattctcctgtggagccctgggaagggatcagcgatcactctggcattattgatggttcgcccagactcctgaacactgaccatcctccttgccaattagacatcaggctcatgaggcacaaagctgtctggattaacccccaggatgtgcagcaacagccgcaggacttgcaatctcaggtgccagcagcagggaacagtgggacccattttgtgacagatgctgcctctccctcaggcccttcaccttcgtgcctcggggactccctggcagagacaacgttgtctgaggataccacagactccgttggcagcgcttctccccatggctcgagtgaaaagagtagcagcttctctctgtcctcaacagaggtacacatggtccgcccaggatactctcatcgggtgtctctgcccacaagccctaggattttggccacctccccatatcctgagactgacagtgctttttttgagccttcccatctgacatctgctgctgatgaaggtgctgttcaagtcagtagaagaaccatttcttcgaattccttctcaccagaggtatttgtgctgcctgttgatgtagaaaaggaaaatgcccacttttatgttgcagatatgattatatcagcaatggagaaaatgaagtgtaacattctgagtcaacagcagacagagagctggagtaaagaagtcagtgggttacttgggagtgatcagcctgactctgaaatgacttttgataccaacataaagcaagagtctgggtcttctacttcttcatacagtggctatgaaggcaagttgtgctgtgttacaggtcagcccagtgactgaaacacgtacttaccatgatgtgaaagagatttgcaaatgcgatgttgatgaatttgttattttagagcttggagattttaatgatatcacagaaacctgtagctgttcctgcagctcctctaagagtgtcacttatgagccagacttcaattctgcagaactattagccaaagagctgtaccgcgtgttccagaagtgctggatactgtcagtagttaattctcagctggcaggttccctgagtgcagctggctcgatagtcgtaaatgaagagtgtgtccgaaaagactttgaatccagtatgaatgtagtacaggaaattaaatttaagtctaggatcagagggactgaagactgggctcctcctagatttcaaatcatatttaatattcatccaccactcaagagggaccttgtggtggcagcccagaattttttctgtgccggctgtggaactccagtagagcctaagtttgtgaagcggctccggtactgcgaatacctagggaagtatttctgtgactgctgccactcatatgcagagtcgtgcatccctgcccgaatcctgatgatgtgggacttcaagaagtactacgtcagcaatttctccaaacagctgctcgacagcatatggcaccagcccattttcaatttgctgagcatcggccaaagcctgtatgcgaaagccaaggagctggacagagtgaaggaaattcaggagcagctcttccatatcaagaagctgttgaagacctgtaggtttgctaacagctgtgtcaaggaaagggctttatttgtgaattttgccagaatacgactgtcatcttcccatttcagacagcaacatgtagaagatgttcagcgtgcagggcttgctttcacaaacagtgcttccagtcctccgagtgcccccggtgtgcgaggatcacagcgaggagaaaacttctggaaagtgtggcctctgcagcaacatgatgcccctgagtactgtgaaaaagactgttcaacatgccttatgataacaccgatttgtgtctattattggtgacattgttttagatattgggtattgtatattaaggaaaaagatggtctatattctctttattgcatatacttaatgtttcaaaagaatgcagattctgtgtttaagcacagggctgatagttgtggttttgtttacaaatgttctgttttggctgctattggttttttaaagaggttttttatacttttgtatttgaatagttatgtttcactgatgctgagccagtttgtatgtgtgtgcatatatgtgaactgtaactgacaagatgaattactcagtttctctttctctaaagcttgtttgatgaaactggttggtcctttcagtgaacaaaaatatgaccccaaatctgtttgctctggcttttatttcttcaggaagcagacttccacttaaatgccattttgtgattgtgtcaatcatacacattttatttacttcagagtttgaatagagagtacacatttcttctgcagatttatttcatgatgagtttgagttgcttagcagggcgtgtgggtcccgttgaagtgcagtttgaagcaactgcttctagatggcactctttcaggtggcacaaattgaacctgtatttgtcatctctgttccacacactgcaatgtcaagggatgcagaagtgagtagaattccatccctgcccttgaggatcttgctttaacagatgtaaaactgaacataaggtatttgcagatttaaacgaactgggggaaataatgaacagtgtgactctagtaataacattaaaatcatagacattgactaataaggttaaatgaatcacaaaacctttatgaatttcttttttctaatagttcttatatgttttcctgaaacatgtgagcctattcttttttcttctactttctatatactttctcccacttgagaaaggggccttgaggctgggtcccttcatggtatacctttagactgaacggtttgcaacctagggcttgggcattacattccctgggattcacatgccctaactaaacctaccttgattttctcagacagcacaggcaggcaataaagcgtcacagattgtcccctaaccccatccagccatgtgtatgggtgtgttttattcaatgggatagtactgagcacatgaaagaaatgaatgacttctgtcaatctcttttcattcagtcttctcattctgtcaattgttttctcatccgcagtgcctctgccagaactgtgctcacatccattatttaagccagatcttttctaagtattatagaagtgtagaggcacatagaataaataaaaccagacttcaaac

SEQ ID NO: 522 - protein, 263 aa, Homo sapiens
DHSGIIDGSPRLLNTDHPPCQLDIRLMRHKAVWINPQDVQQQPQDLQSQVPAAGNSGTHFVTDADSGPSPSCLGDSLAETTLSEDTTDSVGSDHGSSEKSSSFSLSSTEVHMVRPGYSHRVSLPTSPRILATSPYPETDSAFFEPSHLTSAADEGAVQVSRRTISSNSFSPEVFVLPVDVEKENAHFYVADMIISAMEKMKCNILSQQQTESWSKEVSGLLGSDQPDSEMTFDTNIKQESGSSTSSYSGYEGKLCCVTGQPSD

SEQ ID NO: 523 - DNA, 33126 bp, Mus musculus
  misc_feature (1)...(33126): n = A,T,C or G
tgcctagttttcattgtaattatatggtcatccttgaagttttctctatggcggtggtggtggtggtggggggggggtggagattctgaaacaggatgtttcagnnnnnnnnnnnnnnnnnnnnnnnnnnnnnnnnnnnnnnnnnnnnnnnnnnnnnnnnnnnnnnnnnnnnnnnnnnnnnnnnnnnnnnnnnnnnnnnnnnnnnnnnnnnnnnnnnnnnnnnnnnnnnnnnnnnnnnnnnnnnnnnnnnnnnnnnnnnnnnnnnnnnnnnnnnnnnnnnnnnnnnnnnnnnnnnnnnnnnnnnnnnnnnnnnnnnnnnnnnnnnnnnnnnnnnnnnnnnnnnnnnnnnnnnnnnnnnnnnnnnnnnnnnnnnnnnnnnnnnnnnnnnnnnnnnnnnnnnnnnnnnnnnnnnnnnnnnnnnnnnnnnnnnnnnnnnnnnnnnnnnnnnnnnnnctgcattcttctctcatctctccacacaaaagtgctactggcccggtcgccaggttcctgtgtgtccatctaatgatttctacttgtgtgagtgcctgggtcaggaatgtgcgtggcaatgatttattcactcacgacatagttaaggttaccatcgctgtggtgacacaccatggggagcagaggggtttttggctttcgcttccacatccatagtccatcactgaagtcagggcaggaactcaaacagggcaggaacctagaggcaggagctgaagcagaggccatggagggggctgtttattaactcacttatcatggcttcctcatcccgcttttttataaaattcaagttctcctgctcaggaatggtaccacctacaatgggcagggccatccccagcaaacactaattaagaaaatatcttacagctggatcttatggaagaatttatttcctcaagtttcccctctttcagatagctctagcttcatgtcaagctgacagaaaactagccagggatatgcaacaaatgaaaatttagtatttatcatgggccagacagggtataaaaatactacacacacacacacacacacacacacacacacacacacacacacgaccgagtctgattgcaaatcatatgccacctcatttctgccacttgagaaatttatttttccctctggaacaataagatgctactccagaatagcacccctagtaggtttaaggtcacatctgttttcttttcaggagttttatttgtgacagaaccattaagaaacccttcaactgtagtcaagtggggtaggtgaaattctgaaggggctgtagttgtaggtgtgtacagttgtagttgtgtacaggtgtgcagttatgggtacggtgaggtggggacagctagagagagcagaaaagttggacagatactgtgttggggcaactcctggagacagtactcttttcttttggtttcccagagagtagcagcagaaagttatagagtccacctctgggcatcatctggcttgaaggccacccaagaagtgctgtgtactgttttggtagtgtacgactattatatcagcatggaggaggctgagacagagggcatgaggttgaggccagcctcgcatagcaagacactgtcaaaagggggcagggctggagatagccagaggacctgggttcaattcccatcacccacatggcaactcacaactgcctgtaatccagttccaagtgatgtgacactctcacacagacgcccacgcaggtggatccacatggtgagtaagacccatcagtaaaaaggaaacacacagcaacatgggtaagtctcaacataattatagaagagtgcacgtgattggttccacttatataactaattgaaggtgacaaagtgatgcagggttgcaggggtggcggggggatcacagtagggcaggaaataaaacctgtgtgtatctatgttcaatatcttgtgagtgtatgctaacatttttaaccctctaaatttgggtagctaactgcatgtgaactgtactgagacaaatacaaaaatagccacagtgatgcctttttctgtctttaaaagttctcttgtggtgtgcacagtgacgcatgcctgtgaccccagcacttgggaggtggtatgaggtggagaaatatgagttcaaaaccagtctggacagagagcaagatctgggcttaaaaacaactgactagggctgtggggagctcagtgacagatgcctgccatgcacaaggccctggatttgatacccagcactatggaaaggacactaccgcccccttaaaaccaacaaacactagcagaggctctcttaccttctctgccgtgctcagccatcctaaggcagcgccttgacctctggagtactctacttaacttcattgcttgtttgttatacatcactggtgagccctgccagagagcagatatggtgttgggagttagggaggcaatgagccacccagggtcacggggaggatgcacccagggagtgaactgatgtggagctgagcactgactccagtaactgggtcacatggacaggactagttttgcacttgtaaaatacaggtcctaatactaacttcatgaatttgtcaccagggcccaagaagagaaatgtcaagagtctgtctgataagtatcaagggctagtattgtttctaaagactgtttggggacaccagcttggcattccggaaatcttcgggcttctctggaattttataaggataattagagaaatgtcgtctgcggctggaagatggtgatttgtgagtctgtggtgaagggtgtgtgcttactgttggaagggaaacagaaaggcgctgaaggtcctcatagtgtggaaaagtaacggcacagtccctcttgtttccaagagtgtattttacacccagtcaagtgcacactaactctaagtataatggctttattgttgttgttgtataccgtaagtattaaacacacaaatggagacacagaacatttcctcgaagttcccttggtcccccttttactgcaatgtgctacccctataggtctgcctcagatctccactgattctttttgtccgtatttgaacttagattcatgcagatggagtcatactgtgtacagtcttgtcagcattcctgctcctgctgtgacaagtgaccacacaaatacgtatcttgcagctttttgtgttagaagcccagcaaggaactaggtatggcaatgcagtcctgaaatcccagcactcaggaggcaggagagggaagactgtgaacccggggtagcctaagctactgcactacaaagctaaacaaaagcataaaagaaatccatcaaaggttttgctgggctggagtcaatcgatgtgctggtaaagctgcattcttctctagatccctaacagggaaactgtctttttgtcttttctaacttgggacacatcccccctccactaacctccccccgccccccccaacaccttgacaatacttggcccacaactccttctccagtcttcaaaattagcagcaacacaccccttattcctatcctccccatccacagcctccccctgcccctggcagtggccaggaaacattctctgctattagagattcatgttatcagactgggccctgtctggcttcaatatgctgtttcctcgtagacttgtatattgtgaccctgtcctaggaagggacaaatgtagttctctggtgactcaggttacttctcaagatgaattattatgaaaataataataataaacaagccaaaaaaacccaccctgcattttactgagtttttgtctctcagtgttctcgctcttaaataagttcgtaccgcaacgctgtctgcatggtgtgatatagcaaggactcttgccagagctggaagctgtaaggctggccagtggtgggcttctggcttccaaagccgtgagctgaatacctgccttttgcttgtaatgtacttagagccaggtattctgttacagccacagaaaatgaatcaatgcaggctgtcttagttagggtttctaggactttgaagagacaccgtggagactcttataacggaaaacatttaactggggctagctttatactttcagaggtttagtccattatcatcatgtcaggaggcatggcagcatccaggaagctatgatgctggaaaagaagctaagagttctacatcaggatcacaggcagcagaaacagactgaaaaaacacagtaggtctggcttgagctcctgggaacctcaaagcctgtgacacacttcctccaacaaagctgcacctactccatcaaggccacgcctcctaatagtgccactccctgtgagcctgtggaggccattttctttcaaaccagcacacaggctcgctcagatgatccacagttatctcccatggcgagagcttcagcctctgtcgtaggtgctccttcgctagctttgtacgcccactcagggtgatggggtacagacctttgaggggcacgagtgatgctcctcagcctcgtccaccttgttgtgatgtcccacgagtcgtattgcacgtttttacattcatgcctttgaaggatgttcaggctgttagcaactggggccattacacataagaacttactcttaccttgtatttcattgcatttgtaggggaattgctaacccatgagaagatggcaggctagactttatgtgctcacggggggtcactaacatctctttctttgtgaggcatatcttcaagtgtctcgtctgttacatttttgtcgggttgtcattgtcttatgaatttgtagacggtcattctatgctttaaaaacaaactatttgtcatacacatgcattgcacatgtatgtggatatgggtagggttcttcctgcttacatttttttttcttttttgcgatatgtctttggtcagcaaccatttttaattttatgaggtctgatctcttaattttaaaaaaacaaagttccttccaggtacagtagcacagagtgcaaccccagcacttcgagagtggaagaagaggctggaggattcccagccatcttggactgcaaagggagagcccgtttaggtcgagacagctggagaaacagctcagtggtagagtacttgcctagcattcatgagagcctaggtttgatcctcggtaccgaataaatgaagaggaaaagttgcttttgcaccatgtctgaaatcactgagtcataaggatattctcccgtttctgaccgaaagcagcttagctttagctcatccgctatcggtctgtattctatttccaatcagtttttttggatctggtttgtggtagacagctatgccagatttctttgtcaaaaggacttttctcacggtattgttacttcttagaagtcactttatcaaacatgtttgtatccatttggggagtctatcctgttctagtgggtcatttgcttagtcttttattttgaaacagagtatcactagtttcaaagccaatacccaagctggccttgaactggtaatcttcctgcctcagcatcccgcacaacaatcctttgccaaattaatctttcttttgctttgtggtgggaagtgtgcaagcagtctgttgttaagctgcatcttaaaccagctttcttcatcacagctttataccaagtcttgactctgtatcatctctaatatgtctctcattaatggaggtccatttggggtttataccactgggttgggttaagttgtgtcacactctcagatttgctcaagtacctctggatgtgacctacttggagatagcatctttggagacgagatggagatagggtaaggccatccaaagttacagctagtttaatccgtgtcaggtagtagttgctacccttaaaagagaagagatccaagcagacatacaggggatatcacatggcaaccagaagatcagggtgacacactgaccagcttgaggcactgaggatgaccggcacatccccaggaaccaagcagaggcctggggcagatcctccctgcatacgttccgaggaagctggtccaggcagcatgcgatcccaggtttccagtctccagagctccgggagagaatgcacatctgttgttctaacttccctagcagctcagctatggacagatgctgaaacatgactcaagctaggctagggaagaagaagaagagtctgtctcttagagttacaggaccagaactgccaagcctgttatttatttgttacaggaggcattcaggctaaagctgaattgtaaagatcagaacatacccttcccctataggagtgtacacaagatggtgatctcactctacttatttatttttggtagttttgaggctcgaatccagaatcccacatgctcagcacatgctcggcacatgcttggcacatgctcagcacatgcttggcacatgctcggcacatgcttggcacatgctcggcacatgcttggcacatgtttagcacatgcttagcagatgcttgtccactgagctacatcttcaggccctgacggcttattttatttttcccctgtagatgtcagttaccgatagggttggttaacatagctgcttcatgacatcagagacccaagacacttctatgtttctgctgccattctaggaaagtgatctctacctcatggctaaaatccagcttcaaggctgcctgtcatcctgtaggagaaagccaagtgagggagacttactcaggaagccacataggagagctctgtctgctgcccaaaatttagtcatatcaccaattttaactcaagatagactggaaatatactgtttcgggaatgcatgagtctacttgtttgtttacagattcaactagaagcatcttccatagagtgtttgtggagaaatatcaagcgcagaagtcctatgggtaattgcaggtaagacatttaaggggaggaatatttgttctgaaagtaaaaaaaaaaaaaaaaaaattaaagtgaatgaatttcagttatacatttccaggaggaaggtgagatggctgagagaaagtaaagtcctggaagaaaggatccaggagggtgctggtgagatggctcagtggataagagcatcgactgcccttatcctctcctgagttcaaatccccagtaaccatatggtggcttacaaccacctgtaatgagacctgataccnnnnnnnnnnnnnnnnnnnnctttaaaaaaaaaagaaaaaaagaaaagaaaagaaaaaagaaagggtccaggagaggcaggaggttagccatgataacctggaggattcagaaagatgagacccttaggtgatgctctggacaagtttcatgaaaagagtggccagcagtgtgcagagaagaggtggctatggtctgactatgtcagaccttggggtggcctgaacattacaatctcattgcaagtttgatcctgtcaaacagcggggcctttgtgaactggctgtcaccagaatagagctctcccagatggaagtaagggttaccaaagggcttgaagggggcgccgtttgctctttccttcctttcgccctgtgagcaatcagcaagccctcaccagacagcactgggtgggagtcttgatcttgggccgcctggccttcggaacagtggggaagaaatctccgtgattcacaaattacctagcctgtgatattttattatatgatagcaaagcatatctacgggagagaccggttaaaataaagatcgggtctttacagcactagaagtcctgactttcctgttggaaattaaaggagacatcaagtctttttcttgaggccattgcagccagagactgaatgactgaatgagcttttgaaacctggaagttaggtaagtctcagtgaggagatgaaggatacagctccccgtgcctcctgagggacgggttgcacctgaacactgaggtcattgactatctctgtcaccactgtcaggtggggggggggggcataaaaggccctaggatatggagcccagccagaaggctctggagaacaagggtttaaacctttacctggttctagggaagaaatcaacacatgtgcagcactgagtgaggcctttgcactgagatgtgtgtaaggatgggctgggggcaacccaatttcacaccaggtgaactgtggacaaatgaattgtgttccacgcactaactgaacaggtaattggcatcttttttttttttttttttttttttggctgctcctcccagattggttgctgctgttggcttatctgctctggggctcagtgccacccttgactgcttagttcttcttcaccctagggaggcagggtgtggctaacttcaaagtggtgctgaaaagagacaggcctgccttctattaaaccactaaggggtaggcaagccccttagctgctctattccagttttcacacctgccgaccactggcaatgattatattattcaggggtggctgtcaggagtgacctggtgcatgccacattctgacacctaggaaggctggagtcactggggaaagatgtcctcacataacaccatccaaagattctgtgatgatggccgttgatcacttgaaagtgtctagtatagctaaggaagtgtctggtgtagttaagaaagtgtctggtgtctggactgaaaactttcactttattcaattttgattgttttacatttatttatgaaagtttatttatttattttcttttgcaggtctgaggatgagccttcagactcagggctcacccatgctaggcaagcactttattgctaaatcatattcccaggccccagctagccccttactttacattaatttagtggtgtgtgtgtgtgtgtgtgtgtgtgtgtatgtgtgtgtgtggtgtgtgtgtggtatgtgtgtgtgtagcatgtgcatatatgcacacaaggcgtatgttgtgccggacaagatcagaggtcaaccgcaaatgtgatcgattccctgggcactgcccacctccatttttaagatacagcttttcattgacttggagttctcactttgggattggctggggagtcccagggatttgccagcctttgcctctcagggctgggattataagtggtgtccatctagtttggattttttaatgtggattttggggcttgaacttggatcttcatgcgtgcacagtaaactctttacagacaggattgtactatgtagggttttttttcttttcttttcatgcagtagtcctcaaatctccactctcttgcctagacccccttctaccatcctccttagggctgggactataggcgcaggccaccagcaggcctcttattttacgtttaataactacctggggcaaagggctgttggtcacctgaggcaggaattctactgggctgtgctaaggatggacgctcaatcatacggaccctataccagaatgcatctgtccatgtggtactctgcgctcaaagatcatctcaattgaagactgcattcacctcaacccactgccctcagctgtccactctgtccacgcacaaccttataaattccttgagaaaagtcagatggaggactggttcttcgcagaggctactgaggcccttggctcctttatttttgcagcaaacaaggaggctttctgcatgtgcagttccatttcatagatgaggctcaaggaggctcagccagaaggcgggaaacagggtaaactcttggagaactctgatgcccgcaaagacacttccttgggtcgggttgtcagggtggtagagaaagcggcgggtaaatatttggggcggtatcctggactccggcgacacccgtcactgcggttcttcagaggccagcgcgtggctagggcggtgccgggagtagggggtggagggacaggggcgtcccctaggtcgtctgggacttactcagcagccccgccccgccccgcccctgccggtggctataagacggagtagccggcgggtggcgcggcgcaggcgagtagctagcgctcaggctcggcaaggagcaaggcagaggcaccggagcagactgcagtgcaggcggcagccaccagggccaacacctcgcagcatctctgctacgcgtgtcactgagcaacttctccatgaagccgccctcggcgcagagcagtcccgcggcggtcgcggccgcaggtgagtgcctatttggaggtgtcttctccacctctgcgccccgggatcgaagccagggactgcgtccacgctaagctacactctcagctccggggcccctgagagctggagcctgcaagtaggggcgagagaacagaggtcgctaaggtcttcttccactgcccacccttctgtcctccatcaccctggcatcccgtctccggatcgctcgtccgatgcaggtttagtttggttttccacgcgggacaaggaaccggagtctgacacgtaacgggtgcctgctgactcagacttcccgccgccacgcgctccagggagcgagcgtgggcaacagtaggaaagcgcgtggggtgggctaggtgacttccagactttcagctcaacccacggaggcttcttctcctccgtgtctggtgacaggcgctttagagggtggttgggaggttacggagtaactgactgcgtggctgtcactggcaaaggcagagtggagttctagggaacgctggccgcccctccagatgccctctgtgccctccctcccctagccccggccatggactccgcggccgctgcagacctgaccgacgtgctgtgcgagttcgacgcggtgctggccgacttcgcgtcgcccttccacgagcgccacttccactatgaggagcacctagagcgcatgaagcggcgcagcagcgccagcgtcagcgacagcagcggcttcagcgactcggagagtaagtgaagccctgttgaagtcagtaatcctcagactcaggcttcctaaagctctagattcacctgggttatctttaaactgaggcacgacatctggggaaagtcagacccggggatctgcacggctctgagatgcctgaagagttgactttctgagtcgttagcccagatgtgcgggggtcattaaggcgttcttggggagagaggtacgagggtgggtgggtggctcttaaagagctgtgggtctacctgtcacggcaggtgtgtaccatgaggcctgagggtttgtgcagtcagccagaactcctgggagtccagccaggccttccaaccttttcccgcctttctacccactcttcgctcttcatttttttttttttattttattttattttgagactctcccaaggtgatctatgtagctgcgggtgacctcgaacctctctgatcctctttcctcgggcttcagggtgctggggtgacagtgcaatgccaccacatttaggcacatcagtttataggcaatgctgggggtcagacctagggcttcttgcacgctaggcaaacactagaccaacagcaccctccctttccttttccagaatgggtgttggggaacatgaggacacgagtgagcacaagaatgaaacatttgtgaaaccaaaatggtttcataagctgctgtttttggaatgcttgaaataacttcgttcactttctgcctagctcccaggctctttcgccactccaggcacttttgaaacagtctcccgctgggctgctgagttcaagtacagggtttcaggcacgcccaccctccaggttacccacagaaggtcatcctagtaaccttttccacattgcctctggagagggagagagagagggagagggagagggagagggagactatgaagaggtcctgctgaggcaggaatgaagtcttctcttctttaagctccttcctgctgaccttggggcaatggttttgtctttgaggaacctaagaagattgggatggggatgctggtcaagaactgagtgagctggctctttcattgctgtcctgggtctgtggaaccatctactggtaggaaagagctggtccagtagaagcatctgtgagagtagaccagagctgtcctggatataggctggagtaaacacctggacttggcaagatgctgaaacacacacacacacacacacacacacacacacacacacacacacacacattagaggcagttaagtagactttagagaaaaatttttctggtgtacgtttgaaacccttacgtctttgtggttggggggaggggagttcccaaaccagggaatgggggaggaatcccaccctctggaatagcgccgcaaatgggtggcagggattgttattnnnnnnnnnnnnnnnnnnnnttagttttcagtaactcaagtgacctgcaagaacagtgaatttggtgaccttttatttattattatataattgttttcaaatcttggcttattcactgtttttcaatgtgaactttaaattctgtttgttcttgtgcccttagtccctagatacaggctcagacatcaccaattgtgctgtccccaactctgggagtaaaagtcacattgctgttttgaaatctagaaacattttcctttgttactgggtgaagattctgagcctgagctgtcctgagaagggatgatgtttgacatcctggtcaggatttgaatctgaaacccaagctctggtttgattttccttagccacctacacagatcaccacgtgacttagggggcgaagggggagggaagagggctggtgagctgttcatttccatttagaacttttgcgtcttgatgccaatgacctggtcacttgttctcagcagtcaagtgaagtctgacgctggaaatttgtctccacagctgtggtgtaacttgaatatatttctttccactgggtcaaggaacaaatttttcattgtgtataaattctcttcttcacagaagagaaggctaggtctgtccccgatgctctgtaatcaagttcagctccttgctaagccccagcctcagtctagattagagtctgaatttgtgcagtgatgtcgaacagcacccaccagttctgccaggaggggtttcagatccacggtatgtttttaggagtctcaaaaagagaattcaccacagtttcttaacagttggagagaagattgacagaatttgcagttttcttaggcatatctctgtgcattttgctttctgcttttgttgtcaacttaagctttctttctgtggtggttggagagtaacagggaggatctaagaaagcacagatgaccttggtctttgccgtcaatgtggttttgttccctgcatgcttagaaatcgtcttggagggctggagagatggctcagcggttaagaaatcgtcttggtggattttgtgtgcatctaagtcatgctttcttaaggacacataatatgtctgtcttaattgtctccaggaatggagtgcagacattcctaatacttgtctgtctggtggaagtggatgtctgggagaggtgcagcccactgaaacttagctctcctgagagggccaatcaggcttatcatggtggtggtggcagctagcttacttttagcaagccctcactggggttgctatgattgtaacgtgatagctcttgttatcagccatctctggctggtcttccaatgttatcacacaaaatctttaccacagtcctacaagttaggcacttttatcttcattagttttgctctggttgcctagcatgtgagccagaacttgagtagcccagcgttccctcaagctcagatcatgtatctttttgtacgtggtattgcaggtccttttcaaggctttcaggatcaaaggtctgtggacctaggtgatgaatattcctcctcatttttgaaaaatactaccccccccattaaaaaaaaacaaaaaacaaaagcaggttgcaggactggagtgatgactcagaggtaaaggacaggtattgctttccaaaaggaccagtctttggttctgaacacccatgttgacagctcacaactgcctggaactcgatctgacacctttggcctccaagggcaccattctcaaatgcacagacacacacattcacactggggataagtgaaagtggatttttaaaagggctgtgtctttcccatagcactctgttaggaacagttttaagagtctcagtaaaagagcaatgcagatgggagctagaaaagtggtcttcaggtttgagcccttggggtgctgtagaagttgaacatctttgggtttgtttgtttgtttatttatttatttatttaggttctttcaagccagggtcttactatgtagctctctctggctatcttggaactcactatataaaccaggctggccctcagactcaccaagatccaagtgatgggattaaagttgtgtgcctagcttttgttcagtatttttttttagctttaaaagtaatctttaagtgggtttaataaagttttcacccattctatcccaaattttatcccatgtatttattgtatgcttctactggttgacttcgtaaatggtttattatactgacttatgcctttaaagatgaggctgaggtgtgattcttatatattagggtttcacataagtcatcctgtgagaggacaagtgtgctgctgtttaataggaaaggtctgaggtctactgtccatgccgtagctatgataagattgtagatatttggggagaatagggactgggtgctttagcatagcaacacttagaacatctacttatgtttagaatatgctggtctggctctgagagaggagaccttaggaatcctagaaaccagaatgacagttaccaagccagtggctaatggagctgaggagtcgggagttgaaacctggcaaggtgtgaggaggaggagccctccagatacctggtaccacattaggaacggagtgagtgacagatcgtattctctgatatctggtatgctatcttagagggtcagggccgctccagagggtgtggggggggcacaatgatcaaacagagacccagggttctttggcactgtgccatgcttcactgaagctgtcagaatttagaattggaggagaagaaagaccctccctcatgcctgccattccccatgggaccagcgcgacagacacagggcttcctttttcttggttaattactgtagttcccttgctgcagatgtgtggactgttctatatttgcaggaactctgggcaaggctcgctgtctgtggttttacttttcttcagggtagcatgtgtccgttctaaccctaaattacctttctcccaacccccaaaccaaaaacaaaaaacaaaacacaaactatgcctttaaaaaacaaaaaaaaaaacaaaaaaaaacaaagcttctgtttgtactatggaatttcttatacttgatgggtatacctaaagttaggggttgtgtatatataatatgcctttgtttatttatttttgatggtctctaaggagacccagtcccagaatctgagattccaatacattaaatggatcaggaatttaaaggatgtttgcaatggggatttgattctggtgaggtgggctttcaaggccgtctgaagtagacgccttaaggtctaccttaccacatttaaaggttcctcagatcatcactgggccccttgatcatgacaacactagatagcagggtgggacagcagtacatgtctgtgctatcagccagaggcacaccgttgtcattttatcagactggctgaatattatttttgcaagagctagcgttctaagggagtgagcacagccggaggctgaacctggctcacctatccatctgccataacctctagcacgagattccgttcatgcaggcttcttagtaaaagcttgcttgggagaaacaccgggcaaagatgctcagagtctgggtatctctgtgtcgtgggcatgtcctccgtgaattacctctgaagagaacctttcaaaaataaatgctataatctgaaaatagcgggaagccagggttcagagtcttggttcttctcctcagcgatgatggcttctttcctggacctgctggtctccattttgctaggaactcgaaaatccagtcattatgaagtcacggcatcctacacagaatgcataggtcgttattgcttttcacatgggctctgctcccccaccctctctacagcggcatagcttcaggtcctgagggggtcgaacaaagtggagcctggagttggcctaaggtctgtgaagacatggaaagcaggtagaaccatggtgaggtgatgagctgataggatgtgggacagtgtgtgcgtgcgtgtgtgtgtgtgtgtgtgtgtgtgtgtgtgtgtgcacgtgcgtgtgtgcgagtgtgcatgaggtggggtcaggaagaagggaagtgagcacaggctatgcttgccctgcctctgtatgtgtatgttatccagatatagatgctgtattttaccccctcttcctccctcattatgagagcagtgtgagttcctcagcactgaggtgaccatagatcagtctggcttacaacagaattgatttgtccaaaccagagcctgcctttattttcctgaccttgagggaaattcgtgggctaaggaatttatcatatggactagactttaaaggatcgaaggcaagccaggatggtcccctgagactctggcttcttccccacagtcacttcatgctgtctagggtgaggtgtcccttacccctctgagggtgttcttcactcttttgctatttcttttttgtaacgaccttttccacgttgaggttagtgcttctttaaacagccatagtttcgaagataaaccagcctgattatatgtgaatgtgaaatttctggagatttggagctgaacaggagtgaagttcaaagctagggcaaggactgtggtgtctgcagggaggggtggaatgaggtgtggtattgaaggtggctcttaagtgccatctgttctgagagatagagagcagggagcagggtggcctttacactctgggtaaagtctagtgagtctcagagctggaannnnnnnnnnnnnnnnnnnnnnnnnnnnnnnnnnnnnnnnnnnnnnnnnnnnnnnnnnnnnnnnnnnnnnnnnnnnnnnnnnnnnnnnnnnnnnnnnnnnnnnnnnnnnnnnnnnnnnnnnnnnnnnnnnnnnnnnnnnnnnnnnnnnnnnnnnnnnnnnnnnnnnnnnnnnnnnnnnnnnnnnnnnnnnnnnnnnnnnnnnnnnnnnnnnnnnnnnnnnnnnnnnnnnnnnnnnnnnnnnnnnnnnnnnnnnnnnnnnnnnnnnnnnnnnnnnnnnnnnnnnnnnnnnnnnnnnnnnnnnnnnnnnnnnnnnnnnnnnnnnnnnnnnnnnnnnnnnnnnnnnnnnnnnnnnnnnnnnnnnnnnnnnnnnnnnnnnnnnnnnnnnnnnnnnnnnnnnnnnnnnnnnnnnnnnnnnnnnnnnnnnnnnnnnnnnnnnnnnnnnnnnnnnnnnnnnnnnnnnnnnnnnnnnnnnnnnnnnnnnnnnnnnnnnnnnnnnnnnnnnnnnnnnnnnnnnnnnnnnnnnnnnnnnnnnnnnnnnnnnnnnnnnnnnnnnnnnnnnnnnnnnnnnnnnnnnnnnnnnnnnnnnnnnnnnnnnnnnnnnnnnnnnnnnnnnnnnnnnnnnnnnnnnnnnnnnnnnnnnnnnnnnnnnnnnnnnnnnnnnnnnnnnnnnnnnnnnnnnnnnnnnnnnnnnnnnnnnnnnnnnnnnnnnnnnnnnnnnnnnnnnnnnnnnnnnnnnnnnnnnnnnnnnnnnnnnnnnnnnnnnnnnnnnnnnnnnnnnnnnnnnnnnnnnnnnnnnnnnnnnnnnnnnnnnnnnnnnnnnnnnnnnnnnnnnnnnnnnnnnnnnnnnnnnnnnnnnnnnnnnnnnnnnnnnnnnnnnnnnnnnnnnnnnnnnnnnnnnnnnnnnnnnnnnnnnnnnnnnnnnnnnnnnnnnnnnnnnnnnnnnnnnnnnnnnnnnnnnnnnnnnnnnnnnnnnnnnnnnnnnnnnnnnnnnnnnnnnnnnnnnnnnnnnnnnnnnnnnnnnnnnnnnnnnnnnnnnnnnggacattaattcgattcggggcccaacattgtgcttatattagtgtttagaaggaagagacatttttcacgaaaagtagcctatattttgagtgtttaaatttgacttacttgtatgagtgttttgctcatatatatatgtggtgcctgaggaggccagaaaagggcattagacccctagcactgtagttagactgtagggagcttctaagttggtattgggaatgtaaaccaggaaaagcagctaggtcttaactgatgagtcatctctttagtccctgctccccctcacccaccccaccccttattttgacagagctactcccccccccctctttttttttggacagagcctcctgtatttccagtgtcaggctggccttacgctcagtatgtagctaaggatgaccttgaatttccgattcccctatttctacctccagagtcctgggatcaccagcgtgccgctgactgacgggtgtgccacactgatccagtccagggctcctgctagggtttgttctctctaccagttaaagcattaaaaggcagcaggagcctcagagaaatctgcaaacaggagcagaattaccacttgaaaaaaatggtggttattgggggtgaggaaaacaccgatttgtgtcagacacacagaaaaagaccctctctagagcagaagactatagagtttccctcccctaatttaaagctggtcagtttgaaggaggacaggatggttgattggcccacggctgttttgtaatctgtcctgatccagcctcaaacttgttgagccagtccatcagcagagagcctgagggtgggagacgaaagcctgcaaggccttttgcttagactgccaggtgtttctttcaagtcaggaagctgaggaagaagccaaccatcttgggagctcactacctttattactaaccatggcccctctgcctatctgcccggcctacaagggagtctgtctaattcctagtctttcaccactgtgccaaatttatatggtgctggggactgaatccagggtttcaggtcttctggacaagcaccctaccaactaggttatgttatatttcatccttcatcctatcagccaggatctggccagcagactcctgtgtggcagaggcctagtcctattaattggtcacacctttttttttttttttttttttttaatttaagaggaacaaaggtagccagtggacttggacacacacacacttctctgcctaacatcatttagtgcctagtttgggaactgtcctgctttttaaaatatagatctgtaacatctggttccctgggagattaactgctgggttctgtagacaggctggcaagtgtgtggtttggtaaggacagctcctgataactatggcttccttccttaaaggtgcagactcagtgtacagggacagcttcaccttcagtgatgagaagctgaattctccaaccaactcctctccagctctcctgccctccgctgtcactcctcggaaaggtgacctcgccgactagactgcttttctgctcctttatccccaccccgtatcctcaactaggctttccccacatgtatacatacacacatacatacacacataccaaatatatatttgttttaatatagatcaaaacatctacatatagatgttacaaatatgtatacatatgtacgtgtatatatatataaatacatatacatatgtacgtatatatgtttaaaacacacacatacatatatatatctatatttaaaagtggacatgactcaaagcaacagctccaccctctctctgcttaggttttaacagactaaagaggggtttaagtttcatgaataggttcttagtttttggaactggccaagtctcaccagctagagagctgaatgttctgttacattggacaggcgccctgctgagaacaaaagaaggctaccccctccaaggaaaagttgaacttgctgaaaatagttgcaaaagacaatcaaaatggagccaaactcttaaagaaatgtgacgatcccactacgtgtctccacatagaacttccctctttcttgaaagagatagttttaaattcccttcccatcgcaaaagttagcagccacaggggactcgccgtggttcagtctcgatctgtaatggctctgtgcactccagggagagagcagtctagagaatggcttaaataccgctcagatccgctccctaatccgccagaggagaaaaggcccttgtggcgaggggactggaaagccaagaacgatcatctgttgtaggaagctagggtgactaagaacaatatttagcaatgcatttcaaggaagtcatgaatgacgaattatacagaagaaagtaaaatacgtgcagaaagcgtctgcctctggctgcagaggcagcagtgtctagatacaatgtagcaatgtctgtgctactctggatgtgtcaagtaagactgcctggtccgtcacggaaactcacgtggatcacagccagtgacttccctcggggctggtgagatggctcagtgggtaagagcacccgactgttcttccgaaggtccagagttcaaatcccagcaaccacatggtggctcacagccatctgtaacaagatctgactccctctttctgggagtgtctgaagacagctacagtgtacttacatataatannnnnnnnnnnnnnnnnnnnttagcagccacaggggactcagtctcgatctgtaatggctctgtgcactccagggagagagcagtctagagaatggcttaaaataccgctcagatccgccccctaatccgccagaggagaaaaggcccttgtggtgaggggactggaaagccaagaacgatcatctgttgtaggaagctagggtgactaagaacaatatttagcaatgcatttcaaggaagtcatgaatgacgaattatacagaagaaagtaaaatacgtgcagaaagcgtctgcctctggctgcagaggcagcagtgtctagatacaatgtagcaatgtctgcgctactctggatgtgtcaagtaagactgcctggtccatgttccactttgacaggaaacagtagtagttttacactcacgtcatgttggaggatcacagtattgtcttccagtaacagcacaatttgccatccctccctacccccaacttttatgacactgacagaccagtcttttaggataggaaggtggttggggtggtcggtggggtagggattgaggactgtggagacctataggagaaacacccaggttagcctccaggtcagttgctaagatgaaagtaaatgtggggcagacactaaggtctggtgcgtggcacactcccatgaggtctctgaaaacagcaggttttcctaatccctgggaaagtcccctatcagctgtgtccgagagggaagctgaacccttttctgttttgcagccaaattaggtgacactaaagagctcgaagacttcattgccgatctggacaggaccttagcaagtgagtacacgctgggtgtttaaagtatagcagagcaccgagccccgcctttgataacgtgctatgatgtttcccagcttgccccggggggtaggaagttacaccataaggctgctctaggtgtagcaacgggacctcattggctcagaaagcagtttggaggataagcctgcagaaaagtttcccaactgtgcaaagaggtcagcagggcacaatgacatgttgattagaaagtggtgagagctttgctgagaagaagtccacacaggatgtccagtcctgagaaaagaggacagattggtcacaaatgccttcctccggccagcctggtctggtctgatcagggtaattttcccgggtttgatacaggagcctggtgagaggtctgacccatgtcaacttgccccgattcagtttgcgcttctcatttgggaatttcactctcattatccattttgtgtgaccccaaacggaaaacatcaaatcaaaattgcagtgggggtgtggtggggacctgtgttagaggaaggaactgccacactctctgcatgccctacttcaaaggacaaggttgcaggaggcagaaggaccagccgcagcctgcagagttgctggtgtcagcatttctcatggaggacttgctaagccttggagaatttgtgttctggcttcttacttagtgaaaatgattttttttttaattctgcaagaaatattctacgtttttactttgtcaaataggcaaaaatctaaaaagctagaccccatagctaactttagaataatctgtttaaaattagccatgttcttagcaccccatcattctgtatttgcttgatggttttattggcccctttgcgccatcctacatcagaagatgtaggcctgttttgacagagattattctaattgcagcacaatttgtaatcagtccatgcaacacgcctgtctactttatgcaaattgtagctggccccctagtccttccagttagccagccctgcgttgcagggaagcctgccattaactttgcttctcatgctcatctgagactatgtgatgtggttaagcacgcgagttgtgagcctctggcggggataacttattctttgtcctcttttcaggtatgtgaagcaaggagtttggggtccagaaggctccgaggacctggcaaatcggctactagaatctgctgtgggagagggcagagctgaggctcctgccccctggccattcttggttcactataacattagccattgggcccatctctgggcagttcggagagtgaagctcactttgtttacctacctgcagcatattcaacagaggatctatctaatgtgtttttactcctttaaacatagcccttctataatttaaaatgcttttatggaaatatttgtaattacttatatatagttggaggtcataataagctttcccatcataatatatttttgtatgcaaataaaattaaaacggagatctgtactttgaaagctgccttatttccgtcagtatatttccatccagtagtttcctagtgggacaggctcctggatccctagtgagcatcccatgtgctgtgcttacacagactccttacaactccttacattcttaaaaccgtttctttatgggggtggagagaagcctcagtggttaatagcactagcggctcttctagaggatttgggggtcaatgcccagaacccacatggcactcacacctggcataacctccagtgccaggggatatgacgccaccttctggtttcctctggcactgcatgcatgtgatgcacagatacttaggcaaacactcatacattaaaaaataaataaaaatctcaaaaaatatttttcccttggagccagagatatggctgagtagttaagagcactggttgctcttccagaagacccgggtagaattctcagcaactataagtttgctcacaacttatctgtaactctagttccagggaaatctaatacaacctctgacttcctcagacagcagacacacatgtgccgcccagacagatgtgcaggaaaaaaaaacccaaaacactcaaacacataaaaagaaataaatcgccgggcgtggtggcgcacgcctttaatcccagcactcgggaggcagaggcaggcagatttctgagttcgaggacagcctggtctacaaagtgagttccaggacagccagagctatgcagagaaaccctgtctcaaaaaaccaaaaaaaaaaaaaaaataaaataaaaataaataaataaataaatctttttttaaagcctttgacttattttttctcttattgtttgatagttttcatatctttacataatacgttttagtcattgtcacgtacaccccaatccctccccagtctcttcctctcctgttggaccctgctcagcaagtcaccctcctgctttcaagtcttctttttgtgtggtccagagtttgatttagaatttcttgcctgagtgcgggtgggaggttgtttattccagagggagagcaacgtctcagtggctacaccaccgaggaagatggaaaccatggaccagttcttgactttctgtgcatcctcacccaggcactgtgctgagctccgtctggcccagtcttgcatatgtgctgctgctgaaggatccatccctacattctctgtgctggctggttatgtaaacttgagtaggctagagttacctgggagagggaacctcaattgaggaaccgtgccctacagactggcctgtgggcacatcttccgggcttttgcttgattgatgattgatgtgggagggtccggcccattctgggcagtgctatctctgagcaggtgatcctggcagctttaagaaagcaaactgagccgggtctggtggcgcacgcctttatcccaacactcgggaggcagaggcaggcggatttctgagttcaagaccagcctggtctacaaagtgagctccaggacagccagggctatacagaggaaccctgtctgggaaaaaaaaaaaaaagcaagccgagggtaagcagcatttctccatggttgcttttttgcctctgctctggcttgagttcctgtaaggagttttccttagtaaccgggacatgtaagtcacataaatccctttcttccccaaactgcttttggtcatgattttatcgcagcaacagaaaacaagctagggccatacgtattgtcacatggtgcagagtggtcttccttcctgagttcctgtggatgacagactacatttgatgacagtcctagagattacaacagaactggaagtgttcccagcgcctcatgacgtcacagtcaccatgatggtgttgtagtgggatgcattacatatttgtggtgacgctggtgtaaatctactgtgcttcaggtcatgtatagtgtcacgaacagtcataagatttgatcatgccgggcgtggtggcacacgcctttaatcccagcactcgggaggcagaggcaggcggatttctgagttcgaggccagcctgctctacaaagtgagttctaggacagccagggctatacagagaaaccctgtctcaaaaaaccaaaaaaaaaaaaaaaaaaaaaaaaaaaagatttgatcatgacagtaacagtcatgctacttactggctcgtgtagtcattaccttctttccatggttagaggtcacaggttttaagtattcaagttttttttttttttttattgtacacaggctctgttgtactgccagctgcttctcacatcagttaccaattttcttgattgtatgaagaagttacacttggtcaacatatgccgcctggatatgggctgagacctttctgtggtgttcgacagtggtaaaaatcacttagcaacgcgtgttggaaaactaataagatttggtcttttctagggtagtgtgaaaagacaccttttgttttcttccctcagacttctgagaaagctttgtgtgtgatgtaaacattttctctccttttttaatttaaagaacttctgtgtctgtgtgtgtgtgataggaacacatgtgccacagtgtgaggaagtatggaggaaggaatacatcttagtgaggtagttctttccctccacttttgaatgggatcctaggattaaattcaagtcagtaggctagtgtagcctcttgctggccgagctatctcactcactgcccgccccacacttttttttttttttttttagaaaatttgagatatgattcactgaaattttagctttgcggctcttggcatatccgcagatattatagccatcatcgctgctcattgtttgtatgaatctgtctactttagacacattacatgaaattatatgtgttcctctgttagcatatttccaaggttaatccatatgtcatccctttgaataacgaagtaatattccaccgtgtggataggtcaccttctgtgtatacaaccattgcttgggtaacggatagcatttaggtttctacttctgacctagtgagaccgctccttcgtacccatgagcaaggatttggaggtctcttacctcagcttgatagaagcagaactagaattatggggtcaggtcaagggctgtgctaactttctgaggaactgttgagtgtcatggaagcagccacatcttgtcactttcccagctgtcgttgaggcctcctactgccccatgccctcatccaccgcgatggtgtctctctgaagagcactccactgagtgaggagtccggtctcacttgtcttgcagttcctgtctgatcaatgaagtcttctcatgtgattaccagcttctgtttcagggttgagctatagaaaatgaccgagcattctggatacaggttccttaccacatatgtgacttgaaaaatactctatttgtgggcctgttgtacagggctctctggccatatcttcaggatgtctgcttataaaagaccctcacagctgggcctgttgactttttcccttctctcctagaaaggaggtggggagggtaatggaaccctggtattcaactgccccacctcccaaccagctgtatgcagttcttcctagttgcagatgaccttaaggtaagggggcagggctttcccagtagatgaccaagggaggggacttcatcggcatagccagggggaagctgtcttccgggttgtgttccaacctccagtgcagctgcctgaaggtcacctacctccttcccataacctctcacccattgctctgtaagtaggcctaataaacacatcggttgcccctggaaaactttggtagaactgtggaattgcaccttggtttgctaatggcgctttaggaacagggtgataccgtgtttccatctctccacggaaggacttcagcagcggagctatattttcatgtttttggccttgaagcgatgacagttttgattttgttgaaatcgaattttttttttccttctgttgcttgcagttgtggtgttctttctaagaaaccagtcaggtcccagctcagaaacagtcactcctcatctttcaatatgggcagagtggttcatgactgtgatcccagaaactgaggtatgatcaccttgggtgcagggcgaacgtgggctacataggtgagttcaagggctacatagtgagactccatctcaaaacaaaacaaaaaataaaaatcaggcgccaggagagaaatgtcagtgaagtgcttgccttgagagcaccataactcaagttttatatccaaaacacacacaaagatgctgggcactgtggcatgcctgtaattccagtgcaggacaggtgaagacaggcagatccttggggtacagtcagttaccccaacttggcaagttccagcccagtgacgttggttctaaaacgtaggtgggtgggactgtggttgtggctctgtagtagggcgcctgccttattagaatggcgttttaggctcaaccctcagtactgaaaaagaaaaaagaaaaacaaaaggtacctgagattgtcctctgccatctccatgcgcatgctggacacacattcacactgtgagcatttcctctaggctccatccaaccgttacctagcaacagccaggtacaagcctgggctacatataaggactgtttccctctccccctcctctcccctccccctccccctccaactctttccacctctctctgtctctctcccatctcttatatgtcccagcaggcctctccctctttcttctctctctctctctgtctctctgtctctctctctgtccttctctgtccccttccttcctctgcctctaccccctcctccaggtcccaaataaacccccttttatattaggcttgtcacatggcttgattgttggggggcggtcaccttggcagggcccaccaaagcacccccctcacgccactgtttttttgttttgttttttttaatatataaaatacagaacacactcaatgctctcacacacaaactagacaaaataaattgtagttttagcttttgcatgtaggtctgtggtttactttgagttaagtggcataaaactagttccaacatcattcttttgcactaggccagccagttgtcacagtacgacttttaagacgatgtttccctatattgagtcagatcggtgcccctgtggaacagcagccgtaagtgggtggactctcatctccctttttctttctcattttcttgtctagtctcactgtgcagctcaggcttttgagctcaaattcacgaacctcctggctctgcctcctccatggtattcatgatgtgcaccatgccagtctggtgccttctgccttaacaactgatctttatttataggcatgaaactcctttcagttgatcaggagctggttaaattcttttaaagttacaaataaccgaagtttattttacctccttaatttctcgcaattatatcttgtagtttttgtggtataaaccttgaattttttttaaattaaatttattgttaaatgtcttaatcactgttctattgctatgaaaagacatcatgaccatggcaactcttcaacaagaaaacatttagtagagggcctgcttacagtttcaaaggttaatctaatatcatcacggcaggcaggcaggcagggcactggagcagaagctgatcctcaggccaagagagagacactgggcttggcatgggcttttgaaatgtcacagcccactcctagtgactcactttctctgacaaggccacacctcttaatccttctaatcctttcaaatagtaccattttttgatgactaaacattcaacaatatgagcttatagggagaccattcctgtttaaatcaccccactaaatattctgattctattaaaaataaagagtttgcttagtgcggaaaagcacttgtcataccagcctgacaatctgagatcaatctgacaacccaagtaaagatggaaggagagaacccatctgtaaagttgtcctctgacctttacacgtgcactgtggtacacacaggcccacagtcataaatcaggagcacacacctacacaacaaaaacataaaactaataaaaattttaaaaaagaaaatagatttttatgaagtttgcttttagcttttcttcattgatagtgaatagaactggcatcagttttgtgtatgttggtcccatgtcctttatccttgttgtgtttattatgcctcttgtgtgtgtgtgtgttacaaacatgacatcacactgtaagtactttgtaagcctttgcttctccactgacactctaaatgcctcccatttcttcactgcattggttgtgtcctcctttggttcttggtatcaaaggtcaagcttgtgccattaagcaagatggcatgatggccctgttgtaaagtgttacgttggtaattttctcagttttaaaaagatttatttatgtttattttataggtatgtgtgtttcgcttgtatgtatgtctatgcagcatgtgtgtgcaatgcttacacttagtccaggagaagttgctggatcccttagaactggcattatagactccacgctgtgagctgccatgtaggtattgggagccaaacccaggtcctctgacacagcagcagaggtggccactaaccactgagccatctctccagcccctctcatggatcacacaagtgtttggcttcttttctagattttatcttttccattgtgtgattctggctcttgcccacgattcccactctttgtctcctgtggataaatctttttgtttttctcttcaggacaccagtggctctttgctctctccatgtcttttcatgctggacctgaggaaagctaccttgcagttctttcttttggggctcccaagacccgggttccaagctgggcaggcagggagggcgtgaggctctgcggcctggtgtgagtgataagcttggggaaaaggaacggattcttttctgtgagtggggaggaggggtggcgtgtgctctgtgggccttggttggataatgacttagggacaagtggcctaagtcacagcctgaggttctgggaatgtgaagtgttttcagagctccttaagaagtggttcaaggagcaaggccatcacctgttttgaaaaacaggtgttatgtcatctggacttgaaaaacatgaatgcccccgcctgaagatttgtcacgtacatttctgtgtgtgtttcttgggcgttgctataagcccttggctcagagattaagaggtagacaagctggaggtttctctctcaccaactttctagaagtgagcagggcagggttgttccctggtcaccagcatggctaggcctctagcacgctcatttatctgtcagccagggggaggggagaaggctagtcaaccccaagcttgtccctttccacagcatttgttgaagacacacatcacctctgctcacatggagtcccttgttcaagtcttaatcacaggctaaaactaatcttctccagggcctgggatgtccttggaacaccacttgactgtgacccagagaaggttagccagcagtgttttcagtgacatagcaagactggattctgtgcaggcaatgcaggtttgtttggtttttgtttgtttttttttttctttgttttgagtggaaatattctgttctaatttctgagaggaatggccaaagaaaaacaaaacagaaaatatttcacacccacaagtaagacgatttagtgccagctcaagtatgatgtgccaacccagcctctggagggtcccagcacatgttgcttcctcaggaaccatgaccgagggactcgatatcacattcacctcaggtgtgagagatcacgtctgagctgaggggagatgatgctgattggccattgagaaccaaggttggatttgatgaaacttcttcatggatgtatccttctgggtgtgtggtggttaatgaaggacagattttgaatcttgaccaggttaagctctcatcaatactgtgtagtagctgtgggaccttgaacaagctatttcacacccagcatctctatggctttatttgtgaagcagagaggtgagtccttgtttgctagggtcatgacaaaaaatcaaacagagccaatgaattgtgtccagcacccttcctcttcatatccacaggcaccatggacttctattcctgaggtaaagctaagcttcaactccagtgtgtaccatgtacctgggagcccaagccccattgctgactgggtctgttacacaatcatgcttgatgtgtgctagccccacagttgcttcccctcagggggaagggatgcctcggcataggctcgctgagacacccccttctcctacacctcaccacaccctgatagaacatattattatatttctttatctttttaaaaattatttatttatttatttatttatttatttatttatttatttatttatttattatatgagtacactgtcactgtcttcagacacaccagaagagggcatcagatcttattatgggtggttgtgagccgccatgtggatgctgggatttgaactcaggaccttcggaagagcagtcagtgttcttacccagtgagccatctctccaacccccacaatcacatctaccacatgctcttgccaccttctcttcctctgagactgtgagccctaagcgctttctttctcttcctcgggttatttccgttgggggctttgtcacacctgtgagaaaagtaaccaatgcagtgaaactttgtggtgccgcctctctccctggcttcctgcagctggatacgctctgtgagagcaagggtcttgtttggttcagcctcactgactgccatggtgatggacttaagcatagtccatgatcactgagtgggtaagcgctctcaactcctccagcacactgagagcatcgggagtttggcatcgggagcttgctggtcctgccgtgcttgctggtcttgcctcctaagctgagcactcagcttacacagactttaccacctcctcttctccaggcctttctccccatcctaccatggacatgaatttagaaccaacactgctattgagcccacagcagtcccctctccagctacttctaattcacaaggaaagaagaggcccctgaaaaccgagaaatcttggagtcccaaagaaatgaatttgtgggtgtaggatttcagggtcttaagtaccactgaatagatcactccttgatctcagtagagtttatatttccctgtagaacagactctaaagtcagctctattttgggagacttttgtataaaatattatgcagggtgggtgtatgtgtatgtggtgtcccacatgtacaattgtacccaggtattcatgtatttatcagttctgcagttaaaggaataaaggaatagtggaccaggatataggttccagtttggaagacctgggccttgagggactggttgtagtggctccctgggctggcctagagggtggtgacagttcccagacctggcactggggcagcctcacctcctgcaaacttgcctttgcttgtcaccttacagaacaggattcaattcctagctagggtttcacacatcacatgggaagggcccattcccatgtgcaccctggaagtcttcaggcctgttgtcctaggccagaagccaaagtatgttctgtaaccagaaaagtcagggcttggctgtgcattctgagccagaggaagcccccacccagccaagaacaggtttgggaaggacaggagcagagtgtgacccttctcttgtcatagatgtcttgagagtgaaggcagaggttgcaggaaggagaccctggaagtccagggggagttagcagcagggtcaccagccagtccaggatgaggggaccttcctgctcggggcattgggagtcagagaaagttcatgggatggctcagacagctacaggagggcagagaaattt

SEQ ID NO: 524 - DNA, 915 bp, Mus musculus
gcggcgcaggcgagtagctagcgctcaggctcggcaaggagcaaggcagaggcaccggagcagactgcagtgcaggcggcagccaccagggccaacacctcgcagcatctctgctacgcgtgtcactgagcaacttctccatgaagccgccctcggcgcagagcagtcccgcggcggtcgcggccgcagccccggccatggactccgcggccgctgcagacctgaccgacgtgctgtgcgagttcgacgcggtgctggccgacttcgcgtcgcccttccacgagcgccacttccactatgaggagcacctagagcgcatgaagcggcgcagcagcgccagcgtcagcgacagcagcggcttcagcgactcggagagtgcagactcagtgtacagggacagcttcaccttcagtgatgagaagctgaattctccaaccaactcctctccagctctcctgccctccgctgtcactcctcggaaagccaaattaggtgacactaaagagctcgaagacttcattgccgatctggacaggaccttagcaagtatgtgaagcaaggagtttggggtccagaaggctccgaggacctggcaaatcggctactagaatctgctgtgggagagggcagagctgaggctcctgccccctggccattcttggttcactataacattagccattgggcccatctctgggcagttcggagagtgaagctcactttgtttacctacctgcagcatattcaacagaggatctatctaatgtgtttttactcctttaaacatagcccttctataatttaaaatgcttttatggaaatatttgtaattacttatatatagttggaggtcataataagctttcccatcataatatatttttgtatgcaaataaaattaaaacggagatctgt

SEQ ID NO: 525 - protein, 176 aa, Mus musculus
LALRLGKEQGRGTGADCSAGGSHQGQHLAASLLRVSLSNFSMKPPSAQSSPAAVAAAAPAMDSAAAADLTDVLCEFDAVLADFDFHERHFHYEEHLERMKRRSSASVSDSSGFSDSESADSVYRDSFTFSDEKLNSPTNSSPALLPSAVTPRKAKLGDTKELEDFIADLDRTLASM

SEQ ID NO: 526 - DNA, 33316 bp, Homo sapiens
acaccctctgtgacattaggagtaacatctttctaaaatattacgaatcaaatcgcaaaatgtacaccccctgtgacattagaagtaacatcaccctaggctataagaaataatatcagactgtgtacctgcattgtgacatcagtagtaacatcccttactactgatttttacgaatattttcagagcgtgaacaccttctgtgacattaggagtaacatcaccctataatattgggaataataccacacgatgtacaccgcctgtgacattagtggtaacatttctttaggatattacgaataatatgacagggtgtacagcccctgtgatattaggagtaacatatccaaaaaactgtacaaataatatcactgtttgtacaccacgtgtgacattaggagtaacatccccccaaactattatgaataacttcacagattgtacaccctctgtgatattaggagtcaacatcttcctagaatgtgaagaataacatcacaggatgtacacccccgtgacatgaggagtaacatcactctaggatattatgaataatataacaaagtggacacaatgtgtatggtgggagtaacatccccctgggatactacgaatcatagcacagaaagcacacccccgtgacaataggagtcacatccccttaggatattatgaataatatcacaagctgtacaagcattgtgacattagtaacaatatccagatagtatattgtgaataatatcacagcgtgtacacatttgcgatattaggagtaacatctccctagaatattacgaataatatcacagggtgtacacatcctgcgactttaggataatcatccccgtggataactacaaataatttcacaggatgttaaacccctgtgacaataggaataatatacttctaggatatgatgaataatatcacagtgtgtacacccactgtgatatgaaaagttatacctccctcagatattgtgaataatatcacagggtgtacaccacgtgtgcacacctattgtgatttttaaagtaatatctccttaggatattacgaataatatcaaggggtgtacacaccctatgacattaagataacacccctttaggatattcgaaataatatcccagggtgtacaccccatgtgacattacaagtaacatcttccgaggatattacgaataagatcccagggttgacatcccctgtgattttaaaagtaaaatccctctagaatattactaataataacacagggtgtacacccctgcgacattaggagtaacatccttccaggatattacgaataatatcagaaggtgtacacacatgttgacattagtagtaatatcccactagtatattgtgaataatatcacagggtatacacacctgtgacattaggagtaacatccccctggaatattccacataatatcacagagtgtacacctcctgtgactttaggagtatcatcccgctaaaatattacgaataatgtcacagggggttagcctgtgtaatatcacagggtgtacagccccctgtgacattaggagtaacatctttctagaacatcacaagtaatatcacaatgtgtacaccccctgtgacattaaaagtaaaatccccctaagatattccgaataatatcacagggagtacaccccgtgtgacataggagtaataacccgtgaggatataatgaataatatcagagggtgtacacgtattgtgacataagtagtaacatctccctaggatattatgaacaataccagaaggggtacaccccgggtgacattaatttctgtaacattcccctagaatatgaccaataacatgacatggtatagaacacctgtgatttatgagtaacatttctatagaatattacaagtaatattcggtgtgcaccccgtgtgacattaggagtaacatcccacgaaactgtgacgaataatttcaaaaggtgtacaccctctgtgacattaaaagtaacatctcgctaggatattacgaataatatcacagggtatacagaccctgtgacatgaggagtaatgtctttttaggatatcacgaataatataacaagatgtacacacactgtgatattaggtgtaaccttcgtctaggagactgcgaatactatcacagtgaacacaccccttgtgacaataggagtaacatccccgtaggatattataaataatatcacaaggtgtacacacattgtgacttcagtgctaatatccctcgcatatactgtgaataatatcacagggtgtacacgcctgtgatattacattaggagtaacatctccctagagtattacgaataatatcataggggtactcacgcctttggtttaggagtcatattgccctaggatattacaaataatatcacagtgtgtgcactcactgtgatattaggagtcccattttcctaggatattatgaataatatcacagtaggtgttcacacataatgtgtacaccgtgtgtgtacacccaatgtgatatctgaagtcatatgtccctgggatcttatgaataatatcaaagggtgtgcaccccatgtgacattaaaagtaatgtcccttttggatattccgaatgctatcacagggtgtgatattaggagtgtgatattaggagtaacctcttcctaggatattacaaataacatcacagagtgtacacccctgtgattttaaaagtaacacccccctagaatattacgaataatataacagggtgtacaccccctgtaacattaggagtaacgtctccctaggatattatgaataatgtcactgggggcacaccctctgtgatattagcagcaacatctttctaggatattacgaatgatatcacagggtgcacactcactgtgatattagaaggaatatctccctaggatataagctatcacatcacagagtgtacacacatggtgtacacccactgtgttattagaagcaatatctccctatgatattatgaaaaatatcacagggtgtaccctctgtgggatactagaagtaatgtttaccatggatattacaaataatatcacaggatgtacacacatggggtacacccactgtgatattaggagttatatctccctaagatattaccaataatatcccagtgggtgtaccccatgtgtgtacacccactgtggtatttaaagtaatatctctctataagattacaaataatatcgaagggtgtacaccccctgtgacattaggagtaacatccccctacaatattgagaacaatatcacacggtgtagacccctgtaacgttaggagtaacatccccccagaatattactaataatatcacaaggtgtacacgcattgtgacattagcagtaatatcctgctagcatattttcaataatatcacagaaggaacacacctgtgacattaagagtcacatccccctagaataggaagaataatatcacagggtgtacacctcctgtgacattaggagcatcatcttgctagaatattatgaataatgtcactgggtgttatcttctgtgacatcaggagtatagacccctgggaaattatgaatactatcacagggtgtacacccttgtgacattaggagtaacgtctttctaaaatatcgcgaataatatcacaatgtgtacaccccgtgtcattaaaagtaaaattgccctaggacactacgaaatagaacacaggaagtacaccccgtgtgacatcagaagtaacatcccccaaggatataacgaagaatatcagagaatgtacccgcattgggacatcagcagtaacatctcttcaggataatacgaataatgtcaaagggtgtacacgtattatgaaatgagtagtgaactcccgctaggatattacgaattttatgacaccggtctacaggaccggtgacattagtagtaacgttttcctagaatattacggagaatattaaagggtgtacaggacctgtgattcacgagtaacatttctatagaatattacacgtaatatcacggtgtgtacaccccgggtgacattaggagtaacatcccacaaacctataatgaataatttcacaaggtgtacaccctctgtgacattaaaagtaacatttccctataatatgacgataatatcacagagcgtacaccctcttgatatgaggactgacatcttatgaggataatacgagtaatttgataaggcgtacaaaccctgtgacataaggagtgacatccctctaggatgttacaaataatatcaaagggaatacaccccgtgtgaccacaaaagtaacctccccttaggagattaagaaggtgtacaaatattgtgacattattattaatgtcccgctatattatagtgaataatatcacagtgtgtagagtcctgtgacatcagcattaacattcccctacaatattacgaattatatcgctgggtgcacaccccccatgtgactttagtagtggcatgatcctagaatatcaaaaataatgtcccacggtgataaccaagtgtgccaggagagaaaatatcctaggagtaactaatatcttataatgtcacacggggtgtactccctgtgttatatttcgtaatatcttagggcaattctacttttaatgacacaggaggtgtgcacatgcaggcagtaatatcacccccctctcccccccggatattaggagccacatcgcaggggggcgggcgccccccgcgatgcggggagtaatatcacccccctctccccccctggatattacgagctacggtggtcacacagcctctttactttattgtgagtaatatctcctccgcctctggaaattaccaaccatatctcagaagggtgtacatcttctgcactattggtagtaataacatcctcttccccctggataggaagaacaaaatcacaggagtgtttctacccccagcgccattgggtgtagtatcatcctctcccactttgaaattaggaacaacatcactgggggcttgtccaccccatgtgatattgaaagtaatgtcatcctcttctgtcctggatcatggaaaaaatattactggggtggtgtacactttctgcggttttgtgagtaatatcatcctctctgacttgcagtcttaagggcaatatcacagggtggctgtacacaccctgtgctattaagaagaatattatcctgtcctgccctgcatattaggaaaaatgtcacagagtaggtgtacaactcctgcgatatgggaggtaatatcatcttttcatcttctggatagtaggaacagtatcacatgggtttgtacactttctgtgatattgggagtaatatcaacatctccgcctttgactatgaagaacaatatcacagaatggatgtacacccactcagatattgggagtcatatcagcctctcatctccatggatattgggaataatatcccagggtgggtgtacacctcctgctgtatggggagtcatatcgtcctcccccatcctggcaattaggaacaatatcacagggtgggtgtccacagcctgcgatattgggactcatatcaccctctccccctccggatattaggaacaatatcacagaagggttgtatatttcctgcgatactgcgagtaatagcattctcttcttccgtgaatattaggagcaatatcaccgggtggatgtacacccactgctatattgggagtaacgtcatactccaccccctggatgttatattcggatcaatataaccgggtgggtgtacacctactgtgatattgaaagtaatatcatgctctctcctttccgtggacattaggaacagtatcacaggtgggtgtacacccactgcggtattaggagtaatattagtatgaattattacaccttgattattaacatgaatatgaattaccaatattaatattaagaaataattgctaataaaaagttttcagattattaatattaatattattaggagctaatattactgttttctaatgaataagatcagtatcagttattaatatcaggtgttattaataattaatattaataatttatttttatcattggtagaactatgtaatagaaattatgattatcggtattgatttaaaaatatcagttattaatattgatattattaatatcaatcaataattgatgttttaatatcaatcaataattgatgttattaatatcaatcaataattgatgttattaattgcgataagtaatattgcgacattcctcacaatatcgcagaaaatgtacacccctctgtgatgttgttccgaatagtcaggggtagacgatggcattactccaaatatcgcactgggtgtacattccttctgtgatcttgttgctaatatccaggctgggagaggatggtattaatcccaataatccagaaggtgtagacctcccctgtgatattgtccctaatatccaaaggtggagaggaagatatatcacccaatttcgcaggggttggacaccacccctgtgatattgtttctaatgtccacgggtagagaaaatgacataactcacagtatggcagggggtgaacactccctccatgatattgttcctaatactcgggggtaagagtatgatattactcccaatatcatagggggtgtactcccaatatcccagggggtgtatagtatcccgaccggtgatagactccgccacgatgcggggagtaatatcacgcccctctccttccctggctattacgatacacatcgcaggggggcgggcgacgctcgcgacgcggggagaaatatcagcccctcctgacattacaagccacatggcaggggatggacacccccagtgatgcggggagtaatatctacccccccttccccatggatattaggagccacatcgaaggcgtgtggacagcccccgctgatgcgcagagtaatatcaacctccgtccctccctgcatgttagcagccactgtggacacacagtgtatttacgatatttccagtaagattatcttttctattgaaccttatgaacaagatcacaggggggtgtacacatcctgcgatattgggggtaatatcattctctcctccacagcatactgggaacaatatcacaggggcgtgtattccccctttcttattgggagtcatatcatacttgccttccatatattaagaacaatatcaaaggggggggtggacactttgacgatattgggagtaacatcattctctctatccctggatattagtagcaatatcacagggggatgtacatttcttgtgatattgagagtagtattattgtcttccccactggatattaaaaacaataccacatggggtgtcaaaccacctgccaaatttgagggaatcttatcctctcccctgcaccccccgcgccccggatattacagacaataacacaggggtaatgtacacccactgctttattgggagaagcatcatcctctcctcccttagatattaggaacaatatcatggggagggggtgtactgcctcggcgatattgggaggaaaattatcctctcttcccctggatattaggaagggtatcagaggggggagagtgtacattccctgtgatattcaatgtaatcttatcctctccctcccagggtattaagaaaaatattacaggagggtgtacaccccctgcaatactgagagtcatatcatcctctttcgctctggatattaggaacaatatcacagggttgtgtactccccctgcgatattgggagtaatatcattctctctccctgtggattttaggaagagtattacagggctgtgtacaccccctgcgctattgggagtaatatcatcctctctccctctggatagtaggaagagtttcataggggtgtgtacaccccctgtgatattgggagtaatatcatcctgtcgccctgaggagagaagccatttcgctactgtctcctgtctctgaagaggaggaggaagtaaaagttggaaaacaacaggaatgaagtcagtgtcaagaccagccggtggcaatgaggagccggcctgaggtgaaacaatcaacccccgtgactctaagtacatgtgctctcaatccatcaagaccctttcacgtggaaccccttaaagctgtaagcccttaaacgggccaggaactctgtcttccttccgggagctcggctcttaagacgcgagtctgccgaagctcccagcggaataaaaaaaactcttccttctttaatccgctgtctgaggggttttgtccgctgctcatccatgctccatttctttgttccctgaccgggaatcgaacgcaggcagcagcggtgagagcaccgaatcctaagcactagaccaccaggggaacttagaaccttgtgggaaatagattgcacaccattagaagtgggttggccatcagaaggaagcctggacaggtcccttgtttctaaggcgtggcacaaggtaactggtaaagatacctagaccagttcccatacatagacacttggtgacagctggtgctagaacccccacagtggctgagggcatgcagcagcaatactagtagcaaagggacagatagctaaggaaggatcccgctccactcacccagggaaatcaactcctgaagttctgttcgaccccacatcagaggatccattgcaggagatggcaccagagatcccagtggtgtcctccccttaacagggaaagaggctccccactcttgagcccacagtgcttgtgcctccacaagacaagcatatccctaggccacccagagtagacaagagaggaggactattcatatgattagtggtcattaacatatactcctttgtgaggtgtatgtttcaatgttttgctcatttttaatttttaccaggttgtctatttgtgattactttgtagatgggtctttctatattctgaaaacaaatcctggctgggtgcggtggctcacgcctgtaatcccagcactttgggaggctgaggtgggcagatcacctgaggtcgggagttcgagaccagcctggccaacatggacaaaccccgtctctgctaaaaatacaaaaactagctgggagtggaggctgaatgtttcactccgttacatgttaattgctctacatttaattagccgtctgtggtgagaggcgagaggctagcgcctagctcagcgcacagtccagggcgttcgcccccgcaggccgcggggcagggtggctcgttactccgtggacactgcaaggcgccctgttcgcgctgcgtcgacgcagtagtttcttcccataataaaccccttctagataaagtcaggctggcgggagcgccctggaccgtagttcaggcccccgcgctccgcggtgggaacagttcaggactcccccaactcctgcccctctcgccccgaccctctccactccgcccgcccaccatctcggaagtccccttgggacaatgcgtaggggacctccgcgtccccgacacccgactgggacacggccgcgggctccttcgtccctcaccgccagccagggaggctctgcatgcccacgtccacttcacagccgaggaagctgcggctcgcggaggtgcctggcacgcggcgggaagcagcagagctcgcgcccagcagtcagctctggtgacgccgaggacaccgcgtgggccgggttgtcagggcgcgggggcgagaggcgggtaaatatttggggctgtaaccggggcttcggcgactcctcgtcaccgcggttccagggcgggcgcgtggcgagggcggtgcctgggggcaggggcctcctcggagggcggcggggacagacccgtcgccccggctccgcagccccgccccggccccgcctccgctccggccgccgaaggctataagatctaggaacccgagccggtggtagggcgggcgcggaccgtgctgggagcggcgcggctggagcgcagcgccgaagggactggcagggctgaagtgtgcgggacagcaagcccccgaatagccccggctgccacctcgcaggacccaaggccacgcgcgccgggcccagctgagccgcctcatgaagccgcccgcggcgcagggcagccccgcggccgccgcggccgcaggtgagtgcggggtccggggtccccttaaagtctcggctctgcagatggcgggtgagaaaggaggggccccgtgtcgtcccttcacaccccccacccttccatcctccccggcgggaacctgtccccggtcttcccgcgcgggcggctgcagcctcctttccggcccgggctggcccccatgtcccaccttccctccaccaccagctccgcgcgcgcccggggttggggggagcggcggggacaggtaaccggcagcgcctggggaggaatctggccgcgccaagtcgctgggtgaccctgggcctggcgaaggctcagttttcttgtctgtaaaacggacttggtaatagaacgcacttcgggggtggtggagaagattacaaggtaacagcgactgcgtggctgtcacttggcagaggcgccaagtgtcagttatcttcgggaaccgtggcggcccctcctggccctgggaggtggtcccgctgcccccctgacttccgtgcactgagcccctggccctgcccgcagccccggccctggactcggcggccgcggaggacctgtcggacgcgctgtgcgagtttgacgcggtgctggccgacttcgcgtcgcccttccacgagcgccacttccactacgaggagcacctggagcgcatgaagcggcgcagcagcgccagtgtcagcgacagcagcggcttcagcgactcggagagtaagtgcggcccccgctaggatggcgccgggatctcccagctcccaggacctgccccgcgaaggctgcggcctcagttttcttatcagtaaactgaggaatggtttcctgaagctcaacgcagtaggccgagtggtggcggggcccctgacgataatcacgggaaaggtcgctggagggcaggttggttcacttgccgcccacgggtgtgtcaccaggcaggcgagtttaagcagcttgtcccgactcagccagacaggactccctggacctgcaccaggcctttccgcagtttccctcctcttctcctttccgtgcctctcccctctcagctgtaactttgcagatgtggaacaagtgccagtggaatgagggggcacagtggggacatgggagggcgcagaacggaaatattcatgaaaccaggaaaggtttcataagcccaaactgctgttcttgggatttatgaaataactgcttgcattgtcttctggcccttagctctcagacttgttgctccattgcatgcagttatgaaaatctttggcactgctgagttcaagtatttttcagccaggtcctccaccaggctggagggggagccagagagcacatgggcatgaaggtggttcctggtgatctttctcacaatggagactaccccagggtctctttgtcctgaacaactttgtcaacaacagcaacaacaacaaaaacaacaaaagagacagctttttccaggaactcacatgtcctgggaggattacaggtacctcaaacagcaaattaggtgcctttttaatattacatgattgttggtttcaaatccagaattgcttattgtttttcaaagggcaaagtcaattttaaactcttctgtgttattcttcagcctttaatccttagatgggttacaggcatgaatgtcactccttttgctgcccttgactcaggacgtgaaagtaatggcctttccgtgtgattctcttattttgaaacctggagctcttccttgttcctgggctaagattcggggctagacatgaacatgagctgcccttctgcaaagggataaatgcgctcaccaccctggtcagggtttgactcaggaagctgagttccagcttgtttccttggcagcactgccaaagagttagaccaagctgcagcttttgaggtgaaaggggatggaagaaagtactgttacttttccacttagaatttttggactttgttcttaatgaataggttcattttcaatttcaaagcaaagtgttaacatttttgaaatttgtctcaattctaaaggccaaacttaaatatgtctcctcctactggggcatggagcaagttattcatcaaatacagattctcgcatggaaaagaaagctaggatagtgtgtcgctgctgctctgtggcaaagaacagctcctttctaagcaacagcctcactctactagaataggtctgagcgcgcccattcatggctgattgcaacttccactgggtgggatttcagatctagaatctgttttcagatgccttaaagagaagacatagaaacacattcttaacagtttcaggggagatagttgggatagtttgtagttttgcttaggttatatgtgtctgttttctgcttttgttgttaacggactaacccttagtttggtggttagagaagtgatgggaagaacataaagaaagctcagatgacatttgtctttgctttaaatgtgtagtttttctctcacaaggctagtcagaaatattgttggcagaagctgtgtgtatctaaatagtaatttcttaaggaagcataatatgtatatcttaattgctgccaagaattgagtacagacatttgttatcctcgtttgtctgtttaatgcttttctatgggagagaatgcttaagagaggtagatactactgaaatttagctcatcaagagggagacacaccaggataaggataataacagcagctcacttttagcaaacgcttgttatgatgatgatgatgatttattagctggaatgggaaccatgtcttcacgaatagactgaagtccttttgagcccagatcacatgcctgtttgtcaatgatggctgtttatgaaggtgtctctttgaggtggtggtcatctggcagggtcagtagagcttagattgagccttgtcaaggccctgggtgatgagtgggatttagtttctctagctgtgaaattgaaaggatgctatttaatagtgctattagggagaaaatatttgctctgttgaatactttcaaaatatcattacaatgtacatgctgtgctataccatatagatacattggagccagtgtctcgcatgaaaatattttggatgaatatgtaaaccaatgttacctttgttttttgctctagtttttacagctctgtctgaaggtgcaccaaccttacaaggaagatcaaacagcaagcctgttctttgaagaatacttctttattatcattaaaaaaaatttaggttgcttgcacccaaaggcaaaaaatagccattcctcgtactgaaagaaacaagttactcagataggaaagaagaacagatatttaataaggaaatattccttcctgttcccactttcagggaggcctcttaagacatgaagaggaccaaaataacaattgcagtataacttcacatggtggggtggggggtgtggagttcaaatgtggttgatcaaaatagtgttgttactttcctttagacttgattccaacatgtaaaaaaatcaggcactttagtgggagtgattttaacttcagtagtgaaagggcaatgcaattaagagttagggtagtgtttctcaaacttcatcctcagaggtgctttagaaattgactacctttggtttgaatttatttttagaaatatatcttcttttcagtatttttaaaactgtaaaaggtaaaccatgttttctcaaatgtgttaaatgaaattttaactcattatgtttcaagttttaaccagtgtgttgactttataagaagtttataatattaacttaaactttaaaaggtggtatgcacttatacctttaaggtattggggtttcacataatttttcctttgacgggggagtgttttgctgctcaacagaaaaggtctgaagtctactgtgtatgctagggttattatgatattgtaggaccatttaggaaatgaggaactggcttctttagcatcagcaagacttagaacacctgcatatctttgcttaggctattctggcctggccctgggagaggggaccttgtgggccctggagaaccagcatgacagatggcttatgtggcttagaagccactgaggtagaacctgaacttgttcaagccatgagagaataaggccaatgaggagccttcagggttccctggtactgtgttagcaattctgcatgggtaatgggtcttgtgatgcttggcaaggcatatagagggacagtgcgatcccagaaagggagctgggacaacagtggagaagttgaggcaagatgctctttcttattttgcccccctttggcgaggctatcagaatttagattttcaggaggagaagtcaacccacacccccagccattccctgtggcaaaagggaggtaggtccaaagctttctttttcttggttaattactatagtttgcttgctttaaacgtgtgggatcgttctatatttacaggagccttgggtaaggtttactgtctgtggttttacttccccctggagcagcacgttgacatgcgctaaccctaaattacctttctcccaacccccctagctaaaaaaacacacctaccttttaaacaagcctctattttgcagcagtgtttctcagactctgttagttgtatatttcatatgcttttctttcttttgatggtgccttagaaaacacggtcccagaatttgaggttcctgacttcagtacactaactagacttgccagggatgtttctaatgggaatttgagatacatgtgagatggtgctttagagctgattgaagccgatattgtaaggccctcaaatatccagccttaccacctgccagggttccccaaattatcactgttctaggtccttcgagcccctattaatagcagcacctgatacccacgcggggcaataatacatgaatatgtgatcagccagcaacacattgctgtcatttaatcagactaactggctattacttttgcaaggaatagagttccaggggagggaaaagaacaggatgtccggctttgcctaccttgaaatctgtcttgcgtgagattttgcccattgtatgttcttaataaaactctatggaaagaaattttattggttaagggtaaagagaggtctagagcttggggtacctctatgttgagagtttgttcttgggaggtttgttctaggatgccactgaagagaaagttctcttaagaatgttgctgctctctctcaagaagagggaggatcttgattctgtttattctctgtgattaccttttctctctcaggagtgctattctgcactttgctaggaactttagagttaaatcattaaaaccacaggcattatacacagagcacctaggttattgttcttcttctaacaaggaagaaacagagtgactctacagggtcatgcagttttcacgtggcctctagacacccactcgacagtggcatagatgctagatgcccactcgccagtggtgtagctttggggccttgagggctctcttttcatctgtgccatacacgatgtgtagatatcatcacagggtgcgcctcagctgcagcaggtttggctcaaggatgctggcggtcggcttcttcttggtggtcgaaggttgaacagttcaaaacttggagttgggtctgtcccagattgtacacctcacggaaagggagtgaagtcatggtgtggcaacgagctggggcgtgagctaatgtgtatctgtgtgtgtgtgtgtgtgtgtggtgggcagggcgggggcgggcaggaggaagtgagtgtagctgtgctgccatgcctctgtttgcgtgtgtttctatataaatagatattgtaactagtatttttcctcctcttcctccctcactgtgggagtggctgtcagtttgtctgtatattttctcagtttgggaaaaattctcacatcaagaaggcatttagcctgtgaacctaaaggatcagaggacagtcctggcaatattctggatctacggctcattctctacagattctctccaggccccatgagttatgctgagtctttcctgaatctttgctggattccttttttcccctgctaacatcctcttttgtaatggcctttccatatctagattgttccttcttccaacattcaatagcgtttggcctccttgcctgtgaggtgaacaaattgtggtgtctttctcccatgcagaggagtgtacgtggatggaaacttgctggagagtaggggcagaagagagctgaagttcaaagtcagggtagggcctgtggtgcatgccgggtgggtggagtgagcagtggtgtggaaagttgctctcccaggccagctgcttgtgggagatagagagcggaggtgtggtccctgcgatctgggccagccagcctctgggcccagggatgggggcgaagctctcaggtatccttcatagccacggataatgtgccaagggcctggtattttctggctcagagtctaggcatgaggcctgcctcctcaggaccctctgtggttttcttgcccctaaattttgccttatcttctccccatgagtttctcaggctgtatttgtggcgattctcctggtgactgcatggtgacaacagtaaggcttccttgcaggtctgcagtgggtgtggccagcttcctgtgtgtaggggaaagggcttcccttgggagaattggagagcccacctttggaggtgggctcggttgagggagccagcaggagggcttcccaagtaaggttccacggagtccaagggtcctgagaagtagtagcaggagcaccacaaagaagtgtcccgtggtcaggtacactggggaaatggggctggttttgtttaaccgcaagtcttttcaggatgttggaagtgggcatacccatgggaatgagcaaggctgtttggtgtttctcaggtgtacctgatcacacagccctcggaggaccagcactctgaggaatgtatttttggggaagtgtaggtatcaggtccaggattttggatctcagtccatgttcatcctcaaagcccagtgatggtggtcatttcaggtgagctgggctggacctctgaaggaagcaaagattgtgagggttgctctcaagggtcttctgggcatgtttggaaaagtggacaagatggcggtgtcagcgaaaaagagcagggggcaggtgggcccctgggcaggagagggtggggggaaagggagccaggtgaggcacctgagaagttgtggcagcctcttagggacaaagctgaatttccctgagactagaaacctcttcttccgaaaactctgatactttttgtactgggcctatctcttgtcacttaggcaaattccttttcagttaatgggaccaaagagagatgtttttgcctccccctaagctggaggtagttggcttaaagtggaagaatcccgaggaggcggggacctggtaaggcccccatcattcagctgccctctcacacctgaagagccacttctctgctccaactgtggctggctttgtgttttgttttaaccaggaaggctgttccccgtgacctcaggggccacatcctgcttctgctgcctgccttgcctttgcaccctttgagtcagtgctgctcagccagcagcccctttctgagtcacagccacacagctgggccaaccgtgcgttggtttccttccccttagcaggacttagagaatctcagaactttagagctagaagtgcctttaaggattatttagtccgccttcccattctattgataagtaagctaggcccagagatgtactagctcaaaggcaccctagtacttagtagttgactggatggtccccttgactcccagttcagccttgaacttctggggcctcatcttgctgtggttcaagtctttggaggtatgagaatagagggagccatgatgtcactccaagtgtctaatagatgaacttccaggagaagatgtctttatctttgaccttctggcttatctgaagagtacagactcttaggaaaacctctcttaagtaaaagagaggattattaaattataggacagcaagagagcaaagatctctcttgagcagggaaagaggcttaagtcatgggatactggatgtttgtattttaggaggctcagagggcagaagggacatatttcacttgagatgattccttttgcctaaaatccttacccccacactcccaccatcaaccaagcactggtcatgatgatcctatcacccccttcctgtattggggaagcaagggcctttggtatacttgatttgacacacacacactctctcacttctcactcacactctcacactcacatgctctcacacacacactctcattttctcacacacactccacactcacacacgcacacactctcacacactttctcacacacacactcacacacactcatacactcacacactttctcacacacacatattctcacacacacccacactcacacactcatgcacacacacacactttcacacaaacacacacacacactttctctctcacacacacacactccctctctcccctgtctcgaatcattttgggggcataaacataaaacctggaaatcaacctgttttctaatctttttttttgagacagagtctcactctgtcacccaggctggagtgcagtggtgtgatcttggctcactgcaaactccacctcccagattcaagcgagtctcctgcctcagcctcccaagtagctggggctacagacacacaccactatgcctggctaatttttgtatttttagtagagatggggtttcaccatgttggccaggctggtcttgaactcctcatctctggtgatccacctgcttcagcttcccaaagtgctgagattacagccgtgagccaccccatgcctggctgttttctttactatagatttgcagctttggcttattttgaagacaaattgttggttatcaatagactataaagtgctaagtctataatctcatgagtactatttctaatgagtatattttccttcctgaaaggtgcagattcactttataggaacagcttcagcttcagtgatgaaaaactgaattctccaacagactctaccccagctcttctctctgccactgtcactcctcagaaaggtaaggtcattagttggaatttgagttttttgcttttttattcctctctccttctcaatcccttctctgtcccttttatccctaaacaatctttctcaaatgtacaaaacaaataggtaagactaatgtcttaatactgtagagtatacagtggaattttttatttctcaggattttaatcagtgtgaacatgaaatcagataatttggggcagaaaacctgaagtcacagggagaaagaaaatttggagactagactgttctctctcatgtgatgtaatcaagactgtgcaaatgacagtgtttcttaggagtctcctcccagacttgttggttctagaatttaaaactcagcagtttgcctttgcagatagtgggattctttttattgcattaattatttaaccaatgctttcagatgaccaatttagcaattaaatggggttgtcattattagataagctatgatctaacatgatttaaaatagcagctccagcctgtctctactgtggtattaatagacctaaaatgtctttaaagatgcatgagcagtttcttattttttggaactggtaaaatgtctccagctagagagttgaatgttctgttacattggacaagtgcctttttgaaaacaaaaggagctttttttcttaagaaaagttatacttgctgaaaatagttgcagaatgcaataaaaatggaacatagttaaaaagaaatgacaattccatcactcttttcactttggcaataagacaggacttcactcttttttcagaagaggcatttgaaagttcccttctcaacatagcaacgttagcacccactgggaattctgccactatccagccctcagtctgtaatgaatcagttgaattcagagacagagcagtctaaaaagtggcttaaaacgtgctcagatttgttacctgatcctcaagaggtaggaattaaagagggaaaaaaagcccctagtggcaaattgacttaaaaggctaagaacaattagccatttgtagccagcaggtgttaattaataaaactgtccagtactgcatttcagggaaggcatgaatgatgtgatgaactctacaaaaataaagtcagctatatgaaaaaaatctctacatctcaggctctagagagaaccaaatcagaatgaggactcgtttccttgtgtgggcacctggaggggatgaggctgtcctgggcccagaagactcatggcaccttccctgtaccattttgataagaaacagtgaactcttcattcatttcatattggaggaactctgagggctgcagcgttgccctggggggacagcacaagcaagaatgcatcagaaggctagtgccgcaggaatgacacaatctaggtgtctgctctgcacagtgctatgcttactgaattttttgactaataactcatattctacacaatacaaaaaccagactccttttatcttcccttcctgctcctcactctcctgcaaacatttaagacagtgaaggaagattcctcttctaggtgagggagaagtggggtgggatgtttggagagggtggtgatgaactaaaaaataaagaaacacttaggctagtcttcagaatcagtttctgagtttactgtatcaaaacactggagcacacacttagggttggcccaggacactcttcaataaaagtctctgaagataaggaggtagatgtaaaatagaaataatccattctataactctggaagttccaacttcctggaaaactcaatatggagtcatcagctgtctttgttatggaaactgaactctctctctctctctctctccctctcctgtttcacagctaaattaggagacacaaaagagctagaagccttcattgctgatcttgacaaaactttagcaagtaagtacatgtctgatattaaaaacaaaaaaacaaaaaactaacagacacttctgataaagtgttgtaatgttaaccagcttgccctggggcagaaagtttcatcctaaggcttctataggtttagaaacaggaccctaggccggggcagtggctcacgcctgtaatcccagcactttggaaggctgaggtgggtggattacctgaggtcaggaattcaagtccagcctggccaacatggtgaaacccaatctctactaaaaaatacaaaaattagctgggcatggtggcgcacacctgtagtcccagcttcttgggaggctgaggtaggagaatcacttgaacccgggaggcagaggttgcagtgagccgagattgcgccactgtactccagcctggtgacagagcaagactccgtcaaaatagtaataataataataataataataataagaagaagaagaagaagaagaagaagaagaagaagaaacaggactctagtggctaggaatgaaattctgggataagcttgtgttaaagtagaccatgtgcgtttccaaacagtgagaacaggtcactagcaaacaatggcattttgtttgagaaatggagagcgagcaagactggagcattaccatcatgatggcctgtcaggcttttcagagaagaaatgaactgattaaccacaagtgcattattccaacaagccaaaagtcttccatcccatgggccagggtaattttcccaggttagatccagggtttgggtgaaatttaactttaagatgtgggtgccaaaagagagaattggcttgtggggcctttcaccagagacccatgccagtgactgaatgacctggattaggtatgcatacttgcaagcctcttatttgggaattacactaatggttacctgttttgtgtgaccaaaaatgttgagaactgaagacatcaaattataactgcagtataggggcccagaagaagggaccctcacaatctatctacacactctatttccaaaggataagattgcaagagccaggaggaccaactccagcttctgggatggaaggttcagcaactctactacggggggtcctgtttagtcacagagtgggctaggaaaattttgtcccagccccttaattttccagggtaagggttgattttctgtgagaagtatttaatgctattctttgctaaagagccgggtaaactctgaaaaattaaatccaaagctggttatttaaaaataactatgttcttaacactcttgcagacaaacctaaatatcagatagaaagtccttgtatcatttctatttgaaaattgaagattttattgcctcttttcttatgtactgcaccatcttacatcagaggaccagggcttgttttgacagggattattataattgcagcataatttgtattagacccatgtaacaagcctgtctacttcatggaaattgcagtgggttgcccagtcattccagttaatcagacactcatcgtgtgggaagcccggcattgagtttggtgctttgatgcacgtctgagacagtgtgatgtggttaagcataggaattgtgagcctctgagtggataaccttacctatctctcatttacaggtatgtgaaacaagaagttctgggtcctttcatcataagggagaagcttcagaaagttccgaggacctgctaaaatcagctactagaatctgctgccagaggggacaaagacgtgcactcaaccttctaccaggccactctcaggctcaccttaaaatcagcccttgatcccatttctgggcaatttagacagtgaaactgactttgtttacctgcttgcagcatattagaacagacgatccatgctaatattgtattttctcttaaaacatagctttcctgtaatttaaagtgcttttatgaaaatatttgtaattaattatatatagttggaaatagcagtaagctttcccattataatatatttttgtatacaaataaaatttgaactgaagtctgcttccttttctttttctttattttttaaaatatatttccattcaaataatattctagtgggagtaacatgcctcttgtttccttagcaaggcccctgggtgctgtctgattgcactagacaagaggacagtaaacttaaagtgttcctttagctcattcagtgctctggaaggaaatgctggcagacggctgctgggaaattttaatttcaggattgtgatttcattggaagttaggtttctattctgtctctgccctccttctcatatcttggcaccattgcaggtggcatggactctttctttgaattaagggaagtaccagttcttacaatccaggacttaaatacgagggaaagttgagatagctggaagacttgaaaatgatggtgcttttctaagatctgtgtggaggaagattgatggtgctggttttcatggaatgtccagcaaacctctggtgtgaagagtttgacgggtgggctttgcacatagaagccactgaccacttctcccacttgcctttgtgggggctggagagaggcataaaaataagaaagctcataattttcgtatctatgcttttctgtctttaaaacctcctctaaaataaccaggcattactttcataatcagaataaagttattttaaaacttgaatccctatattcctaaaggacataaatccaaaacataactacttataattttacttgtatcttcaaaagctaactactatatttgatgtgttttttagggaatcgggaaactaaattgcttttctttaacttttttcttttcctcagcttccaggaaaacttttgggttgaactcaaatattttctttatttcttttttaaaaattgagatctaattcacatactacagcacccagttcagcggtttttagcatatccacaggtactgcagccatcaccactgtctatctacttctctgtctccacgaacgtgtctattctggatctttcatataacgaatatgtaatcttttgtgtctggcttctttcacttagcatagtattttcaaagttcatccatgagtagcatgaatcagtacttcatttcttttcacggccaaatcataatccactgtgtggatatgccacagttgtttatctgttcattggttggtgaagatttgggttgtttccactttttagctaacaaataatattgttatgaatacccatgtattagtttttgtgtggacatatgttttcatttctcttgggtgtataactaggagtggaattcctgggtcgtatgttaattctgtttaactttttgagaaactgtcaaacttttccaaagcagtttggaaaaaccattttacattcccactagcaatgtatgaggattccagtttctctaaatccttgccaacttgttattgtctgccttgtcattctagcaggtgggaagtggtatcacgttgtggttttattttacatttcttttttttttttttttttgagatggaatcttgctctgtcgcccaggatgggtgctagtggcgggatctcggctcactgcaagctctgcctcccgggttcacgccattctcctgcttcagcctcccgagtagctggactacaggcgcccgccaccacgcccggctaattttttgtatttttagtagagacagagtttcaccatgttagccaggatggtctcaatctcctggcctcgtgagcggccctcctcggcctcccaaaatgctgagattacaggtgtgagccaccacgcccggcctattttgcatttctctgtgactaatgatgtcttttcatgtgcttactggccatttgtatatcttctttggagaaatgtctattcaaatccttggcccattttaaaattaggttgtctttttaactttttttaattttagtttttgtgggtacatagtaggtgtatgtatttatggggcacataaattgttttgatatgggcatgtaatgtgtgataatcacatcatggaaaatggggtgtccactccctcaagcatttatcctgtgtcacaatccaattataccattttagttatttttgaatgtacagttaaattattattgactatagtcaccctgtcatgctatcaaatactaggccttattcattcattccaactatactttgtgcccattaaccatacctacccttcccagcctctggtaaccaaccttctactctataattccatgggtttaactgttgacttttggatcccacaaataagtgagaacatgcgatgtttgtctttctgtgccaggcttatttcacttaacataatgacctccagttcaatccatgttgttgcaaatgactaaatctcattcttacgactaaatagtactccagtttgcgtaagtaccatgttttcttcatccatgcatctgttgatggacacttaggttgcttccaaatcttggctattgtgaatagagctgcaacaaatatgggagtgcagatatctctttgatatactgatttccttttttgggggacatatacccagcagtgggattgctggatcatatggtaggctctatttttagttttctgtggaatctccaaactgctcttcatagtggctgtagtaatttacattcccaccaacagtgtacaaggattcccttttctctacatccttgccaacatctgtcattgcctgtcttttggataaaagccattttaactggggtgggatgatatctcattgtagttttgatttgcatttctctaatcaataacgtagagcaccttttcatatgtctgccatctgtttgtgttcttttgagaaatgtctattccaatcttttgcccatttttaaatcagattattagattttttttcctatagagttgttttagctctttatatattctgactattaatccattgtcagatgggtaatttgcaaatattttctcccattctgtgggttgtctcttcactttattgattgtttcatttgctgtgcagaagctttttaacttgatgttaccccatctagtccatttttgctttagtttcctgtgcttgtggggtattactcaagaaatctttgcccagactgatgtcttggagagcttctccaatgttttctttttgtagtttcatagtttgaggtcttagatttaagtgttaaatccattttgatttgatttttgtatatagtgagagaaggaggtctagtttctttctttgcatatggatatccagttttcccagcatcatttattgaagagactgtcctttccccagtgtatgttcttgccacctttgttaaaaatgagtttactgtaggcatgtggatttgtttctaggttctctgttctgttccattggtctatgtgtctgttgttatgccaggaccatgctgttttggttattatagctctgtagtataatttgaagtcaggtaatgtgattcctccagttttgtcctttttaaaatttttttttattatactttaaattctggggtacatgtgcagaacacgaagttttgttacataggtatacatgtgccacggtggtttgctgcacccatcaactcgtcacctacattatgtatttctcctaatgttatccttcccctaccctcccccaacccccaataggccccggtgtgtgatgttcccctccctatgtccatgtgttctcattgttcaactcccatttatgagtgagaacacgcggtgctcggttttctgttcttgtgatagtttgctgagaatgatggtttccagcttcatccatgtccctgcaaaggacatgaactcatccttttttatggctgcatagtattccatggtgtatatgtgccacattttctttatccagtctattattgatggacatttgggttggttccaagtctttgctattgtgaataaagctgcaataaacatacgtgtgcttgtgtctttatagtagaatgatttataatcctttgggtatatacccagtaatgggattgctgggtcaaatgatatttctagttctagatccttgaggaattgccacactgtcttccacaatggttgaactaatttacacacccaccaacagtgtaaaagtgttcctatttctccacatgctctccagcacctgttgtttactgactttttaatgattgccattctaactggtgagagatggtatctcattgtggttttgattgcatttctatcatgaccagtgatgatgagcattttttcatgtctgttggctacataaatgtcttcttttgagaagtgtctgtttatatcctttgcccaatttttgatggggttgtttttttcttgtaaatttgtttaagttctttgtagattctggatattagccctttgtcagatggatagattgcaaaacttttttcccattctataggttgcctgttcactctgatgatagtttcttttgctgtgcagaagccctttagtttaattagatcccatttgtctattttggcttttgttgccattgcttttggtgttttagacatgaagtctttgcccatgcttgtgtcctgaatggtattgtctaggttttcttctaggatttttatagtcctaggtcttatgtttaagtctttgatccatcttgatttttgtataaggggtaaggaaagagtccagttccagttttcagaatatggctagccagttttcccaacaacatttattaaataggaacattttccaaattgcttttttgtgtcaagtttgtcaaagatcagatggttgtagatgtgtggtgttatttctgaggactctgttctgttccattggtctatatatctgttttggtaccagtaccatgctgctttggttactgtagccttgtagtatagtttgaagccaggtagcatgatgcctccagctttgttcttcttgccaaggattgtcttgtctatgcaggcccttttttggttccatacgaagtttaaagtagttttttccaattctgtgaagaaagtcagtggtagcttgatggggatagcattaaatctataaattactttgggcagtatggccattttcatgatattgattcttcctatccatgagcatggaacgtttttccatttgtttgtgtcctctcttatttccttgagcagtggtttgtagttctccttgaagaggtccttcacatcccttgtaagttgtattcctaagtattttattctctttgtagcaattgtgaatgggagttcactcatgatttggctctgtttgtctattattggtggataggatggcttgtgatttttgcacattgattttgtatcctgagactttgctgaagttgcttatcagcttaaggagattttgggctgagatgatggggttttctaaatagacaatcatgtcatctgcaaacagagacaatttgacttcctctcttcctatttgaatacgctttatttctttctcttggctgattgccccagccagaacttccaatactatgttgaataagagtggtgcgagagggcgtccttgtcttgtgctggttttcaaagggaatgtttccagcttttgcccattcagtatgatattgactgtgggtttgccgtaaatagctctgactattttgagatatgttccatcgatacccagtttattgagagtttttagcatgaaggggtgttgaattttgtcgaaggtcttttctgcatctattgagataatcatgtggtttttgtcattggttctgtttatgtgatggattctgtttatcgttttgcatatgttgaaccagccttgcatcccaggtatgaagctgacttgatcgtggcggatatgctttttgatgtgctgctggatttgatttgccagtatctttttgaggattttcatatcgatgttcatcagggatattggcctgaaattttatttttttgtcgtgtctctgccaggttttggtatcaggatgatgctggcctcataaaatgagttagggaggattccctctttttctattgtttgaaatagtttcagaaggaatggtaccagctcctctttgtacctttggtagagttaggatgtgaatccatctggtcctggactttttttggttgataggctattaattactgcctcaatttcagaacttgttattagtttattcagacattagacttcttcctgatttagacttgggaagggtgtatgtgtccaggaatttatccatttcttctagattttctagtttatttgtatagaggtgtttatagtattctctcatggtagtttgtatttctgtgggatcggtggcgatatcccctgtataattttttattgcgtctatttgattcttctctctttgcttctttattagtctggctagtggtccattttgctgatcttttttaaaaaaacagctcctggattcattgatttttttgaagggctttttgtgtctctacccccttcagttctgctctgatcttagtcttctgctagattttgaatttgtttgctgttgcctctctagttcttttaattttgatgttagggtgtcaattttagatctttcctgctttctcgtgtgggcatttagtgctagaaatttccctctacacactgctttaaatgtgtcccagagattctcatacattgtgtcttcgttcttattggtttcaaagaacatctttatttctgctttcattttgttatttgcccagtagtcatttaggagtaggtcattcagtttccatgtagttgtgcagttttgagtgagtttcttaaacctgagttctagtttgattgtactgtggtccgagagactgtttgttatgatttccattcttttgcatttgctgaggagtgttttacttccaattatgtggtcaattttagaataagtgcgatgagctgctgagaagaatgtatattctgttgatttggggtgaagagttctgtagatgtctgttaggtctgcttattccagagctgagttaaagcctggaatattcttgttaattttctgtctcgttgatctgcctaatattgacagtgggatgttaaagtctcccactattatgtgtgggagtcaaagtctgggagtcttaagtctctttgtaggtctctaagaacttgctttatgaatctgagtgctcttgtattgggtgcatatatatttaggatagttagctcttcttgctgcattgatccccttaccattatgtaataccctttgttgtctcttttgatatttgttggtttacagtttgttttatccgagattaggattgcaactcctgcttttttttgccttccatttgcttggtaaatattcttccatcctttattttgagcctatgtgtgtctttgcatgtgagatgggtctcctgaatacagcacacccaatttgccagtctgggtcttttaattgggcatttagcccatttacatttaaggttactattgttatgtgtgaatttgatcctgtcattatgatgctggctggttgttttgcccattagttggtgcagtttcttcatagtgttgatgttctttacaatttggtatgtttttgcagtggttggtaccagttgttcctttccatgtttagtgcttccttcaggagcttttgtaaggcaggcctggtggtgacaaaatctcttagcatttgcttaactgtataggattttatttctccttcacttatgaagcttagtttggctggatatgaaattctgggttgaaaattcttttctttaagaatgttgaatattggccccattctcttctggcttgtagggtttctgcagagagatctactgttagtctgatgggcttccctttgtgggtaacccgacctttctttgtggctgcccttaacattttttccttcatttcaaccttggtgaagctgatgattatgtgtcttggggttgctcttctcgaggagtatctttgtgatgttctttgtgtttcctgaatttgaatgttggcctgtcttcctaggtgggggaagttctcctggataatatcctgaagggtgttttctaacttggttccattctcctcggcactttcaggtacaccaatcaaacatagatttggtcttttcacatagtcccatatttcttgaaggatttgttcattccttttcactcttttttctctaatcttgttttctctctttatttccttaagctgatcttcaatcactgataccctttcttctgcttgatcgatttggctatggatacttgtgtatccttcacgaagttttcgtgctgtattgttcagctccatcaggtcatttatattcttctctacactagttattctagttagcaattcatctaacctgttttcaaggttcttagcttccttgcattgggttagaacatgctcctttaggtcagaggagtttattattacccaccttctgaagcttacttctgtcaattagtcaaactcattctctgtccagttttgttcccttgctggtgaggagttgtgatcctttggaagagaagaggcattctggtttttggaattttcagcctttttgcactggtttctccccatctttgtggatttatctacctttggtctttgatgctggtgaccttcggatggggtctttgagtggatgtgctattcctttctgttagttttccttctgacagtcaggcccctctgctgctggtctgctggagtttgctggaggtccacttgcgaccctatttgtctgggtatcaccagcagaggttgcagaacagcaaagattgctttctgatatttcctctggaagcttcatcccagaggggcacctgccagatgccagccagagctctcctgtatgaggtgtctgttggcccctactgggaggtgtctctcagtcaggatacatggggtcagggatctgcttgaggaggcagtctgacccttagcagagcccgatcactgtgctgggtggtccactgctctcttcagagacatcaggcagggacatttaagtctgctgaagctgtgcccaaagctgcccctttccccaggtgctctgtcctaggaagatgggggttttatttataagtgcctgactggggctgctgcctttttttcagtgatgtcctgcccagagaagggaaatctggcagtctggcctcagcagccttgctgagctgcagtgggctctgcccagttcgaatttcccagtggctttgtttacactgtgagtgtaaaaccacctactcaagcctcagcaatggtggatgtccctccccactccaagctcgagcatcctgggtccatctcagactgctgctgtgctggcagtgagaatttcaagccagtggatcttagtttgctgggctctatgggggtgggacccaccgagccagaccccttggctccctggcttcagcacccctttccaggggagtgaacggttctgtctcgctggcattccaggcaccattggggtatggaaaacaagaactcctgcagctagtttggtgtctgaccaaatggctgcccagttttgtgcttgaaacccagggtcctggtggggtaggcaccggagggaatctcctggtctgtgggttgtgaaaaccgtgggacaagcaggagcagactcagtccctcacggcttcccttgggtgggggagaaaattccccaaccccttgcacttcctgggtgtgatgacgccccaccctgcttcagctcgctctctgtgggctgcacccactgtccaaccagtaccaatgagatgaaccgggtacctcagttggaaatgcagaattcacccgcctgcatcgatctcgctgggagctgcagaccggagctgttcctattcggtcatcttgccagcgctattcccagttttgttcattttgctcaggatagctttgactgttctgggtctttggtggttccaaagaaattttaagattatttttctatttctgtaaagagtatcattggtattttgatagcgattgcattgaatc

SEQ ID NO: 527 - DNA, 970 bp, Homo sapiens
ggtggtagggcgggcgcggaccgtgctgggagcggcgcggctggagcgcagcgccgaagggactggcagggctgaagtgtgcgggacagcaagcccccgaatagccccggctgccacctcgcaggacccaaggccacgcgcgccgggcccagctgagccgcctcatgaagccgcccgcggcgcagggcagccccgcggccgccgcggccgcagccccggccctggactcggcggccgcggaggacctgtcggacgcgctgtgcgagtttgacgcggtgctggccgacttcgcgtcgcccttccacgagcgccacttccactacgaggagcacctggagcgcatgaagcggcgcagcagcgccagtgtcagcgacagcagcggcttcagcgactcggagagtgcagattcactttataggaacagcttcagcttcagtgatgaaaaactgaattctccaacagactctaccccagctcttctctctgccactgtcactcctcagaaagctaaattaggagacacaaaagagctagaagccttcattgctgatcttgacaaaactttagcaagtatgtgaaacaagaagttctgggtcctttcatcataagggagaagcttcagaaagttccgaggacctgctaaaatcagctactagaatctgctgccagaggggacaaagacgtgcactcaaccttctaccaggccactctcaggctcaccttaaaatcagcccttgatcccatttctgggcaatttagacagtgaaactgactttgtttacctgcttgcagcatattagaacagacgatccatgctaatattgtattttctcttaaaacatagctttcctgtaatttaaagtgcttttatgaaaatatttgtaattaattatatatagttggaaatagcagtaagctttcccattataatatatttttgtatacaaataaaatttgaactgaagtctgc

SEQ ID NO: 528 - protein, 135 aa, Homo sapiens
MKPPAAQGSPAAAAAAAPALDSAAAEDLSDALCEFDAVLADFDFHERHFHYEEHLERMKRRSSASVSDSSGFSDSESADSLYRNSFSFSDEKLNSPTDSTPALLSATVTPQKAKLGDTKELEAFIADLDKTLASM

SEQ ID NO: 529 - DNA, 835 bp, Homo sapiens
gcgggcgcggaccgtgctgggagcggcgcggctggagcgcagcgccgaagggactggcagggctgaagtgtgcgggacagcaagcccccgaatagccccggctgccacctcgcaggacctgtcggacgcgctgtgcgagtttgacgcggtgctggccgacttcgcgtcgcccttccacgagcgccacttccactacgaggagcacctggagcgcatgaagcggcgcagcagcgccagtgtcagcgacagcagcggcttcagcgactcggagagtgcagattcactttataggaacagcttcagcttcagtgatgaaaaactgaattctccaacagactctaccccagctcttctctctgccactgtcactcctcagaaagctaaattaggagacacaaaagagctagaagccttcattgctgatcttgacaaaactttagcaagtatgtgaaacaagaagttctgggtcctttcatcataagggagaagcttcagaaagttccgaggacctgctaaaatcagctactagaatctgctgccagaggggacaaagacgtgcactcaaccttctaccaggccactctcaggctcaccttaaaatcagcccttgatcccatttctgggcaatttagacagtgaaactgactttgtttacctgcttgcagcatattagaacagacgatccatgctaatattgtattttctcttaaaacatagctttcctgtaatttaaagtgcttttatgaaaatatttgtaattaattatatatagttggaaatagcagtaagctttcccattataatatatttttgtatacaaataaaatttgaactg

SEQ ID NO: 530 - protein, 145 aa, Homo sapiens
RARTVLGAARLERSAEGTGRAEVCGTDRIAPAATSQDLSDALCEFDAVLADFDFHERHFHYEEHLERMKRRSSASVSDSSGFSDSESADSLYRNSFSFSDEKLNSPTDSTPALLSATVTPQKAKLGDTKELEAFIADLDKTLASM

SEQ ID NO: 531 - DNA, 175603 bp, Mus musculus
  misc_feature (1)...(175603): n = A,T,C or G
acccacattcttcttccataaagtttgtcagtaaagattttatagcaatttgagtaaaagtagccacatgacttatactggaattagataaaattcatcgatgctacaaatagataatcatgaaatatttgtgtacatgtaagtaccgtattttaactaaaaatcagtattagttataaatttttaattaaatacacaaagataaaattaatattttaagtttacatttggatatctagaatttctaggccaaccatcaatagcgacaataattctccgtccttctaacgcagaagcctgtctggtttctatccgaattcgtggaattctcttatcagcgggtgtaaagagatgtcttcttgactagagaaaattaaaaagaagaattacagtcctgggccaatcacaggttctagcacatgctcttcaagtgcactctcactgagttacagccctcactgaggaaaaccaatttatagtcacagcaaagctggaaaaagggcaaagggagagctgtggagtctagtcagacattatcacttttcaacactgatagcaagtgctttgcttacctccttaatatcagacttggaaagcatgccacaatacggtctccagttcctttttattatccccacaactcgacctgtaggccgtaacattttttcacttacagcagtcttaagctgaaatataaaaacaagaatctttagttatatgtcttctaagtaaaatgaagtcatttttcttccaaattagaatatgcatatggatactaacacattcaagtagcacacaatgacatggaattcagaacctttatgcttcaaagttctagacacaagcaaacctctgaacaatgctaattgttccatgataataaagcactctatgaatgatgccaagatgcacatagctgagtgaatgtgtcagagctcagggctttcaaacttaatgtgatggtctactgacaaaacacactgtctaagaattatgagactaagatttaataccagtttagactaactagatatatgtagttaataattagttcactatgtagttatggtgaagagcatgttatgttgtatgaaacccattacaaagtaaatatatctttaacagttctatcttaccccaagttaaaagtcaaataaaaaatgttaaccactaaaaacagaccctataatattagacctctaacaattccggaggattgtattatgcaagagtaatgttacagtcagacttcaggaaactgactgtaactaaagaggtacacatgctagacctgtgctatcctcataaaatgggtaaataggtcatctctggaagacttagtaatgcataagaaataactcactcttccaataagtatattagtagaaacaggttaactaagcatgtctaaatacaaagatccagaaatacatgttctaaaacaattttaacactgcaaaaaatgttcaggaatttcaacatttctatttacttaaactgcattaattcagaccatatacagaatgtaacagacatccacttgattcacaaattgaaatacttaaaactcatttaagtgtaatgtcattaaaagaaaacaagtttgtgtagttaaaacagaaatcaattacgtacataacttgtaataaaattaaaagtacagaatttgggagagatggctcagtagttaagagtactgactgcttacaactatcaggaattctaactctaggtgacctgacatgcttttctggcttctgcaggcaatgcacactcatgttacacagacacacatgcaggcaaaagacccatacatataaaaatgaatacaattgttaaaaatttcagaactatggttttactcaataactataaaaacaatggcatgttaaacagtacaacaggacaaaaaccaagacttgctttctctcataccaggagttctctctcctcatctttctccacatcgtcttcattttgaccttcatcgtctaaaaccacggaagacggtgccacccactggctcctgggcagtagctccacggccacaatgtcttcatgcacagctctgtttagatgcttaattccctgtataagtatctgtggaaaccaataaatgccatgccttgaaatagattaaatgagaataatgaaagctatctaacagaaggttatagtctaactactgcatataatatctatctctctatgttttttcctattttaaaatcatcatctgagttgggcttgttgggtaaacgtgaatgctaaacaaacttacgtgatctgaatttggtcccagagcccatggtggagggagaccggaaaatgtcctttatttcacatcatacccacaactcacagtccacatcaaatatacacaacattagtcgtgcaaaattaaaaaatactactcttcatttcataatcttaatttttaaattttaatgagaaaaacagttcagtaagtatatgggttttgtttatgactccaccataaacaatgtgtataaaacatttgggagaaccaagctatttcaatctcagtaccttggttggtaaaaaggaaaacaccagagctttcataggttgggttgaagactaagtgaaatgctccgagtcaagttagacaaacttgatgaacagcacacactctaagggctggctgctacctgctttcatgtttgtgaagctctttttgttatgtaaatactatttattaaaagtagatacagaacacagaactatacttgacggttctctttaatagtgagtccccgaaacttctgaaacaactggcctcatgaagtcattgctgcctgactgcttactcctcccttaccgactagaagcagcaggtaagcctgagaaggagctgtgccatgaagtgctgcctgcatgcatgcagatctgaatttcagccctcagaccacagacactcctggacacggtgctccatgcctgccattcagtcctaagcaggtggagacagcagcctctctggaactgactggacagccagtccagcccaactgataagctctaggtcaaaacaaagcctgttttccaggacactctaaggccaccaactaaggctgtcctctgtcctctacactcaaatgtacatacatacacacacgaactaaaaataaaaagtgaaagccaggcggtggtggcaaatatctttatcccagcactaggaaagcagaggcagacaaatctctgtgagttccaggacagcctgggttgcacagagaaaccctgtctttagagaccaaatcagggctggtgagatggctcagcaggtaagagcactgactgcccttccaaaggtcctgagtttaaatcccagcaactacaaggtggctcacaaccatccatgagacctgacaccctcttctggtgcatctgaagacagctacagtgtacttatttataataattaataaatctttgggccaaagggagcggggccgactggagcaagcagaggtcctaaattcaattcactggattctgggtaggacctcagcatagaaagcagggatgtgctgcactggggaggattctgcctttgtttcaacggaggagaaaatgctgccgattccattcacactgataaaatgagatttaacagggacagactccgtgaagaacctgactgcaggcaagaaagaaatcaagagcagaccaggtcaagtacgtgctggtcccttttcacggaacagctctgaaactggttgacaggtgaaaatgtttccagctagaaattcagctatgcatagtcaataaaccttgttggctacagaatcctcaagacttaatattcccatccttttaagtggcatagataaaaaatttgttacaggttggttattcaatccaaactaacataaaaaagacaggcgccttcccatctcaagcagagagccgggagccctctttagctgaatggcgcacactgcacagctcatgcactgttcagttattgcagagctgtgcattactcatctgtttatgtttacaccaacgaagtcaacgcagccctgacaaggttcacgttcagggatgctgagacgctgagggatatttactccagcatcctgcctgatcctacctcaaactgcctcaatgctgttccctcaaaattctgcatccaggacagctttaatgaaagctgttgacccaattggtccaatatcagtaagactgttctagtcaggtaggacgtcagttaagccccgaactttctcagcagagactggacagcaaatgcaacagctggctttcttaagagctggtcacagctctcaaatgggaaacaatgctcccaatcagccggaagagattttaagagagccacatcccattcccaaaagacaggtagatggctcatcccaaacggggtgaaaagaaaagggggggacagggacgggacacataggaataacaggataaaagggttgattattgagtctactcttagaccaaagaacatcaacaagccaaatagttgtacatttgatacagatctttgtacactgatacaaaatgaagattacattttattacaacatactatgtatatgcttcagctcttgtttaaggtattatacctacataattcttaaatccgcaatgttaagttctagtccttttgaaatctactattacaaactgccaagaattaagtaagaaaagcaagttagtagttagacaatcaaactcatggtcatgttagatactattctagttaattacagcaagatattttcaaagttgaacagatagtaaatagacaggcaattcagatatattatagatacaaactgtccatgcttcaactgctgatagaatactgtccaaaccgaacaaacgagaccagggaggtcgactgctttgccaagacaaagtcataagatattctgggacagagggctgtagatgctccaatgttacagagaaattttggggaaccagccaggcagccagctttctctatttttctagttttggaagctgcttgcctaaacttcctgtacattcaggtaatatttattccttcacagggctctgagagggttgaagactagctagtctcaaaattaagcttcaatttcttaggattatttttagatctaagaagatattgggtttacaaatacaagttccatataaaatgatccaggtatggaactctagctcaccaagacagtacagatgtagagcactttcttcaaagttgccaaatacaaatgcactaaacattgtgaatacaatcttacctgatagttttcataattattattattgtacatagtttattattgcatatagtttattactgtaaaagaaaaagcttttcattgaaataaaagaggaaaatgtagagaatctcttatgcaatatatgtatttatcacctgtcaataatgctgtgggtctattagcttagacaggaaatagggaggtggaagttccagttcagagaaagaggactttgggatagagtgaggcacatgggagattcatctggagacagtcgcataaacctgaggagagctaactaaccatgtgaaagacagaataacctaattaggataaataagttaccatttagtggggaataagaaaaaggttatggcctaggaattaattaataaataattactctcagagttgctattgctgggaacaaagagactgggtggaaaagcctgcagctatccacaacaataaaaattttttaaaaatttaaaaggcatttatttacatacgtacctctttttcctcttctttgtctccatgaatccatactgtagcctccaaataattttccctgctagctctgaatgttccttgaagataggaaccagattttatgccttgttggagcttgcttaagggaagatgctctgaaaatattattttcccactttctatttcattctatgaaataaagcaaatggaaagtctgtttatttaagacactgtttctacaagtattgatacaacttaaaaatctgtattattaaatatacaattgaatttaaaagaacagagcaggacattttcccagaccacttgtatctaaaataactcgctgtaaagaaggtggtatctttttatcgatgttcaacaccatacccactaagcacaaattctcttgaattgttgaaatgtgtataatgagtattatatttaaactacatttaatcaggtacatataactagtaactaattattagaatactccaaaatatccaaaaatatatattccaaaaggccagtccataaaagaatgcttgtatcttccagcattcttttagttttgtaaagcaactaaagacaaacaggatgggagaaactgttaaaaggtacatgtgtggtgttctattagatagctagctgcctctgtaacaacagctatcactgtaatcaggaaagaaacaggacagtcacttgagtcatgtttctttatttttttaaagtgcttcaaactctatttaaggatggtgctggcactgctttaatctgagtactcaggaggcagaggctgtagaatctctacgattttgaggccagcctgatctacagagcaacttccaggacagccatggctgcaaagataaaccctgtctcgaagaccaaaagaagtgccacagcttgagagtagccactctaactgtacagaagttcactggactctgggtctgactaacaccactgcatagtttttgtttgtgagatcttatgatcgatagtcatcatttacatttaccatagctacgtgccaaacaagacagaatttcatgaatgcttcagattgtattccattcacctcttaataatggtatagttactactaaatatgtgtgtacatacttagtacatatacacacacacacaaaaaaaaagtttaatttctcctgtggtcttttttcaaactgtcagttatagtaactccgcgcttatccctcagcctccaatcttcgcactgatgcagtatgtcttatactgccattacaacagttttatgaataagttacctttttgatcacagctctctgctctccaacccactcttatacagcctttctgttagactgacatttaatggagagaactcaatctttactgtctcacttcagagtagacctttacttaggtcatcactaaagactgcaaacttcctgacgcccagcatgaatccctgcttcccactatagggcctgctgtaatactatgtatctccttatgactccccccaccccttaggcttcaccttgtatgcatggttagcctacccacaatggctaactttatattttcatcttttcaaaacaaatcatgctgaaacataccatttcatcggacaagtaagcaagacggtctataagttcagggttagcagtcaggctctttacgtattcttcacctgaaaaataagttactatttttaaattcaagtacctaggcactgtattgaggcgtgaggaaacatggatggttgtcttttgacaggacacctgccatttttttttaaaagatttatttattatatttaagtacactgtagctgtcttcagatgcaccagaagagggcttcagatctcattacggatggttgtgtgccaccatgtgggtgctgggatttgaactcaggaccttctgaagagcagtcggtgctcttaaccactgagccatctctccagcccgtcacctgccattatgaataaatggaacaagacccatgccaactgtgatcctgactgaaacagagcaatgggtctagcacatgcacatcttttactatgtcaactgcaaagaatgaggagaaacctaacagccacaatctacaacttgcttccttagctcactgagaagtttaaaacgtaagaggactgatggctcggcagctagacacacttgctgctttacagagggtctgcttcctgttcccagcaccctcctggtagttcacccctaccccttagcccagggtttccaatgcctacttcttacataagggaagtcacccacattaaaaattgaaaactattgtttcaaatgtaaaaaggccacatgagatcacccaggacaacgcagctgggtcatgtgaccgcgcagcctgatcctaatgtttctgtacagcgggacacaggcttggaagcacccacactcagacctacacgtgaaggctggtatcccctcttgcacagctttctctttgttcttcctgtcattggttatcaggataacttgcagctgactgtctgctgccaccctcttcaggtgctcgttgtaccacttcgctgcgactcggatggctctgtcattcctgtcattggcattctctccctgctcttgctcgatgtaggtttctctaaatgtaaaagcgacaggaaacacaaaacaaaagctagccagtggggtcaaaacttctgggacataaatgttccacagccactggagtttaaggaggcacaatgaatgagcagcccacaggtggacacactgactatctatctatctgtctgtcttgtctgtctctctcccccaccccctcctcctcctctctaggagtgtgtatgtttgtgtgtctgtgtgtgtgtgtgtgtgtgtgtgtatgtgtgtgtgtgtgtgcatttagttcctgcggaacttagttccaagttccatgttcctgaacattccggttcaggaaacttggaactgacaggagagtgctatttgcacatacttggcataagcaggttgcaaagcacctacgatgcataagaaaatttcatacaacaaaatactcagttcaaaatgttaataatgtcaaagctgagaaagtgactttaagcatcatagatacatattatctactgtttaatataacaggcagctcattatgtttagaaatttaatttcaataaatcagatgtaagataaagcttattaatcacaaactcccacatttttctcctatatatttgtcactcacataatatgggattacaggagtgtagatggttcttatcgccaaagaatcaaccattcaactcaatagacaacttaaagggagcatttcagaagtaaaaggacgactttagcggctagatcctggtttagggtgtgacctcactaacactgcgaccttagatgagcctatgtaggtagcactgtcttccacacaaccaggtaaccaccaagcagcacaggaagctacagcctgtgtttgataaattcctttccaagaagtctgttaaatttaggtagccctgtggttttgtgatacttacttatggtgctcattagtgaaggtatagaaatgcttttcctggttattggtcacatccctgattcgcttgtagatgggggcgctccggtttctcacttcttgcatcactgtttgtagcacaatgacatttctgatggccgggtgttcgaggacatcaatcttaaaaaaccaaagccaaatgttaactcccccgttttcagttctaccttgaactctctgcccagcctgaattcttgtgacagtttaaaacactgactctccgttaggccaaagtggtacttggctgcagaaaaaacttgacaaagtcactaaggggggaccctgtaggcctgagacgatgacaagcacccataatcggaccacagagtttgcaataccagagctattaataagtaaattatgctggcccacacaattttttgttcgtaggcacttacaagctgcctgggggtcgcaatctggaggccacagaagcccaggtccccggcttccaggcacttataatctaaagtagaagagacaccaggggttagaaaatgtaacgtgtctaaaaataagactccaagaaccgaaaaaaaatatatatatataaataaataaagtgacatcagggaacggtacctcagcctggatggcaggatgcgagcgagggtagccacggtacttgcctctctccatccaacatcccaagacccgcctccccggtccccagcgtccctgtctgccacgccccctcgtcaccacgcggccccgcgtccacgcacctggtgcagcagcacattggtgtccggcagaaggtagtgcggccacgggcagaggctgctcgcctggtcccggggctgcagctccagggccgggcccgcgtgcgccccgccgcaggccgagcaagccggcgcgccgcagccgatgtcatcccgcaggtagtgctcgcgcacgatcttcaccacgccgcccgcgcgggtcttcttcaagaacgtcttggacctgagcatctcgcctcgcggcgtgggatcccggccgtcagctaagaaaccgaggcgcggccacgcgcattcccgcttttgcccgctggctggtgaggtcactctcgcgagaaaacacgaaggcgcgttcgttccccgacggtcgcggtgattgggcgagtgttggttgtttcctcccgccggtgggcggggctttcctctggactacagctcccagcctgcaccgcttccgactggcttccgggaaggagtgagcttgggtacctgcgcaccccaggttcttccgacttcttctggggcacggcgtgtggttgtcttggtgaccgatcctaacggtccggtagccccgagatacctgttgaggggtggcagcctgagctgctgactgaagacgccattggttcttccaagagtccgggtgaagctggtgttatccttatatgcggagttactgaccattgagaggtagcttccaggaatccctttccctttctttctcacgcggcgcagagatgctaaaatgtaggaagtttagaatgtacggatttcttaatcaaagagggagaagccggtccctggtccttggtaactcacgcaaggatttgttttcttattttactttttttcccccccaatcctttccctttaaaaaggaaagaggcggattgtactgaagctcttcctgttcccccccaccacacagacctccttctttagcgttcctcttagagaaactgaaatagctagttctataactattttactaaatcgtgtcgtatttaaacaagggagttacaaaaagccttgtgaaggctaaaatgtgctattcagaatattcgagtttgtacccttctaacctctttaggtttttcaagttatttaaaaatgcttttgtcgcactctgagcctgttttcaaatttttcggtgatgccttaactgtaaaactaaacctggcatgtaagtcttgctttataaaccctccaccgacataccaacatttttctctctgtgtccagatttcaatactacttctgtgaggaccttcagtgacaaaaatcaacctctccttgagtttgaaacttagtattatagggctatcctttctattttacatgactttatttatctgttaccttcaagtaagattcttgccccgagacacacacacacacacaggacaatgggtgagttcatgataggatttagtgagtctgtttgatttgaacactaatctggcttacatttgggaccttccaatacctaatgatctaggcgatccttggtgtctctttaatgctctgtatgccctgtagtaggtttttttttttttgtatatttaactttatttctttttattctacagaagattgattcaaataataaaatgtctcgcaaaattgccaaggaaccaaaaaaagtaaatatctctagttctctggagtctgaagatattagtttggaaacaaccattcatacagatgatgtctcatcatcagaggagcgagaaggtaaagtcaaaatcaccaggcagttaatcgaaagaaaagagatacttcataatattcagttactgaaaatcgagctatcccagaaaaacatgatgatcgacaacttgaaaatggattatcttacaaaggtaaggtcagatgcaaactgttattctcttgaaactgaaaaggaaagataagttggtgtataggccgggtgcggctgcacatgcctttaatcccagcccttggaagcagaggcaggcccattgctctgaattctaggccatcctgatttacatggggaggtctaggatagccagactatgtgatttttctgtctcaaaaacgaaaaaacaaaacaaacaaacaaacaaaaatatatatatatttggaatttaaatgccacacttcatactccttgtccaatgttgcctttctgcagtttgcgtattgaaatggggtgttttaagtgtatgagtgagttacctttgaaggctcaagttttagagtgtgacattagtggaatatgtattttcttaagaatgaaaatgtagccaagttttctgggactgactggtctgataggaagagtgaagatcataactgtattgctgaatctcaattgtcctttctttagaagtcggatttccttgttaaccttcctacacagttactctgtctgagaggtactgtgtcatagaagtcaattttaggtgaccattgtctttagcaagtgcgttatcctttagtggcggtgaactagttgtctttttgccttgtgtggtacttagtcccagggtagttcatggaatgcctggtagaggtgaaacgagccctaagaaatagtgactggcctccagacacatctctgcagtgttacttcttctgttcctaagacagttacttgtttctgacagtgaactttccctcttcactctccatctcagctcttccggcaaaagcccgtgtccagcagtttgtttacgttgttatacttcttcttgttaacttggtctttcattttagctctatgctacttaatatgatatgcatattaagatactcagcgtttctctactagaagataatgtatttctttggggccaatgagataacttcatgggtaaaaatgcttaaccgtccaagcctggggacctgagctccatccctgggatgtagagtgaaagagagctgactcatggcacgcacacacacgcacacgcacgcacgcacacacacacacacacacacacacacacacgcacgcacgcacactccacgacttagtaggaagaaggagagggcgagagagatagctaggcagttcacagagcttgctgctcttcccattacaacactggctcagatttcagaacccgcaatttcagaggattcagtactgttttctggccaccgagggcaccagactgaaacatacatatgtgcaagcaaaacattcagactcataaaagttaaataaatcataaagtattggtttaaaatttgattatttacttatttgtgagccgcttgggatcaaacccagggctttcagcctgctagatacatgctctgcccatgaggaaaatacatgagaaagaaggaacaatttcttaatggggccccttcaagacctcaaggttttaatgcagtaaagaaatagcacttcacattaatgactgagccagtagtacacattaggctatagctgttattcttgccttgctctctctgagatgctgaaacaaaaaccttaggaatgggaatttgttttcactgtgtggcagccaatatatccaggagtgggcgctggtcatgagttctgtccattcagggtcttctgcctcttgctgagtcctcacctggcagaagggcggctatttttctccatcagtctgtttcattagggcagtcactcctgtcctaggcacactgcctgtgcaacctaagcattccccagacggcctcccctcaactcctatcacattggtgactggttaccatatagggaagtagatatggaccaaattatacatgtacacacacccacaaacacatgcagacttacttactggttttgttcattttatctctctcgctctacatttattttgtgttctgagagcacacatgctgtagagcacatgtagaggactcttgtaggacttgctctccccttatttttcaatttagtttttgaaaatttcaaatctgacttcagtacgtgcatccttccccctcctctgccctctgtccagcttcggtgtattccctggccccctgcacctgcacccacacccccaaattcaaggcttcttacttggcaagaagttctaaaatgtaatagtaatacttgatcaggaggtaaccaacagccaaccaactggattccagcccacttagtagaaggactttcacacctggtactataagcatagccacctaacccttggctggcgaggccatggacctagaggaggacctattgccaccatgtccctaaccactacaattcctagctgcattacaacttatccttgtacccacagatgaataaatgtagctttcaccccttgtcaaacaggctttgttttgcagcagatcacaatggagaaaacaactgaccatggggagtccggctcaactgatacatctgtgatgaaacccctgtatacctaaggcctagggaacatcttggaagaggagggtggaaatattttaagcccagatctgctggttctttcctttcactgtgtggccttcagggatctaactcaggtcatctagattggcaggaagcagttaccaccaagccatctcaccagcccatgtttgtcagtgtcttttaatagactgtagggaccctgagtgcaaggacagacttgtattatgttactgctggattccagtactgtgaatagtgtctcacgtacagtgcttaactgtttaacctcattctgtccacttaggtgagcattacagactttgacaagaatagttccactgagtagtatgggacagatgtatatggaagctttaatctgaaagatagaagggaaatggtttatagcctaggagtaatgtgatcaaggcagtgatgtttgttgttttgtgtgtcggaggctgggtgtatttgtttagtggtaaaggtgatccaggagagaggggtcttgatgtaagaggaatgctgttagactcatctgcttgttaatgtggagacaggaactgtcagggttaaaacaaaggggaaaggaattagactcgcacaggaccaagtgcataggggtaaacagaaagcacaggctattagggaactggagaatttatatggactgagccatgtgctggtttcagttagtcacaaagcaacttgacaaaaatctctgggagggtactctgctacaatgagaattttttacagagacagtgacttgaaagtggtatactcttgttacacattttaaaggcaagataaaggaagttgtggaagtttgtgaaatatcaggaaaggaagttggtgtgatagtgcagacgggcatgtcaagagagcccatttatcttgttaattcagagaccatgaggttagtggattgagcacttaattgttttgttctgaatgtttgtgttttcacctccatggcagttactggaggatgcacagtgctcaggttagctcgtgacttacagtgtgagcagagagtttacatgaagttcccatctcagtgagctctgtgtgtaagctagggcgagagtcatcatcgtactcgtagcctggcagaacatccatatgacggtagcttaacccagaaccttatagacccctattctggttctcttgagtggtttgtgttgttgttgttgttgttgttgttgttgttgttgttgttgttgttgttgtgctcactgaaagctgaacttagaactgactagattctctctgtgcagattgaggagctagaggaaaaacttaatgacgcccttcaccagaagcagctgctaactttgcgattagacaatcagttgactattcaacagaaagatgccaagtaagacatgcttttcacaaaaacctaacatctatttatcaactaattttaatcttgcttatgcattttgcatttatttatagactataatagaggaaatttaaattagatatgcttatcttcacagctagaccaccaatgggcaggttgctttataacgctgtacaaagcacacagttaagattcaggattcattccacagatactggcctggataggcaacctatagattacaaaaggagtctctaagttgaccacaacttggtgtgtagataaacttttcttcatccactctagaaaccatcctggattatcccggctattggatttcactgctgtttttatatacgtagatattacagtgatcaagagttcaaggtcagccttggctacttgatgagctggaggccaactctggctaggtgaggtgttatctcaaaggagcaggcaagaaacaaaatatcgttgtttactttcaaatgtacctatgccaggtatacttatggaatttatttgtttgtttttctgagacagggtttctttatgtagccctgactattcaggaactagctctatagaccaggctggcctagaactcgcagagataggcttctctctgcctcccaaatgctggaattaaaggcatgcaccaccactacccaccatactcacgtaacttaacgtgacataaacaatgatattttagtagaaaaatatgcattgtttctagaataaattcacaggaaacactcaataaaagtgaataaccttttattcccagcacttgggatgcaaagacatgcagatctctgtaagctaagtctggtctgtaaagtgagtttcagccattcagagctattgagcaagacttgttgggaaatcagataaataagtcaataaaaaaaaaaaatcagtagtgcctggtggtggtggcgcacgcctttaatcccagcacttgggaggcagaggcaggtggatttctgagttcgaggccagcctggtctacaaagtgagttccaggacagccagggctacacagagaaaccctgtctcgaaaaacaaacaaacaaacaaacaaacaaaatccgtagaggcacaataggtttaaagactaagcaagaacacatccacaaacagtttcttctcagatttttgttggtgctgtttaaggtctcttctctagactggggaagtggctcagaggtaaaatgcttgccagagaacccgagtttgaatgctgagtgaaagctgagagtggtggtatttttctaaaaacccagcacagtgagggtgaaggcaagcagatcccagcagctcactggccagcaattctaggcaaaagagcgctgtttgggttcagcgcttgctcctgtttttagaaagcaaggggaagaaacagctgagaaggacattctagagtcagcttctagtctccataccaccaggatggctcagacttaccttatgagggaggctcagtgttactgtattagagatgcagtatcaggatgaaagagaaatggaaattagtaactaggccccaaagctgacacagaaagctttaaaactttagcacagtagttatcaatgttccgaatgctctgacatttgatatagttcctcttattgtggtgactcccaatcaaaacattattttccgttgctactttataactgtaattttgctgctgttttgaattgtaatgtaaaatctgtattttccaatggtcttaggtgatccctgtgaaagggtcattcaaggccccaaaagtgtcctgaccccacaggctgagaaccattgtgtcagcagattaaatgtataattttgtgatttgaattttttaagttattacttaagaatgttgattctctaataatttgggtttttatatttactaatctgtatggatttgctacttcatatttaattagatccataagtcagcattgtggtagccgagaatactatatggaactctgaaagaagtctcagtgattttaatgcttgccataaattctcttaatgtagaaaatatcaagaactaatgaaacaagaaatggaaaccattttattgcgacagaagcaactggaagaaacaaaccatcagctgagagaaaaggctggagatgttcgccgaaatctgcgagactttgagctgacagaagagcagtatgtgaagctaaaatcttttcctgaagatcaactctctattcctgaatatgtatctgtaagtgtcgtgcatcatctggacaaaactccaaagctcagggtagtagcacatactgtaatctctgtcctcaggacatggagataggatctacagagtgggttagaagccatccctgtgtcagaaacaaacacagtaaaaagaaacccaaaacggctacatctaatcagactgaagttggcttggcatttttatagaggcattcgttgtgtatttgttttttctgtttgtgttttaagttggcatatgaagtaattccttaccttttgtgcattgtgacatgtgttgctcatcctcctctttgtgcccacccctgcctcctgacctcctgacctcctgacctccttccagctggtgcctccctcccataagtggtccctcttctgcttcctaatcagtcaccctctctagttcccactccacctaagaattcttccctctcacaccccctgcctaggtttggagttacatacatttaattgtaaattaagtttcacctaggagagaaaaggtatttgtctggctgaataaaggcaggaggtgggaaaggagatgcatgtaggataagtacacttaaataaaagaaaggagaaagtggaggacttctatgggcaaaaacaagaaagaggttagaatagaaaaaaacttttcaggctggagagatggctcagcagttaagagcactgactgctcttccgaaggccctgagttcaaatcccagcaaccacatggtgactcacaaccatctgacacctcttctggtgtgtctgaagacagctacagtgtacttacatataacaataaataaatctttaaagaaaaaagatctcaattatgaagaagttaaaaaaactagataagcataaggggctagaaataggaagatacaagtattttagcaatgtgtagtcagtggagcatgacaataaaaggagatatagagacaacatgggggaacccttaaggggaaaaagggaaatatatatatgttgtctttttacatatatatatatatcctaatgtaaaaatagatatttatttgtagaattcaaaaataatttctaatgctggaaaacacaaaaacaaaccaacaaccaacctgaaaggtgcaccaaaaaggggagggggaatcacaatatacaaaagattaaacaaaaaaaccgacgccctgcagtggtgtcctttactcccagcactcaggaggcagaggcgggcagatttctgagtttaaggccagcctggtctaaagattgagttttaggacagctggggctacacgagaactcctgtctcaaagaaaccagaaacaaacaaaacccacaacaacaaaaaccaagcaaaaagggtgacatgtcagagcagctgcctggagggccctcagcggtcagagacagccagttccatctgtggagacacagtcacttgctcgtgtggactctgggcgttcctgtggttaatgctgtgtaggacactatagagaacacatgacaggattccccttccttcctttcctgggtagagtttccttttatgctgtagccaggccgtaggcctctcctgcccgtgctttgcactttctaggaggcagtttcttgcagtctccctagacacagcccatcctgccctctggtgtggctcaggttctggttggagatgtctcccaagggtgttaggaatttggccacagccggtctgtgcaggtagagaacctgcctttgtacttgcctgacgtgcagagtttgatcctgttggaggcatacagctatgggtatcagcttcactactggaccttcagcattcctgggctctaatggtgaatggggcatcagtggcttcggcagttgagtgatgtatgcagcgacataggggccagagctgttaactttaggattctttttagttgagataggttgtggccactgagggcaagactgtgtttctctgtccacttctctgcctgagcggagcccccagctgcctatcctcccctctgaccggtttccactcaccttgctctccactactgcctgccctcttgggcttttccccatcctgctattgcggcagtctaaactgagcctcactggccagggttttttttgttttgttttgttttgtttttttctagacagggtttctctatgtagccctggctgtcctggaactcactctgtagaccaggctggtctcgaactcagaaatctgcctgcttctgcctcccgagtgctgggattaaaggtgtgtgcctgtacgccaccaaggcccctagggtcttcagtttgttacagtgggtcctgtctcaagatgactgttacttcccacccactaagtcatataaaaagtcaacagtgagatctccctccactgcgaagccactgctggagggatgcgtggccactaaaacccttaatatcacttgaggttcttgagggatttgggcttatcctgagggtaggactgctggcattaatttggggtaccatttggaagtcacttttggtcactcaccctctcctactagagaactgttagtgtaaagctatatttagcttatatatgttatatatgtgtgctggtgtatgtgcacatgggtgtgaatgcagtagaggccacaggacagccttcaatgttactcaggcataaccttgctgtttacttattcattcattcatttttgggacagtctcaatgacccggagcttgccatttaactaggatagtgaagcccagggatttgcctgccataccttcccagcactgggataataaccacgtgccaccacatctggcttcgttctatagggtttggatatttttatttttgatcttttcgagacagggtttctctgtgtagtcctggctgtcctggaactctgtagaccaggctggccttgaacccaaaaatctgcctgcctctgcctcccaagagttgggattaaaggcgtgagccaccattgcctggcttttactttctttctttcttttttttttttttttcagctcacttcttagtagtccgtgcgctgtctttttctctgcattgttgaagtattcttttatttcctttgtggatttccaagccccttctctctctggggtagccttgtttgtcttactctgactctcctctggatcatccaggaacaagtttagacttaccttacctaaagagtattgcttttgaaacacccaattgataatagtttttgaccctcataaaaatggaaagtatatttaaatccaaaattctattgactccatagtttgcaaaatgagttattttatagtggtgtataacattctgtaaagggaaactctgaagaaaaaaaaaaagatccaccaggtgtggtggcacacgcctttaatcccagcagaggcaggcatatttctgagttcgaggccagcctggtctacaaagtgagttccaggacagccagggctacacagagaaacctgactcgaaaaactttaaaaaaaaaaaagggggggggggctctgaggatgagccagattaggattgtctggaattaattagggctagtgggtgagagtgggatgtttatggttagcaaggggtaccaatgggggagaatcttggtatacattagttcagaatctagttttctcaaacaaacttgtacttaggcttaatctttggtttgagtctcaagtcagcaatcccttctagcctacagagcgtttgtttttatgggcatatccattaacacttgtagtattggaaattaaacgttaaggaaacagattaagcacaaacaaggctgggtgtgctggtattctaaccgtgcttgtcccagctactgaacagactgaggcaggaggatctcttgaacccaaacattcaaggaggcagcttcagcaatgaagcaagacctccactaaaaacaaataaaatacacaattagatacaacatctatttgctttaaaagtcccagtgtcgtcataaattgtatagagaatgagagaatgagaattaaattgaacaagataatacttaatattactatgcaaatacgttttatttgagaattcccttaaagaattaagaacagcgaacggggcaagagccagaaatgcccaaagcccgcactgacagctcttgcttttttatgttatgattttaccctgagagcttttctgttgtcctcatttataaaagcaataatctctctctgctgtagagattaactgagtttgtaaagcatatgttaactgtctggcacagtgctctgcccctgaggttttgtaaatgcggaataccacctactgtcttgctggaatggtaattgttcttggttctcagtggaccaaggtttctggatcagtgacttgaaagaaaatcatatgggagctttttgtccaggtttttatttaaatgggtcagttagagcttctctgcccaatatctactgtctaaaagaattcttgtaagtgccgtcactgacgcttcattcacagtagatataaagactatacagctttgccttctggtttcttcgtattcttttactcttttgtgtgaaatattattccaagtaattgactgctacagatttcactgccttaagggccaactctatacttgcttcttactagactgggtatctctgcaatgcattcatgtatttaggacctttgggttatgtgcctccgtgataagtaatccctaattgcttgctctcgccttatggatggcatcttggttctgagaaccttgtagggtgggatacctgggttataacaggaaaaggaagagtgaggagaaaggcctggattgagtggaagcagtttctcccatcattgggattcattctcaggaccccctgacatcttcaggggcagccacatgggggatgttgccaagatcctgtagttagagcaaagaataaaatttatctcttaaagtgatgtttaggttgacagagcattatataagccagataaaaatccctgccctcatagcacttactttggtgtagaccctaacaagcagcaacttaaaaatggagtgtgtgggatggacttagtccaggtgcttcggggaagatgagtggggatgaaggatacggagcgcagttacgtttgcaggatagtttgttatttacattcaattagattcattactgttagatctgtggggaatgcattccaaggctgctagtgggtagtgctgagtgtttggcagtatattctgtttcctgtatatgtatatctatggtgaagattatataagacattgcaaaaaggcgaccaaaaacaattatagtagtataccttaataaaattatttgaaagatttccaaaaatttccagttaatatttttaccacagttgaatcagagaaagtaagtggcagacagtgaacccgtccaggacggcctgctgcatgcaagcagcaatgcttaattctcatttccatgcaggattgctcagtcgactttttttttttttaaagattcgcttctatgagctcgtgaacccattaagaaaggaagtctgtgagctacaggtgaagaagagtgaactctctgaagaactgagtacaagtaaaggccaactgaagcagctgacggaggtctgtaatgtgtctattactcttgcaaagacattgcagcttttccatagcagcttcttaacgtctgtgcaggggacatgaaagtggcagaaaatgagaccaggggtgctgactgctcagtgcttagtgagtcagaaggaagaggctatcttcatctttaaaattagcatgataaatatggtttaacctctaatccatagtatagcatttgttattgtattgtttcagaaccaaatgcttttgagatcacagaacgaaccatatctgaatgttcttgtgtaataaatgtgcacacaagtgtttataatttctctagctttcatatgtaagggctctcttatgggtgtaggacgaagagaatgtagttgacttttcttattagagtcctaagttgtcaggacagtcctcattattgctgatgtataagtataacagcacctcatgtgtttttagaagaatcctaatcatataaggctctcatgcttacaacttttcatttacagaaggctacactggtcattagtttgattataatgttggccaaatatcctagaataccatcatgtacttatagttgactaaataggaaatagtggtgtgttggtgtattttcctctctaacagcttttttaaaaaatgggatagctgtttcctccaaagagttcttcagactagaatgaaaacaagtttacaagtagagtctacagcagttgtttctttttatttatctattttatgtatatgaatacactgtggctgtacagatggttgtgagccaatcatgtggttgctgggaattgaactcaggacctcctgctcgctctggctgtcttcagacacaccagaagagggtgtcagatctcataacggatggctttttacttttcttgaaaggttttcttcagcttaaagtagtctgtattcctatgcaccatacaataggaggagaagtgttttattttgtcgttaacgacatgaaagtgcatcggtggaatcagggcctcactgaggctactgtcaggagagggaggtgctgctctgttccacaggaaactacatcgctctggtaaatcgtggggcagggtgtactgttagcagctgcaattagaataaacttactacgctcttaataaggtatggcccacgtcattcatgttacattattcgaatggtctcttcgtgcaacagtttagtaaatcaggctccacacacttaatgttgggtgtttaaagggaatggtgtggatcacattaatctctacaatttaaaaccttgataaaatgtgaactttgagaagtgcagtgactacccgtggcctaagaatcttaagatatgtcactggcaaccatgaaacttaaattcatgtgtaacctcatcattcattaatggagtaacgagtgtcgagctgactttttagagggctgttcaatcgcctgctggaatctggagaccccgggaactgtgggctaatgagccaagccttgcatgagcgtctataaggagtgagagttggagtcggtgactagtaggcaagtgtatgcctcttgggagtgccaccagcttttcaatgtgcatgtggtatttcacgtaagtggtaaccacttacctatgtgtataaaaatacaggtatttcaacatataaattttcaaaaggcaatcatgacattccaaatttttgtactaaaatttaacaccttttaaaaattatagtaaggatacatttcacattgaccaagcatgctattttgaagtgttcagtaatacctctagaatttttctgtcctgaaacactgaagctccaaaccccttagacactaatctaccttccctctccctgcctgtaagaagcacttttcttctttgtccctatggttttgactattctagatactttatatgaacggaatcatgcagggttaacatgtctttctcttagtgtaaatagtgagattcatccctgttttaatgcagtgtccttctttttgaacattctcaatatacaccacacttcttctccatctacagcgagcatctgggtgggttaaatgtcctggcaatatctgacagacttaagaattgttaacttggtttctgagagaattgctttgctcctcagcagttgaaggataagaaccaaaatataagacagaaaaggatcacaatgaaaatataaacattctctacagaatgtttagtctaatgttatgtaatattaaatactttaatttattacattgctaaagaagaataaatcatgatttcaaggttgctttgtctaggtttgtctgagtgtgcagaacccaactagtgaggcagttgaggagcaattttagattttaatgtaagttgtcagtttatatatctgagttagtatgtgcagaatttaccaccagccgtagagattatagagtcactcttattacagaaattttaaagcatgcatactattagctgacttccaatgctacagtgaacacttgacataatcaaattacaaatagaaatgctttgttttgggcccacagtttttgggggtttcattccatggttggttggcctggattaagactacctactatggttgggagtgcatagcagggtgaaagagctcagttcatagagagagggggggaagagaaccagatctcacaatcccctatgagagtgtgaggatcctcccatgagagagacccttaaagggttcccactacctccctgagagccaagccagaacaatgtatgtacctcctaacacattcacagtaacttaaaaaaatggtatttacagtaattaccagcataagaaggacataatttctaccattaacactgaggtctgtcttatacacatctgtcctccaattgtatcttctgagaacattctaggctctcttcttagagtattagcagtttcttcatcctctgctaaagactgttctattgtgttttctctccaatggtcatctgacatgcttacattttagagacttataaataaggccgctacagtatctgcacatggatttgtatgtgcatacattcttttttcttttagggaaatccttttttttttccttaagatttatttgtttgtttatttaatgtatgtgagtacgctgtagctgttcagatggttgtgagccgtcatgtggttgttgcgaattgaatttttaggacctctgctcactccagtcaactctgctcgctcagtcccagctctctccggcccaaagatttattaattattataaataagtacactgtagctgtcttcagatgcaccagaagagggcatcagatctcattatgggtggttgtgagccaccatgtggttgctgggatttgaactcaggacctttggaagagcagtcagtcagtactcttacctgctgagccatctcaccagcccagggaaatccttaagcatgttttggtttgctctttttttttttaatgtattttcctttcattgttcattaaatcttttatttttaggctatttattataagtatgtcatgacttatgcctttgaggtagtttaataattgcttaaaatcatggcactaatttcaatgtcatctcagtgtgtctctattgattgtctttccttttaagcatgtcacatgatgctatttttttcaattaactttgttttttaatacatcaaggagtacagttaggtactatcatggtgagcaagctgtgtgttaagttccctctggaaagtactgatttttttttttaggaaattagattccatgtgcccatgtctgtttgatagcactatgattttaattctgatattttggcctttgtggtctgtagggagtctgtcctcatatatgtcctgatcaggggctaagagcctgagcagagagaagcagagagcatgcagtttctcttctctggctgcctctggctgcttcctccctcctctgcagctgcagtggtcttctgaccctgccaggtaggaagaaaggctgagggctttacagtccacctttgctatacagcttgacacacagtggactggccctcattttaaacaacactgaaacaaaccagcaggcccgggaaacccacgccagtgctcctctcttccacgcgctgatgtgctcaacagcatctgtctgcttccatccttttcctgggcctcatccttgactgtggagtaggactggtcagatgggagcttgtttggccattaccttgggcacagtggtactgtctgtttacacatgggacagagaacgttctgtgtgctgtgaagctcgtgaagactctttttggccttgcgatctcttaccctaggaagagtctttttcattgcaaactaattttcccatttggcatgaatgaattatggatgaatgaatgaatgaatgacttttttcaccattacatatgaaagaaaatactggaatcaaaagttttaaaaacataatcagaatttaaagaaaacatgttttagaatattgtctgttgatttagttagtagtttggactcaaaggagaggtctcaataacaacttggtaaaatttactaagaaatgctcagacgtttattagctatgtctctgaattttgagactgttaatacgaaattaaactttcatttttgatttaaaactattcagcagatccaaacatcagctccgtgtgttttgagcacatggtggcagtatacacccatctatctttaaaaggacaagcaaacagcaggttgtgttggtcacttggaacaagcttggttttgaacttggactgcactaatttgccttttccatttctaattttcagtcagctaacgaacacagcaactgctgcttgttcctagtaacacccaggagttccactgctgtacaagataagaaaaacaaaaacttttcttccttaatagatgatcttcagataagagattgctcatttattataataacttcatagtcaggcctaccgtaacattgagagatgttaaagccacacgactgcaggtaatttaacctgcctgtttagacagtcagctcattcctggctggtggaaggtgaaaaagctccagacacttactagactaggactcctgatctttagaaaagaaatgacctcccaaaatgccatttttatatttggttttaaacacccaattacttccctctgacctcctgagtcctgcacatacatgtgtacatatatacacacacatacacacaccaatggaaatttataataaaagtatctgtaagcacttatacattaaatatcataagcatgtttatgagaacacaatatagctcaaagtaagctataatcctgctacacttagaattctcagacttgaaataaaaacagaactacattttgccctgtagcatctatatattccaaataattggatgtgtgactaaagacatcactttcaataaaactcagcatcctagtgtgacaggtgcatggactctgaacatggatcatttgaaaaaagacgaggttttgtttgctcatttaattgatgttaaaaacaaactggacattttaagattaaatttcagtgtttgattttttatttttcactttgtctttgacataaagtaacatagtttaaatatttgactatgtaacacattagaaagattgcaatcacactttacagtttgttattactaaatctcattttctacatatgcctttaaaatctattggctttctaaaacctgttgaaattttacctataattgcaatgactgacagttaaaggtgcccacacagtgaaacgtatgtggggaatctaatgctatgagacctttaaggttttcatcagaatagaagcctagttagttggatcatcgtctcataggtgctgtgtgaggaaacagtctttaaaagactttcttatgtctgtgtgctctgtctgcgtggacgtctgcatgcccgaggagcacagcagatgcctttacagatggtcatgagccaccatgtgggtgctgggaattgaactcaggacctctggaagagcagccagtgttgttaactgctgagcaatgtctccagcccactgtatttacaatcttaagtaagccctccagtgcttttcagttttaatttcaaggacaggctcggagtagttttttgatagtgaggtgaatgttgaagccagtggccaagagggtaatcctcattttgtagcaggggaaagacccttcatagatacctttcaaatgctgtagattaactcctaagatgctatgaccacttctttttgttggtcttaactttcccacgtgttttgataaggtaagaataattaatcttcgctgtgagcattctggttagtctgtcttccaatgtggtctcagtagtaaacctggaacacgtcacagagggtaactcttatccagcttctgcatagctactcaattacaaaccctgcgttctttcacacagaatacagtgtttcttagcccaggctctgaaggcatatatttgatcattaaaaatacttattgcattgtttatcatgtgtgcatgtatgtacaagggtgcatatgtgtataggtcaaaggacatctcaggtgtaaggcttggcagctagccgctttactctctgagccagctcactggccttttttattgttgttaaactgtataacacttagtgttttcagtaattagtagatgtgtatgttcagtgctatgaatggatagtttgtgaggtcattgtccagactgagacaggagcatggtgattttgaggtcatcctagggctgcaaaatgaaagtctgtctgcaaaaccccaaaacctaagcaaaccaaccaacagtggtctatataagttgcttagtgcaaaaattgaaaaaagttggaaaaagaattatggaaaatgttggcaggaaggtaatactaatgcgagatagatgaaatttaaaattaaaaccttaggactgagcaccgggaccccaatggagtagttagggttagggattgaaggagctgaaaggatttgcaaccccataggaagaacaacaatatcaaccaaccagagcttccaggatctaaaacaccaaccaaggagtacacatggagggacccatgtctccacccgcatacgtagcagaggatggccctgtggccaccaatggggaggaggggcccttagttctgtgaaggcttgatgccccagcatgggggaatgccagggctgggaggtgagagtgggtgggtggatgggtgggggaacacctctcattagaagcaggggggaggaggaatgggatagggggattccaggagggaaaatagggaaaggggataacatttgacatgcaactaaagaaaatatccactaaaaaaagctcagtggttaagagtgctgactgttcttccaaaggtcccgagttcaaatcccagcaaccacatggtggctcacaaccattcgtaacgaaatctgatgccctcttctggagtatctgaagacagctacagtgtacttatatataataaatgaataaataaataaataaataaataaataaataaataaataaataaataaataccatataacaataacaaaatgtcttatggcaaaacctgatgttatagacaggaacctttccatagtgaatggcataatgtttataaagtaaattgagagcttaatataacacagtaagcttggaagtttaatttgcttctttatcagaactggggtagatgagatagataaaatatctgaggcctagaaggactaattttatcgatgctttgatacagctgctataaggaaagcctaccagtccctagccagagactgggtcagtttaagcatcactggaaagtttgctagcccactgtgtgtacacttggtcacataggaagagacaaatgcattttaggtacacggtttatagttcctatcttatcataacttagtaaagcagacaaagagggaattaaactttctcaacatatttctgttggctcaaagaatttaaaaaggaaagcattgaaaacaagaatattttatgtcacagttctcaaagcatatttaaaattgtaccaggaaaaaaaaactttggccttaagtttttttttattactacacaaaaagataaaaataaagatatgcactcctcatccgtggctgcaccaggcctgtgagccagcacttcagaagctcacgccaggggcacctagtgctcgaggccagcttgggctgcctagggaaacagttgggaaaaaaaagctataaaaaacacaaaaccaaaaaatgaatagaaataaagtattggaaatttagtggttgtgtacatgtgtgtatgtgtttgcattaacaaacttgaaactgaaagtgaagtgtagcttagcatgggaatattataaaggggagtgaaagtgctcactaacctggttactaccgggttcagaaatggattaactcaggtgaggtcacagggcagttcttaattcatagttaactatagaagtttaagggtagaaaattctgaggtagcataaaagcaaaacaaaataaacttataagctcattttatttaacccattgaaacaaaaaaattcaaaataaaatgtttacaaatgaattctaccatcatgcatttattttatgtgtatgtgatgtgtgtgtgccgtgtgtatgcagatgcctgtggcggtcagaagagtatcaggtcatctggccattatatagctgcagttagcatgagctaactctaccagggctgggaagcaaaccagttccctctgcaagagcaatcaatgctctgaaaggctgagtcgtctctccagcctgaatcctaccactataacaaagtcatgatactttataggattagttaaagtaatgtatcatcaggtgggagaagaatggctgtgtgaatatgtctgtagcgctgagatttttgtacttgatgagtccccactttctttttgaatgcagtattttcctcatgtgcatctctagcaagaaaggtaatggactcaatgaagaaagctataaaatctgtgctgggaagattgctcaacctttacagcatttgccttctctgtacacgaaagagacagagtcctgatccccagaacctatgtaaatgccaggtgggtgtggcagcctctgcagcttaatacagctttccccagaagctgtcggagtccactagtgctgggtttaattcccagcccagcctgctgcctccttacctacgtgcatgcgctcactcacacgcatccagccatgcacatgcacgtgtggacactcatgcgtgcttatcacacagacacaggaagcaaaaaaacactacagaatcacatttttagcatggaaataaccatattttagaaagctttcaagtttctaatagtattgttccatgattaatattattaagcaagagcagttaaattatatgccagggttttttcttttttgtttgtttatcatttgggagattcagaggaaagaaacataacacagaattaagtgtgagcaactcgctttagttgatgcaaaaaataagtgctccaggatctcccaggaaagtatgaaagagaagatgtggctagggggtgtggaatgtgggagaccaagcaggagctccatgtaaccttaccacttccacaggcagctaagtgtgctgttggcttgaaaacagataaacgtcagtggaacgacatctgtccttacattttgtatatgataacacaaaactaactccatgtaagttaaaaatgttagaagaaaaaaacacacaattactctaacagtcgcttgttgcgataagtctccaacccaaatatgccccggcaatgaaaacacaactcaattaatataaatatatgctgtgcacctatattgggcagatctaccactatactaccatcttctccatataagagatggtttctccaggctgggtgcttctgctccacttttctttttcctccttctcaattacttactttctttcactctctctctctctctctctctctctctctctctctctctctctctctctctctctctctctccctctctccctttccccctccctctctcattttctcccaaagccttcagccccaccttcccctctttctctgcccagtcactggccctagcctttatttcataaatgaaggtgggaagcaggtttacaggaaatcacctgagtgctaactcattccttattcaaagcccctcacaggagaacagaattaacatcaaatataattagccccagggctatctgctgtagtcgctgagctttcaacttacagttaacatatttttagggaatctaagaaagaagctatttccatttataactggagtttaggaattcatatatatatatataaaattcaaaaagattaacagttcttgtgactcttgatatttgaaattaaatctgttaaatacttaagagtttatgctcattactcttaaatattatagtcgttcttagaatttagaaatcactaggtcctaactttaatgcatttacaaagaagacattcacagttaaaatattttgatagttttatttgttttgtaatttggtgtgttttacacgagctgttagaaatagttctctcaaagcggttcacagatgtcactaaattgtgagtggaatccacattacaaaaaaaacccttgaagaagctctcaatgtatgctgttattaaagctctaagtgaatgcgagaattagggagatcttgttgacctgaaacctgatacacatattttgataaaacaaagaagctaggctaagatagatagctcatctgtagctaggggaatggggcatgtggtagaccaagcaagaactcagtataaacctcaaaactagctgttctaactggaccctagtttagtccccagcgcgcgcgcgtgtgcgcgcgcacacacacacacacacacacgaggcagctcacaaatgtttgtaactccaactctgggggatctgacacactcacacagagaaagatgcaagcaaaacaccagggctcctaaaataaaaataaataaatcattaaaaatatagtcagaaaaagaaatcaaagatggcttatcttgaacacacaccagaatatttgcagcccagtgtatttgcagcccacagagcacctgagcagtctagccctggagctcagctgtcagtatggccttcaaccatttacattcaaaatgactcagatgcaggccgtctgcctcactgagtacagccagagtattgcatgttacaacagagcatctctcattgcagggaggttagagtaaactgcaggccgataaagcaaaactaaaggttgttacttccgttggtagggtaacgtaatgcctttctttttcctacctatacttgttaatacttttactgctaatctcaatggcacagaaggccagaaatccatacttttgagacattgatatactcacattctttgttgctatgtgatattttaaacatgatatattaggttcatctctcaaatattaagatggaatttgagctgagtatggtggtttgtgactgttattctagctgtctgtcaggaagccaagggcaggaggattacaaattcaaggccagccttggctatatttttagacattgtcttgtggggaaaaacttagatttggatcagtatctattgaaaaactagtatttcaggtttgtttctactgtatgccacctagctataaaatgtgtcacttaaggtctcagcacagaggttttgccataggttctgccagatctgtggagtagaaaatcatccagtaatgagtgggctgttgatcagttcctatacactgcttttggtggtgctccggacattgttagttttggtcttagttctttgagacagggcttctttgttgtggtggtggtggttgttttttaaagctctggctatcctagatctcattctgtagaccaggctggcctcaaactcacagagatttgcctgcctcttcctcttgagtgctgggattaaaggcatgcactaccagcaccccgtttcctgtatactttttgcagggctatggttagttgacagaggtcacagatttgaactctcatcataatccagtgtccagatctgaggagagtatccttttttcatctagattatattttattttaaaaatgtcttcaacattaaactagtaatgtcttaaggagcttaacaaggacaaagagtagactctggcagcagagctgacccttggcagaagggcagtctgtagcagtcaaaggtgagttaggctcctggctcttctcatgagttagctccttggatgaaaagtattgatcaagtggaacttgtagagaattctgaggaatgagttctcactcttctaagacagttcaaatgtaagctgtcgttcacagagtatctttccagtgtaaactgcttctgattgaactcactgacctccaggccctttgatgatgccaccctcccagtgtcctcagtggctgtttggctatagtcaggagtacttcatgtgctagccgtctgctttgacacataggttaccactttttgtctgttttatgtgagagactgcaaattggcccagatggcttagaacctcattccatccaggctaattgccacttggttccatggctgctttttttttcttttctttttcttttctttttttttttgggggggggggaggcagcctgggggaaggttcaaaacaaggtttctctgtgtagtcctggatgtcctggaactcactctgtagaccagactggtcttgagctcggaaggaaatccacctgcctctgcctcccaagtgctgggattaaaggcgaatgccaccactgcccagctccatggcagcttttaaatgtgcctgtctcctttcctcattgagtactctttacttctcataggcgcgttcagactggatgtctcgttaccaatgatgttcttttatttaggttagcttttgaaactgaatctgccgtgcagtctagcctgccacacctccctaaggatgctgaatgcagttttgcaccaccacagtaaactgtcagatgatattttaaaaaatatgtattcgagaaataattgtaatgattgttttaggggagagaggtcagaatcaactttgatttatgtacatatgatatttgaagccatgaaacctataattaaagttgggtttgggcagcaagttaaattagcttctgtttagtggttgtatagttactataaaatagattcttcaggaaaacaaacttgaaattaagaaacggacaaactgtgtgatttccagatcctagactttaaacctggactcctatgcaaaccattcagccctccaggctgctggtcccttgttttgtttcactgttaacttactgtttctatgtttcatggtgatttttaatatagatgtgtcattacactgtgttctctttggttccctgtcaccatggtcactaagttagtaccagctcctgcttgctttcttaccagtttttccactactctgcttcccaccctcttagacacgtgcgcgcacacacacacacacacacacacacacacacaccccacatacataaatacagacacatactttcaactctagattctatatattaagaaaaacataatatttacctttcagttataatttataatcgatgctatcttcctgcagatgtcatgatttcgtagttctttgccattcaagaaattccactgtgtaaatgtattaccacattttctctatctgttcatctgttgatggacatctaagctggctccatttcctgacttgtgtaatagtgcaacaatggacatgaatcgacatgtattcctctggtgtttcatcatggccttatcttgaaaggaagattgtgatagattttctccagtgtatttttcatctctgaaatgctgagtatctaaaatagctgctgttgtttgggcttaagagaattggagggtggggccccattcaagcctcttttttaaaagcttgtgatacgtagagaaattggaatggtagagctcaattttttgtgaatcaaaacctcactcatttaacaacagatcaagcaatagaaatttctttcatgctgcctctccaccacacacacacacacacacacacacacacacacactacatataatattattgcttaagaggtgatatgttatttaatctttaattttgtctgggaaacaattagttgctaggcatatactaattttgaagtaaccctgtctatgtttgacttacctatactaagccctaggactctagactctatctttcataattagtttactcgttaaatatttctgctataatgactaagggttactgggtatacagagaagatagaacaggcctttaaggagcgcagggttatgtgtgggtatatggagagggtcatagataagaccattatagcataaaattataattacagatatagtattttctacatggagatagcaaacaacttgaatgtgtgtgtgtgtgtgtgtgtgtgtgtgtgtctcattgaccttggcagtcaaaagtgtgttgtgttccaagtacacaaagctatcaagcagtggcagtctccttgatacctcagattgcacttgtttcccctttgtaattgctttctcatttcaaaagagaaaacggtacttggctgttgattcactcagctgttacctagaaatttccactttgaaaggggtgccaaatgcaaactttgtgtctacttctttttctataaaaatatttataatttttttgcatctaattctatacattgtcctctcttgcttcttccataaatattacttacaaaacttttatataaaagccacagtactaggtgctaggattatgagaaacttaatcttttgcttatcttgtgggaggcaaagaatggctgctcctagcacatgcaatccacttttcagtgatgagagaacgtaaggtggacatcttcccacagaacacaggggagaaagcagtggggaatacagcaatagtctactgccttttgccttatccacagaattgtgtagctataaaatgtggatccattttgaggcagtacactattttctgttttccaatgctatggtagcgaggtctaactccataaaccaggctttgaagtccaactgcctcacctcacaagtattcagcttacagacatataccaacatatccaactcttacctttagttcctaagagtacccaaagcagatcttcctaccccaacgaacaaaagttgtaactctaaagagagatttgtttacacttattggaaaaaaagtcatacattatattgttcattgtttttctcctccccaattcctcccaaatccaccagctccctactcaccttacttttaaatttttctttctttctttaaaaaaaaaaaatcaaaaaacaaaacaagaaatagacataccataaattggagcttgaaataaacaagaaaaacaacaatcattttttaaatcccaaacatgtaaaatgagataaaaagtctacaaaaataccactggcttcatttttgttggccatctaggtatgaagcattgttaatacttagtgagattctactccattggaataaagccgttgcttcttttccagtgggaattaattgcagacagtgtcttggtcagggatataaacccatatcattttctcctcttattgctgtaccagtttgaggtcttttccaggctgccacagtctctgcatccgtaagatactctttccttagtcatccgtcacctctggctcctataaatcgttctgtctcctcttcagcatagatctaaaaggatactttttacttgaaagaaatttttgatttaagagaaattcatgatataaagtatgtgtttctacactgaacttctggctgtatttccctatgaggcatttatactgaaggaaaaatcgtatatatgtgtgtgtacatgtacatgtgtgcaaactcttctccatggcattgtacatgtacatgtgtgcaaactcttctccatggcaggtgcctgtacttcccatatttcaaagtcacatgttgcagaatatctgatcatactatgaaccctgagattgtgttatttactgggaaaaacaaacctgtttctagttgtggtttggcttgccctttaaccagtctggctagaatacagacacacccttagtacacaatcaatgaaggtgaggttagtttgtaggaggaaacatccatgtgtgaaagtgatgcctaattgagtagcagacaaagtgacaaatcagaaaaagacttgacagagtaggatatctccgactctcaggagagcagagagggaaaggaagctccttaaggggcagttttaccgggacagttgtacagaggcaggctgcagagagacaagctagacagaggtgaaaacagaacaagccagagaatgcgaagcagccagaagattaggacagattactagagttagtttggggccaagcagagcaaaagtcagaggccaagagagatgccagatagaatcagtcagcttggagagttttgagccagaacagctgagttgagccaggtagccagagatcagaaagatctagaaagggtgagcttatttagcagtaaatctcagaggctgaaacattctaggctagattagattgtatggaggccagaagcttccaggactagcctaggttagcagactgtggcaaataaacctccaagacttacgtcaggtgacaattaggtcaggtgaatgaaagttaaagatgacgtcacgttcagatgtgactgtctaagcgtttgtgcttttatttccctccccactgtgtttcagttctttttcagtgctgtggatggagcccagagctttgcatgtgctaggcatatgctagacatgtgctgttttctgagctatatccccaggtcaggtctgcaggtttgtacacctttgcatatctcccttcacatcggcatctgcttctctgcttgtgcacatcatcagaatactcagccacagttctcagctatgtgtttataacaaaatttctaattcacatggttgaatcagtccaaaagtatgttttctatcctcttaactgccttatccatctttaacatctctcttgttgatggcctttaatttcaactttctttttatcaaaatagcccaaggcacctctgtttgtctagctgagcattactggggagaaaatcccattagcagcaccaagtacttctaattcgttgttagcagcctccagtggggcaccgctgggcttttccccctgatccttccagtctcctgagagctgttttaggccttccctcccttcctctggctacaaacctccaactcacacttctcacttctgtcaactcacttgatgcttcacttgacaaagaaaatgggaattctctttagaggattccagcctggaagcctaaacatatacctggacccattctgatttatttgtgtttttactggttttgtcgggaagtagcagaaaacgcatataggaacggtctcaggcagggccactgttgctgtgatgacacatgtcggacaagagcagaggaaagggtttatttgcttacacttgtacgtcacctttcgtcatcaccaaaggaagtcaggaagtcaaacagggcaggaactaatgcagagccatggagaggtgctgatttgctgcttgcttctcgtggctaactcagtttgatttctttttgtttgtttgcttggtttttttatttgttttctttttattgaatattttctttatttacatttcaaatgttttctcctttccaggtctccccttcaggaacccccatcccatcctcccattcccctgcctctatgagggtggttcacccacccacccactcccttcctcctaccctggcattccccgacattggagcatcgaacaccctcaggcccaagggtcgctcctcactgatgtccaacaagaccatcctctgccaatatgcggccagagccatgggtccctacaagtgtactctttggttggtggtccagtcccctggagctccagaggagctctggctggctcttgacactgttgctcccccaatgaggccgcaagccccttcagccccttctgtcccttccccaattcctccatccaggaccccatgctcagcccaatgcttagctgtgatcatccgcctctgtatttgtcaggctcgggcagggcctctcaggagacagccatgtaaggctcccttcagtaagctgctgtgaacatactggaacatgtgtccttgttatatgttggagtaagaaggtagactgtactgtagcaaatgtttttaatacatctgtacacgtactacaaacaataacagaagactatctttatgtgcataaactaccacaaaattggtagaatacttgcctcgtatccaggaagctttgcattcaattctcatgagcacagaatctgggtgtcatggtaccgtgcctacaatccaagcatcgagagtggattcgggagcatcagaagttaagttcactcttagctgagtagtgagctccaacccagggatggaatatactgagaccccatcttaacaacagcagcagccgtaatgacagtgcctgaccttaatcccggcagcagggatgtagaagctagtccggtctgcatgtcatattccagtccaatcaggacttcataatgagaccatatcgcaaaacaaaagttaaaaaaaaatcacaacacaaggctctaaagtgcccatgagtgtttcggcctccacttctctgtcttctgtccctacccttggattcttacagaactttgctgggtgttttttgttaggttgttttgttttgctttgtttttccttcaggaactatacactgtttactggttcatccctttagagcaatgtttctcaacctgtgggtcacaacccctttagggctcattggacaacacagctatttatattatgattcattacagtagcaaaattattgttgtgaagtagcaataaaaatagttttatgattgaggtcaccacaaaatgaagaagaactttattaaagtgtcacagcattagcaaggttcaggaccctgactttcctgctgtttctgtctcctaactcttggggttacttgggtgttttatcttttgtccaccctgtaagtttttgcaaattttgtattgtgtgtatatttctctgaattgtatcatagtctttatgcagttagtgtactatatatttgtctggatccattagtcaaagaaaacagaaaatattatagacattaatgtggtatacattctgtaagctctttacatgtattagtaatctttgcaagaattccgttaggtaacactgaggcttagacaaatgtcatattgtaaattactcaacttctagaaactaaattctggactctacctcttaatcacagagctgtcccctctcctggcacagttaaatggccaataatgttcagctttggcagaactgatcttctcttaggatataggtattaaatgatgtacagcgtgatcctctggggggggaggggtaatgaagcatcctcagctaaatcctacaacaagctcagtagcattccattctcacaaagtgagagccctgccgcaggaggctgcgatggtcacccaacgcaaacggccctgtcttgagatttctcacaggtgcctttcaggcagatcttggatagattcggaacctgctattcagtggttgctttgttttgttttgttttttttttatgttttcaagagggaagaaactgtcttactcattttagtatgtacaatatctagcccaaaccagacatgtagaaattaatattttaaatttaatttataaataatcttgtgaattcaagatgacctctctttgagtaactattataacctatttagacatgttttattttacttataaggacatttatatgtccgtgtgtgtgtatgtgtgtgtgtgtccttatatataagaacatttatatttccttagaaaaaatcagtacaaaatatgatctattgtgtttactttgaaatatgaaattcttcatttgatttacagacatatgaagaagatcgaagaaacaacgctgaacttctaattcgatgtcaacgtttgaccttagaattagcagacacaaaacagttagttcagcaaggtgattaccgtcaagagaactatgacaaagtgaagaggtaaatagttagggtggccgtgggaattctcaattctcgtactcatcacagtcacctgcactcgtacaacgcacacagtaatgtcctccacttccttctttgtgtaagcgcatgcagcttgatgggtagtgcagatttttagtttatgtagaaattgctaccaccctttaaaatgtaagaaaatagaaccctgtaaaatgccttgagaatatttgctaagtgttattggctagtatgtggtatgtattggtatttgccattatgcctaaatatagtaataatttgatcttgaaatctatgagaaagccgggcgtggtggcgcacgcctttaatcccagcactcgggaggcagaggcaggtggatttctgagtttgaggccagcctggtctacaagtgagttccaggacagccagggctacacagagaaaccctgtctcgaaaaaccaaaaaaaaaaaaaaaacaaaaacaaaaaaacgaaatctatgagagctgtgttcagtagactccttaataaagttgaatttcaaaagaaacattttataattttttattagcagctattaataatacatagtttcattatgacacagacatacatatatatatatgtacatatataatttttctaatgtgtccaccccttagtacctaccctgtgtcccttcctctcctactgatcctctcttcttccagctagttcccaagaagcagtttaaagtagtttgagatcatatgctgatacttacaattgatattttgatatcatattttcttctctaaatctagcaagatgataaataagatgagaaaaggtaaaatcatctgagtaatcccgagctccctgactcatttctggtggctgaaacaagatgagtcacagttgataatcatcaaggttgtgtgataaaataatgggtgttcactatagtattttttatgtttttacttttataataaaaaaattaagaagaaagcaaaaccttgatttaaaaaaataagcaagtctatctgttaaaaataggaccgtaagaaagaggaaggggttccagcccaacctttggtttatgaatgaggtttaaaactatggacaagccacgtatggtggcaacagtcttgtaatcacagcacttgggaggcagaggtaggaagatgatggcttcctgagggcagcatgggctacagcagaaatcctgatccaggactcactgtggctcactggccaagccctgggatcctgggttcactcagcagcactacaaagaataaaaggagaagccatgaaaatagaacttaacctgagcacatacccctgggtaaagtctcccgaatgtgcaaaattaaccagtatgtagatattatgttatctctagaattcaaatgcttctgaataaggaatttgtttctacataaaattctatgtggcaactaaagccatcaacttatatctgagtcacttttgtctcagcagctctacagcctctggcagaacataatgttctcagctttattttttaatttaattcccttgacccagtgtgttctgatttctagtaacaggaagtgctatttcaaagttaataatttgggctgtgatcattgctagttcagcccatgtttcttggcaaggaccagagagagggaaggtggatgagtgtactacactggacaaaatcacattgaaaggtttagttccagttaataccacagtggtcaactgaagaacctcaaccaatcaaatatactagaatatagtatactcctatttataacctaaatacaaaaagaaatactgatgggggctggagagatgactcaatggttaagagtactgcctacccagaggtcctgagttcaattcgcagcaaccacatggtgactcacagccacctatattaggatctgatgccctcttcaggtgtgtctgaggacagcaatggtgtactcacatacataaagtaaattcgtcaaagaaatattaaataataaatactagccgggcatggtggcgcacacctttaatcccagcactcaggaggcagaggcaggcggatttctgagttcgaggccagcctggtctacaaagtgagtgccaggacagccagggctatacagagaaaccctgtctcaaaaaaccaaataaataaataaataaataaataaataaataaataaatactgacaattatagttataacccactgatagactatgaacctatgaggggatgctagcagtaaatggggaaagatctgaatagtacatttcagctaatgaacatctgtgtatggctggacggctgctctgtagcctcactgatctgataatatttgattcagaattgtgactgggatctgcagcctcaggtaaaatacattaagaagtaggccacttgtatcatctaaaaagcatgaagaaagcagttcccctgtggcggacggctgagcttgcaggccaagttctaactggggaagggggttaggagcagctcgtgtgctcagttttagagatgccgactgaaggtttggccgctgttcttaggctcacagttctgggagacagctcatctgaaaggagagctttaaagtacacaggttaattataagccacgtggaagagaaatagtgccctgctgcctgctgcttgcccgtgtgctgctctgcagtatcagttataaattctgacagggtttaccctgagaaggcatgactctatcgttcggttcttttattatttgttaagtttcttctagctgtttaaaagtgttggctttaagggaaggttgaaggtgagatggctatgcttgtaattatagcatgggaaaaccagacagcagtgttgccgtgagttcctgcctagtgtaggccaagtgaggccatgtctgaaacaacagtgggagaaatgaactcgtaccttagagcatatgtagtttactgcttagcgtaacttagggattgacgctttaacactaacgctcacagacacacacagaagccccgaggctcgggtcagcttcctgccgctcagcgcctgcgaatgtggaagaggtgtccgtaagtcacgtgtgtttgtgattttattttcatagtgaacgcgatgctctggaacaggacgtactcgagcttagaagaaaacacgaagtacttgaagcctctcacatagctcaagctaaggaaaggaatgaattatcaaaggaggtaagctcccgcttcaacccactcatgctttatcacatactgaggagcaaatagcccaaggtaaaatcttatttttctcctctttatgtagttaccagaaagaaggaaaaagacagacagagaccagacagagagacagagacagggaagagaaagactactaagaagagacttagcaggcattttttgcattaacaattgccaagaattatctcttcgtaaatggaaactttctagccggactgtgataatgcacacctttaatcctagcatccaagacaggcctatctctgagagcacggtcagcctggtctacagagcaaattctaggatagcaagggctacagggctacacagagaaaccatacctcaacccccccccaacacacacagaggggtggttgggtacaatgcacatagtaaacaaggtaacagaggcagcctggagaagtagcactcactctgaactgattcccataggtcagcagcctgcagcagacagtcaccctgctgcagaaggataaagactacctcaatcgccaaaacatggaactcagtgtacgctgtgcccatgaggaggatcggctggaaaggctgcaagttcaactggaagacaccaaaaaggctagagaagagatgtatgagaaatatgtcacgtccaggcaagactcgttgctttcctagtagtcgatgtaaatgagcactttgtgggtggggcagaagtggtctctgggaatacagtatttaaggtctacactgaggaaatccttctcgtttgtttccttcctaggttttcttttctacttgatttcttagagatactgcggtcttccagtaacaacaaaggcctgcttcttctgtagttaatttttttagttagtatatatttattattgtaaaattattcctatatgacatcatatactgtgttcacacttaccacttccccttactcccttatttctcctaccaacagcaccattgttactttcatcccttctatacatattttcataacataaattctacatgtgagaggattttttaaaaaaaaaatctgccaggtgtggtggcacacgcctttaatgtcagcacttgcgaggcagaggcaggtggatttctgagtttgagaccagcctggtctacagagtgagtcccaggacagccaggactatatagagaaaccatgtcttgaaaaccaaaaccannnnnnnnnnnnnnnnnnnnnnnnnnnnnnnnnnnnnnnnnnnnnnnnnnnnnnnnnnnnnnnnnnnnnnnnnnnnnnnnnnnnnnnnnnnnnnnnnnnnnnnnnnnnnnnnnnnnnnnnnnnnnnnnnnnnnnnnnnnnnnnnnnnnnnnnnnnnnnnnnnnnnnnnnnnnnnnnnnnnnnnnnnnnnnnnnnnnnnnnnnnnnnnnnnnnnnnnnnnnnnnnnnnnnnnnnnnnnnnnnnnnnnnnnnnnnnnnnnnnnnnnnnnnnnnnnnnnnnnnnnnnnnnnnnnnnnnnnnnnnnnnnnncagaagagatcccattgtaatggttctgagctaccacatggtggctgggaattgaactggaaccctagacgagcaaacagtgctcttaatcccctgagccatccctccagcctctcattccctttttttgttttttgttttttgttttttaagacagggtttctctatatagctctggctgtcctggaactcactctgtagaccaggctggactcgaactcagaaatccgccttcctctgcctcccgagtgctgggattaaaggcttgcgccaccacgcccggctcattctcttatttttaatgaattatatatacatatatatatatatatatatacacacatttgtacaaatataccacactttattttattgttgcgtgtatggtatgtgggatgggtggcatgcttgtgtcacagagcatgtgtggaggtctgagaacaattttcaggagttctctcccaccatgggatctaaggatgcacgccatcaagcctgcgcaacaagcgcatgtagctgccgagttgtttgcttgacttccctcgttttctttatccattcacctgttgacggatgcgaggctgggtgcacatctgtgtaatatgctgtcttcctgagtggtcgaactggagcttttcagtttgttaagggaattctatactgatttccacagtggccgcatatttacactagcacacctgtgtaaggcttctttatccaccctactcagaccccagttcttgctaggatttttatctgtttttcatgatagctcttctgacgagaaagaggtagaaactgattagaaagaggtagaaacttggtacagctttaatttccatttcctgatgctccagaggttgagtatctttcatataactaatggccacttcgacttctcttctgaaattgttaaattgaagtgagttggatttgtttagtttgtatagttttttaaacaaattgtcgctatgaactccctgtcagctgtctggtgacaaagctgtctctcactcttgggactttcttatctccattatttgtttccttggccctgtagaagctttttgattgcatgtgatcccgattgttgattctttttattccctgagttattggaactcttttcaaaaatgatggcacacatctatattttgaagtgttttcctttattttcttatagtagctttaaggctctgtgccttacattcagatctttatctatttcccagaactacttgtaacgataagtctgtttcttttaggtaggatatgtgcgtgtgatttattttctttcaaggattttggctggctggctggctggttggtcggtcagttggttggttggttggttggttggttggttggttggttggttggttggttggttggttggatggtccttcagttggttggttggtttcggatttgagcttactcagtattgtgtgagaacaaatgttgttgggcttggggtcctctgaggagtcagtctctccttccctcgtgagttctgggtgtcacactcaggttattggccttgtgcagtaagcaccgtgacccgctacgtcacattgactacacagaacttacttcccattgctgggtggagatcatagttcagtggctgagtgcttcttaatatacacaaagttccgagtttagttctgagaacttcaaacaaaaaaagtcccttgaccatgatgtctttttagtagtttttgaaagtctgtacatatctctagaataccattttaaagaaaatgtccgcatacttaggcttggtatccttctgactgtgtgctatgaaagacgaatgagacggcactcattgcaacgttggttttcagatcccaggtcttggactcagactgcctgcatctcacgtcgaccttctctctcttgctaaatatgtactgctatgctaatagccctcataatcctcagactatctctattgatcagcaaaactaaaatgtcagcatttggtgatggagagatggctcaacggttaagagctgtttttcaacactggctgtttttcagagaacctgtattcaatttccagtaccacactggggctcacaggtgacaacgctgtcaccatctgtaaatccagtctgggactctgacaccatctggccacctgagtactgcatgcatagggtgcacatagatgcaggcaaatatctatgcacatgaagtaaaaataaaagaacaatttttaagttaaaaattttgtctttacctgctcaacatttctgaaacagtgtttttaggtattctaaaatggctaagttttctaaacacactgtaaaagcatacttcatccaatatattaaaatcttacctggagaacaagagcttattttttttttcatgagggaaaactgtgactttttcttttgtctttgcagagaccattataaaacagaatatgaaaataaactacatgatgaactggaacaaatcaaattgaaaactaatctagaaattgatcagcttcgaagtgcctctagggaaatgtatgaacgagaaaacaggtaaaaagggagagagagattgagcaagcctgtttgggattataataattttactgaaattaaatgctgtttttgagacctctttcttcatagttgtaaatataaatttaatgggaatgttaacattctaaattctttgatggctaattacaacaaggcttatcatactttaggtctttcctaatgtgtctgtttcctgttacctcagtttaaagacaagaataagagaaaaattagtaaatgccaagacaccaaaagttatcccaaccatttctcttgtatacttgtgaaaattgaaatagtaaaatatgcaatgttatatattttatgtatcctgaaagatattatatcagataacattgaggaatatttttattcccacagttacttttgaattgttatatgctaggtccccctagtaactgggagcattggaagattaaatgaatgcacttatttcactgacagttgttctcatatgcttactctaaagttaatctggcatttaaactacttcctgctttctgtcttctcttgtttccttcctccttccttcacttccttcttcctttcttcgcttccgtttttccctttccctggtgtcctcatttttccacctaaacacgttaccaactagggtatcactcagcctaaatgggcacaatgatctgcagatgggcccagcaagccctagtgggttaggggtaagagatcagatcccatgttgaccagcttagtgggtagtgattaaacttgctaaaacattagaaaaataaaaggccttagtagaaactgaatttagtttcactggaagtatctgtgggatatccaaatagtagtgaattcacaaatcttaccttaccaagagaaaggtctgtgcatgacagagaactctggcaaagataatatgtattatataaataattactatttagttttgtggttcattcatttctcctaggcatattgtaggcattttgtaggcttttgtttacataaccttaaaatttatggcatagttctatagtacagcatgattttccctaaacaatagccattactatatattattttactatgtacttattgtgacagtttcgtgatgtttcagttgtccatcaaaaaacaagaacaaagagaatcatttcaaatacatcctagcatagcatacgtttacatgtattgactctctccccgactaggagagatagataggtagataggttggcaaagctgactagaaaactgggcagcaggcgaagtcagcagaaggatagtcagagcctgctgtgctcatccccagggctgctctggatcctcattcacagtgaatggaaactttctgtttaggcttcatttctgaagggacacaataccctgacaaaaaacagcttaggagagaagggttcattttagctcacaagtccgtcctgctgggaagtcaaagcaagccccatctgcaggtgagagcacgagagtaaattatgcactgtgagtgctcagcctgcactctcattacagagttctggggcctaagctgggaaatggggcctcccacatcaattaatgcagtcaagacagtcccctcacgcgccaacctgatctagacaacagctcatgtacactcttcccaagtgattctgggctttgttgagtgggcaattaaaactaaccatcataccgcctaaccagaaaattgatgggatcggacccaggcgcttcaaccacagggttttagattgacctgtaaggtattaacactgtgacacagttgccaccagatggcgccaaagtgcagcgcaatgctgtgccggctcggggacaccttagtagcttttgaatgtacaagcttgcttttattgtttttcacttcacaggactctgtcccggtacttatgtgactgaatcctcactatggcagatctgaaatatatctataacttctgtccctttaagtccttaacaaggtgtaagttcttttgaaaccttacaacttaaaatgattaaagaaagactttaatattccttataaaagaacaaaattcaagccaggtgtggtggcacatggctttaatctcagcattcaggaggcagaaacaggccaatctctatgagcatgtgttcaaagccagcctggtctacaaagcaagttccaggacagccagggcagttacacagaaaagctctatcttgaaaaacaaacaaacaattagttttgttttgaacaaggtaaattaagctggctgtgtattacattatgagttaaactatagcaagtctttagtctttagcctcgcctccttatagttgcattaccttttgaagagcgtaagcagctaagagtagagaaataccttggtagcaggaggcagaatgagagaaactcagttcagtggtaagaattattatgtaaataacttgcttactaggtctttgtaaaggctacagtccctcttgcatgttttgaaataagacattttccacaaattgaggtgcatacgttcaacgccagtattcaagaggttgcccaacccctttcttaaaaagaaaagacagtattccatgagtgaaagattttgagcaaaaagactaaacttaggtcctgtccctcacagcacttgctagtggggggaaagcgactgcctaaccgtgagttttctttcctctttataagaatgagctggtagaagggcccatgaggtctgaattaggaaggaaatgtgagaagtgcattgtaagtgataaaatacgtaatgagtataggtatgtttatgccttttgcctgtgtataataaaaatcatttatatgatgacaatttacgtaaaatggttattatataaaagctaactggtacatgagagtgttacattaaagtccactgttaggaaatctagaaggtctacacaatgacttgtttcctaagcacctctgagagataataaaggggcaataaactaaggtgcttgaatttttccagaacacacaactccctggaatgtgagatgttctcatagcacggaaaagaaactcgtgtagtccaggctgtgagtttcttaggcgcattcactaggctctgcttgctgcagagtctggaactgcagcagctcacagttgtgtgaaagggaggccgcagtgcagaggcgactgagcggtgcttctaagtgtggccattagtgcagtgttgcttcgtgattgtatttccttcctgttagtgctgtcttgatcacagtggactgtcccaaaggccacaagaagcctcagtgacaaacatgacatttccatagaaaattggtgctatgaaacagctttctatcttgaatctggatttatttacgagatcagttgaatctatttaacctgcccagtagatgaatttggagctagattacagagattccatcctacattttaaaagtgagtctcctcgttagtgcttcaactagtactcctcttgttcatatcttaccaaataaaatgtataattttgaaatttctgtgaaaatatttaagtctttttctctattttatctttgagtttttggtctttttagctggattattgggagtgaaggggtctgcaggtaacttggtggactgtgagcagctgggatggcctttgttgcagctctcctttgttattaccccatgtgcctcaggtggttcttcctgtcactaatacttactttgcgatgtgtaggctgtcccacatagactgaaggtgagttccccgttgtgcaagagtttacatacacatgctttgtgcatagttctgtgcgcagtgggggagcctgggagagcaggatgaggctaagttgttacaggaaagccttcacagaggtttctaatggactgatcagggctgagcctcgacactgatgcagaagctactcggctgaccacccaccatatttattcactttcattttaatagtaattgctgaccactgtttaaactgcagcaccttgatgaatcttaatgagtagttttgtttcgtaaatttctcatgcctatggacttctcttgtatgtgtgtttaatttcatatgaattggttacctactttgagttcatagtcacagctagaaagtataaaattccatgtaagcactatttttgctacattcaaagaatacctgagggctggcgagatggctcagagggtaagagcactggctgctgtccccagaggtcctgagttcaattcccaacaaccacatggtagcccataaccatctgtaatgagatctggcacccccttctggcatgcagaaggtatacatgcagacagaacactgtatacataataaataaataaatcgttaaagatcgggtaatttataatgaatgggaattgattatctcgctgctctggaagctgagacattcaatatcaaggtgctagcatttggcccgggcctgtttcctccatcctcacatggcagaaggccagagagcatgtgagagagcaaaaggcaggggacttgcccatgttaacagcatcaatcccactcagaaaggcttctccctcggagcctgctcacctcttgagtacctcttatgatgactgttacagcggtgattacatttagacaccactctgggaaggcatggccattcaaatcataaaactaattataatagaagaataggaaattatagcattttcagtcaatagtgatctcaaaacgtttcttctaaaatacatagcttttcttaagcaaattattaaatgagaatttcttttagatacagtagcatgttcctctaacactcgaactcaagaggctgaggcaagaagattgcaaagttacaggccagtcctaagctaaagatttcattttctaatgatgtttgcaccagtataaatttagattcagtccgttgatactaggaattttatctcctcgaaatgagaaaatatactccattctgttcggcactctgttttcacattttgtgttgaggcttttatgcttctgttatgagcaacttttggatgtacttacatatatttaattgtctactacacagatgacattatagtacatgttaaatgtgtatactttttataatattagaccattgttgtatagatagattattaggaacttaacgtaagagattctcattgagtattatgacttatcttgtacttatccaagcaacatctagtttatgctagtttctctgctctcattattatagtaccctcttttgctttaaagaagtagtccaagatatatatatatatatatatatatatatatatatatatatatatacacatacatatacatatgtacacatatatgtatagatagactctagtcactttagcagggatgcccacccttttatttccttttttctatcttcattcttccttccagtgtaccttcccacactactctgaaacagataggaaaattagatgtctacctaagagaagttaataggcaacagcatgaaaaaaatcatgaaaaataggttggcggtgaaatcttagctatatacatgaactttttgcatacgattgtttttaaagttcatttccagcctccttatctgtgggatctctatctactcatttgaccaagtgcagatcaagtagacttggaacaggctgtgtttgtatgaaaggtcccgaggcttccttgctattgcttcttaagcaataccctgcaacttacatagcgtcccattgtattgaattgtatttaacgtttcgagtaatttaaagtatgcagggaggggggtgtctgttgtaaatcatatgaaaaaagatgccattttattttcaagattttagcattcttgggtttaggtgcgctgggctcaggttgatgggatagagccattagaggatattcaaaaactaagctcttaaagatactgaaagacttatattataaaaactttattatattaaccagttggcagctcctgacatctttcaatgtctctaattacattttgttacattcagtttggatttttataatctcagccccattagtttatacatgctatagatagcctctgtcaatttttcaagtttctcctttgaggaacatttgaatccttgctatttgttctgtaattatatttattacatcctctaatgcatttaacatttggaaatggattattcattaattatgtggaagttattgttttatctgtatcagggatgcagtgcatctggtgttttgtcaaaccagtctaattttaaaagagcatggacactgtgggccatagaaacaaatacagaatatgtttgcaattcttttgagcctaattctgatttgacatctgtttgcatcatgatctagtcatgcagcacaaatctcgtaatgatagaatatcccaagggggaaatgcctgtgaaagaaaggagtcctgagaaaggcaacagaatgattcagagcataggatctgggtacagatacagaatagatttacacacaggctccacagtgtacattaaggtgtgaccttggactgagtctttgtatttcaatcctgagacatatttgtgaaatggaaatgtacaagttttgatggatagagttgtgacaagttactagttacttttctcatcatccctgtgaccacatccctgacagggagagagttaaggaaagctgtattctggctcagttattgctcaaagggattgatcattctgtcatcgttgcagacatcgcatcaggcaggagatggacatgggaatcacttttcaattgttgtgataaggcaccatgagcaagacaactgatagagaaaagaatttccttgggacttacagtgttagagagttagaatccatgaccaccatagcaaggggaaatgcagcaggcatggcactggacagttgctgaggactacatcttgatatgaaagtaggaagcagactgacctaactggttgaaacttcaaagcatccccccagtgacattcgtcctccaaccaggctacacctcctaagccttcccaaagagcccgcggtggcctttctaatccaaaccagcacagcatggaaggcagccgcagaggcctggctgttactgagggcctgcattgttcaggacgcaggacgcaggcagcaggcaggaactagggcccgctgtaaaacctgaggacctacctagggatctacttcctccaccaagcttctgcctcctaaaggttccacaaccttcccacacattgcaactagctagctaccaactgttcaaacaaatgaggatggggacatttcaccttgaaccacaccaagtacatatatgaagttcctagaacatctcctaggatacggtgagcactgtgtgtttactgtcggtgttcttgccagtcgaagactatattcaatttatctctctcacacttcatttgaaaaatgctaattgatagtacttaaagaaggataaagtatgtcggttgtagactagttatggaaggtataacagctaaggaagagaacaaaactacatggaaatcttgaagacacctagcgggaaagacaagtggtaaaaacccgggcttgtgaaactttcccctacttactttggtcttgtctttcagaatgtttttttttgttgttgttgttgttgttttttggctatttgtcctttaggttccttatatgtgtgccactttttagaaaatgtctccaaaaaaaaaaaagagccgggcgtggtggtacacgcctttgatcccagcacttgggaggcagaggcaggcagatttctgagttcaagtccatcctggtctacaaagtgagttccaggacagctagggatacacagagaaaccctgtctccaaaaaccaaaagaaaaaagagagagagagagaatgtctcttttgtttccttatgcatttaagagtaaatatctcctcttccatatggccttggaattttgtttatgtcttatcatatcacccagttagctggatgatgcagactaccatttgtccatgacaaaattgtactgttattctctagtcataactctttttatttgattctctgtgtcttgcctttctttctaacactcgttgtgagtagaaaagaagtgtacttagtgaatggggcttctccatctacaacttaaacattcctcttctagtactgccagtgggacccacttggaattctgctccttaaatcacatttaaaataatgaggctatttgtagaaaggagaattggaactaatttgtgatttactggctaaaatatgtaggtcatcttagattaaaaatagataaatgtttaagatacttagagaaattgtgttctctaaaatttatttttcgtggttttttttatttaataatggaatagtttttaaggtcattgcaatcatgatgacaccaaaaataattttttaattgctacttaagaaagcaattctgtttacaaaataacacaaaaaattgttactgttcttttgacaagagtgacctttagatcgatgttttaaactacgttactttcggctcatagctttggctaatgcctctctctctagtagttggtgtgtttgaaatgttacatagtctctgaaccgttgtgcagaatggctgcagtgagtatgggcatggcaggtctcatcactgggcgttggtatccagtgcgcagcacatgcatgcactcaagcctggtgagaagcgctgtgctgtgacgtaagcaacacgggctgcagaggagatagacactgtgtgcaaactatgacagtttacaaactctatgtcccagggccactgtacaaactgcctgtccttcactggactgcacgtgcaatcataagggtttgcacatacagtgagcacatcaggcgtgttaggtcctgtatttctttctctatgttacaactcgattgaggaaggagaatttttttaggttaagtgactcaaataagcttagttttttgttttgcttgtctgtttgttgtttgaccccaagtttcatctgtattaaaacataaagagaaacgcatgcccagtcatattatctcctaagtattccctgttgtgaccttctcccactggagtaatttccttagctgcaaccttgtcaacagttttagttcctgctgtcatcataagtggatgacgtatataatgtgggctcatattccttgagccatgaatattaaccatcatctcagcagaactccatgtagccattcttggagacacactggcttatgaccaactaaaattctgccatagaaaatgtttttatgtctaaggccaccccacgcagcctctgccccatgtcacattgcagaagctgagcagggttaggccaggtcagtattggatggaagcctgccattctggtccccaagccccggtctccatggcaatgtctagtctactgtaggcatggcttacatttaatctgttctctgtggccctctgtcctttggctcttgtcctcccaattcatcaacattctgtattaacttcattcttgtacagctaagactctagacctactgtgtcagctgttctttgccagtatttcagactttattctcatctatgatttctgccatttattctttacttaaagtatttaaaaaagcatttattacctgccattaactcgcttttcttgaggacattacagctacctcattggcttatggtaagactaaaataagataaatatatacacgctgtttagcctagccctcgacccatgaataaaagagctatggggcaaatattctaactgtgggagcagttatgcttccagctggcattccccataagtaactaaaagtaaccccccccagcccagctctgtctagaaacgcactgtttgacagtacctgtactgctgcgtgctgggacagtgctctccaagccatccccagtctctactgagtcctaagccaacttgtgaatctttgaaagatagatgcttatgcatttaaaacaactgagatgcatgtttgaattgtagaaatctccgtgaagcaagggataatgcactcgctgaaaagaaccgagcagtggcagcggaaaaggacgctctgggaaagcatgagcagctcctagacaggtaagagggagagaaaatgctgacgggcttcactgcatagtcccatgcgatgtccttaaagccagctataatagagcgtgcctataattccagcactgaagcaggaggatggctgggagttcgaggccaggacaattcctatctcaaaaaaatactatgtagggtgtgtgtgtgtgtgtgtgtgtgtgtgtgtgtgtgtgtgtataatagaactatggttttatttcagttgtgaaataacttaaaggcatgtgttttcttagtgacgtcataccagagagttccttataccctttcagtccatcttatctactaccctcaagcgtggacaaccctataatttctatccctgttatcagccttgttcttggacctaacgtcagtagaatcatacagtattcactcttggatctgcttccttgactcagcgtgtgtggtgtatctattctgatatagagaactcctgattatttctgtgttaacatattctcctgttggtaaaaaatcctagcacttgcaaggcagaggcaggaaggaagagttcaagactgtcctcagctgcataacaagtttgataaatggtccacctgagggacaaaaggcaatgtcttaaaaagtaaaaataagggggggggggaagatttgtgttttgagcatctagttttaaaacattttctgcttaaaagtattttcaaagaactattaatttgaaatgttctcagccccaccccacaacttctctgataatggtagaattcttggcaccatttgaactagtgtaagatagagtgtgcaggcaagttggtgatcagagtaacatttataccttactgaactagtttaaaagttgttagtacagctaggcatgtgtgcagccctagcacatggaagacagaggcagcatggtgagctggagaccaacctgggaccacatgcaatacctgtttcaaaaaacaagcaactcaaagtccacagtcagaatggaaacaactgccatgtttccaagaggaagatgttaggtttgctctcatttgcctcatttccttttcctgtgtgctgtagactggagaagcctttgcctgtctgtcttttagtctgtgctataattcagcaaggagatttactgctaaataagctcaccctttctagatctttctgatctctggctacctggctcaactcagctgttctggctcaaaactctccaagctgactgattctatctggcatctctcttggcctctgacttttgctctgcttggccccaaactaactctagtaatctgtcctaatcttctggctgcttcgcattctctggcttgttctgttttcacctctgtctagcttgtttctctgcagcctgcctctgtacaactgtcccggtaaaactgccccttaaggagcttccctttcctctctgctctcctgagagtcggagatatcctactctgtcaagtctttctctgatttgtcactttgtctgccactcaattaggcatcactttcacacatggatgcttcctcctacaaactaacctcaccttcattgtttgagattgtgtactaagggtgtgtctgtattccagtcatggaattagagataggtactacaggctgagccacactacaactacaaattggtttttccagttaacaacaaaatctcagggttcacactgtgaccaaatacttgcaacatattagtgtctgaatttcttgtttcctctttgataaggtttttcattgctcagttccttgcatcagttcctgaagtttataagatttatttttgttccttgattctcttatcccttgcagtcctttctttttctctctgaggtctgccatgtttgtatggaaagagtgttcatatttaagagaccaccccatatttttttccaaaatttcctctacgctcttaagctgctaatatatttgacatatattgatttagataaagttaggtttcagtctggatttattactttgtaagttaacacacgtgattcaatttcttcctagtagaggctttagaatcagtggtaatatggcgaacgtgaaagcattaagaaatgtcaggacctgatggaagagtatctgttccttctcagtgggagcataaggctatgggtggagctgataagaactcccatattcagagtacagtctgtgaagtctcttcttatccctccccacccccacccccaccccatttgtcctctctcttcgttacaaggcatgagtctaaacttaaatgccttgttcaaccagagagagtgaccctgggagtcctctaaccctcacaggtgcttcttacctgtacctgaggtcataaataaatagcactgcttggaactttccctccccgcatccacagctaaaaagaacatgtctggaataattttattttctgccttgaaagtcaaaaaatatacatttgcaaggatatatatatatatatatatatatatatatatacatacatacatatatatatatattcacagcggtttgataccctttcttttagtctttttttttctaaagatcagtgacgtgatctgtatagcattgtatcagaattagtaatagctatcattgtcactagtgtaaaattttgtgaaacaatacatactgaaaatatactgagcttttgttacatcaactgctgtagaaaatgtttccatgccatttcacattaaccaaacgactgtcactcttagaggatgcatttctacatgcatgcatatatatatatattagtaatataaaaatatcacaccctaaaattaaccaaacctggtctatacatagaaatggcctcctttgtacatgaaagaaaataaaacttgagacttgtgattcatgtaatttatgtcaaatagcccaaagggttgtttgtgagctttgaaacctgggactagaacatagcagaacaggccaggacatgcccgggcaggcccatcgttaagacattcctgaggctgcttggccataaagataaagaaaatgacatgctggactgtcctggcacctccctatctcccgcccttctgacctaagttaaatattatctgcgtgtacagtctgctgatgtttgaatggaccaatcatgtgaaactgtgccaattcctcccccagccccagccccttttctataaaaacccctagctttcaagcctcgtggtcgaatccactgtctcctgcgtgagatacggtttgacccggagctctgccattaaactacctcgtgtatttacatcaagacggttcgtgatccgaatctggagcagagtgggggtttcctcactaggttccttcagtacacagactgttgcacttcttaaaatctccaggcgagtagatgactgtaagagaaggtttgcttgttcttgtttctaatcctggacaggagcagtgagtatatcacaataactttcaccgtctatgaatacatatggttataataagaactgattaccaggttaaggatggcccttgataatatcagggtgttgaaaattctctattttcttcagtattgttagttatatatgcagaggcacacataaagacaacctgctcagtccacctagcatttcttatatacatggtatttaagggctgacactttgtgttgataaccaattaggggattgattcctggcaatgacactttctcccactctctgcattctgtagttgcctgcagtcctttgtttagggctagggcaccttgacatttccttctgttagcatgtctattgtcatccttggtcaagtctttaaaataaggcctgtgggctagggatatagtccccttggtaaaacaccttgtccctacacacaagacgccccaggtttaacccaaaggcccaggtgtgttggagcacgcctgtaatccgggctctaaggaagtgcagatgagaagagatgctaagggtcatcctcagctagggttcaaggacagccagggctccaggatacttacttcaaaagagggggggggggagagggggggaggaggaggaggaggagaaagcatgcatgaatgaggccttttcttttggcctatagtttttagtgctgtatttcaggtaatcatagctcttcctggaagttatgtaagttttcagactttgctgcgttagcattctctttctccacctcttgctctccatccccaatgcctgcctggaaacacacacattcatgtgttcctgtgtttattactgagtcatttcaaaataggctgcatcgaatgcatttatctcttcagggtgtatttcgtaagaaaagaaatgttcttacagaactccaaaaacatattttaatacaagaacatttgatagcgatgtgcttacaacaatgcattatcccaataatgttctttcgtagtacctttcaatgatcttttaatcacacatagatcagaagatagcttctcgaattgttcctttcttcctccatgaaggttccttgcatgatgcttagtgtgcttacccgctgagtcactcactgacctcatgttactgtgtgtacggtataggctgcagcccaggaacttgtaattctcccctccctccttggcctgcttcaatctcaaacccttcttgatcttgattttttacctaacccattttgctttcatggcatttggttcattttcatttaatgttacaggtatttcatttaaaatacaggtaatttttaatattaaaggtattcaaaagacatgaaagaattatagatttctgttgggctcttctactcacctttaatgctgtaaggtacaatcagcaatggttaaaactcagtggtaccgtgtttcctagctgatttagctgcacagcaagcattttaatcagaatgcctatccgaaactttgcgtaggcacttgaggaacacaactggtaattcacaaatgctgtttcccatgctcaccttccatgtcactgattaagacaataaatctttattgatacctaatactgtgacccaggtgctatgctacggtattgaatacttatgggtacattagcaatatcaccatttctaagagctagtttaaggacataaaaacagttatataattgtttgactataattgttaagtttggtaattactcagagataaattgtataataagaaattatggtagaggcaaggaggtaccatgattgagtagtgaaagaaaggccctttctgacacttgagcataacagccatgccaagtaaattctaatctttaaatatatctaattgtgtcctacctcttaatcccaaacagcactatgttagttcagcctccattttccttttgccgaacgaattatatctttgaactatgtctctgcttttagctcagacctctctggtctcatcactctacacggataactaagaattctaactgctattgacacctgtcattcacactgcttagcttttgcagccatccagggactcggagccttccagactctgtttttgtatgtgctccaccttccacagtgctatctattctgcctgttaggtgtttccaaggaaggaccttttcccttatgcctgtgtcttgccatttatctactaggtaagtagacatcctttcttttattaagactgaacccagtgagaatctatcatatcttgaacttcgttcagcaatatttaagagtcctagaggcatttgttttgttttcaagacagggtttctctctatagtcctagctgtcccagaacactcactctatagaccaggctgacctcgaacttagagacctgcctaactctaggggctttttatgtttatgtttctctgtgtttcagaagacattcctttgcctgtcattcatcgatgtgagtgaagaagacgtctgtaggaagggtgagaatctgttcctttcagtgttgtcagattctccgcttgcgctgtgtcctccctcgcacatgcagcttgggagcgctgtaccttaggttttgagaggactctgattctcctcctcggtcatttgtatcagagccagtgccagtcctagtctccaaagtgtagaaggatgaattctgaagacccttttaaaatatcttcttgttcttaatcatgtgtatgaatatgtatgtgtcattgcctgtggaggctagagaagttgtgtcctttggagttagtcacaggtgactgtgagctccctgatgcaggtactaggattcaaactcaggtcctctgtaagagcagtgcatgctcccagcactgagccatctgtccaacgtccaccattcactaagtcctagcaaactgtttctacttcctcttgaaatattagataggatgtcctggggactgtgcttcaatccaaatactgtgtcagattaaagccgagtgtggcacacctgtgatcctaacagtcaagacactgagctggaaataggccagcttgaattgcataattcaaagccaacctaatgaaatgctgccttcaaaaaataagcaaatttgacacatggacaataacattttagattacagcagtaaatgtaagcttccagagaagcttggtcagtaagtagatacatggggaatgctactagtagttcagcatattcaggcatcttgtttgattttcaggcagtctgtagtttaagttgagtgtgctacatcttgttttcactgtgcacagtacatagtaaagatagttcttttttccacttctctacattagcaaacttgttttcaataaactaactaccataaatctttctgtagtcagttttgagattcactgttagcattccgggtaaccaccatgggaataactgtgaatatgtgtggtatattcatgtatgagcacatatgcgttcagtttgctatgtgtgtgtgcccatgtggaaaccaaaagaagtcttcaactctctttttcacctaagtttgtgagacaggtctctcgctgaatctgaagttgaccatctcagctaggctggctagcaaacccccaggatgcacctgtgtagtcagccgccaagtgcgagagctctatgtgtaccatcatgcctgtctttacgtggtgctggggagccaaactcaggctcttatacttgcacagcagccttgttatccattaagctatcaactttcccagcctcctagaacctcctaggactcctagaaatttgctaagacattttgtggcattttttcatatccatactatatgggccaggataacaaaatgtcagagttactacatcagaaactacagaaaccttcaggatgacatcataaatttcaaagattttcatcagaccccattgtcgccagtttcaggatgaaaaggaggaattctacagtttaccccaggctgacctgagtctggaggcacttcttagcctccaaaatgctgggacaactgatgtgtgccaccatatcctatagaagaaactctttgtacacgagtggagggcagaggctgcagtcacatgtgcacctcacttgcttctctaccttatttctgaggcagggttggtctctcaccggagctcactgactcaggagacgatctggctagtgagttccaggggtgctcctctttctagctccctggcactgaagttataatataccactctgccccgtttgacctgagattggaaatacagctaagggggagcttgaactcctgagccttctgcctccacttcctgagtgctagaattctaagtgtattccatcatggttagcaaaaaaaaaaaaaaaaagaaagaaagaaagaaaagatttttaaggggaattgtgcagtgtgtgtgtgtgtgtgtgtgtgtcacatgtgtgcacccacaaatacatacactggcacaatgcacatgtggaaatcagagaataattgcaggaacttggttttccttccaccacatgggctctgtcatggtttgtatattcttggaccagggaatggtaccatttggaggtgtggctttgttagaataggtgtgacctggttggagtaggtgtgtcactgtgggtgtgggcttaagaccctcaccctaattgcctggaagtcagtcttccagtagcagtctttggatgaagatgtagaactctcagttgtgcctgcgccttgcctgcctgcatgctgccatgctcctgtctagatgataatgaactgaacctctgaacctgtaaaccaaccccaattgaatggtgttttttataagacttgccttggtcatggtgtctcttcacctagacaggctccaaacatcaaacctaagtcatcagatatggtagtaattccctatatccacatgaccacctccccagccctagaagaagttcttaaagtgttcctgtgaagaaatactcagtggttccaagaacttgctggtcttccagggtacctgtgtttggttcccatacctgtgtgtatgtctaaccatattagacagcttacaattgcctgtaactccaaatgacctctcatgatgcacacatacacacacacacacacacacacacacacacacacacacacacacacacacactatatgtatatatacgtacacagaatatacacgtatcaataaaagttttaaatcgttaaggggggcagagtcctcctatgccttctaaattaacagtcagtgtgagtttctgctcacactggaacttgcagagataatctctctgtgcctggctcattccctcttgctgtttggaggtaagtttgtacgtggctggaatagcctccatttaaagattagtgaatggggatagatgtatcagagaaagacaagtctaaaagacaagtttctttattagtatttggaaattggatatagatactcaaacagtaatttttttaatgaaaagaattaacatggttaatataattataagctataaaagatgagaagaaattttttaaagatttattttaggaaccaaaaaaatagactataatatagtcacaactaaaagttttttaagaaagcacaagattcgtgaaactaataacaggacaatagaaaaagataggaagaaaacccctgatgatgttaagatagatagtatagaaggatgatggtgcagttgtaaaagtaatggaagagaaatagtgggtggggagggcaggcaaccaaatcggtaatggaaagatgttataaacacaaaagagcaaataagaggagcaagtgagaaaatcaagcaggggaaaggcaatagacatagggattgaacaggctatatccatgtgtaaaagccagagtatgaaagggaaacaaacagtaaaatgaaagaggggaatccactgcctggttctgcattgagaactcacagactctgggcagtgaggaaaagacaggaaacagtggtttgtgtctcaagtgtctcaagcgtgagtgttagagaacagtactgaagtacccggctgtgtgtgccggttactaaggaaacaagtctggccatgcgggcatcctccatagcactctttactgatttcgagcagtattgattgaccatccaggctgagccaggcactctttcttttctttttttttttttaaggtattttcctcatttacatttccaatgctatcccaaatgtcccccatacggtctcacccactcccctacccacccattcccactttttggccctggcgttcccctgtactggggcatataaagtttgcaagtccaatgggcctctctttccagtgatggctgactaggccatcttttgatacatatgcagctaaagacaagagctccgggatactggttagttcataacgttgttccacctataggattgcagatccctttagctccttgggtactttctctagctcctccattgggggccctgtgatccatccaatagctgactgtgagcatccacttctgtgtttgctaggccccggcatagtctcacaagagacagctatatcagagtcctttcagcaaacgcttgctagtgtgtgcaatggtgtcaggcactgtttctagacactaggatgttgggttcaaaactggaaagtcctttgtcttcataacagcattcatatgacacaaatcagaaaatatacaaatcagcagtatgtaaacaccaacattgcaaacagactgtaattcagaaagcttgtgctctgaatggtgggaggggaccaggcagtgaggacctaggattaccctgaaaattgtaattcaccaatcagagcaagtgttgtagaactcataaatcaaaatggcaagcgtgtaagaacaggcagtgaacttttagtataaaattcaaccctaactaccattattatgttgcttataaaaggtaatcttaattgataaggataatgtataatgtcagcatattaattcaatgtaagtagagacaatataaattgtaactaaacttaggggctcgatagcaagaggaaataatggttgtagtaacatgtatagtattatatcccaaatagttacaattataattatgtctttagtatatcatagtctggtggttagtctaagcagcttgatacagtctggaatcatccaagagactctcagggaaaacctgtctcggtcaggttccctgtgagcatgtctgtaggagatcagcagagctgtactaattggcttgagaaaacatccctgtctggtggcaaaattgcctaagtgagggagggatcctgaggtgtgtcagagtggagaaagagctgagggcgagcatgcgtgtcgtgacctcttgactgtaacctgctgtatttccaacctgggctgcctcgaccttttttctttttctggcagtctgatggtttccttctcccgggaggtcactttattgatgtcagactttgtgtggacacctcatctttgtagcccacaacagcctagaactcttagacccaaggaatcttcctgccttgtcccacccaaactggatgctcttgaccatgggcctactttgacaccttgactgctttgcagtgatagactaacctaaatatttagcatataaccaaaagagaatgggggaaaagcgaggccagatcttataataaatgacagctagtaaagcatgcagaaagactgaacataactcttctaacaattataaatgtgacacacttactaggtatctgtgggaaaggaatacggcctgagtaagaaacgattctttcatggccataagcgacatgagatcattaataatgacatagtttaggaggcaaaaaccgtgcaggttgtaaagctattctaaaactgcttaataatatttgttttaaagtaattatttggagaattagaatttctagtaacaatgtgtatgcagtaaaatatgctcaagcacgtgaggcctaaacagcattctcagtggtagaacacttgcctacggaaagactataggttagaggcccagcactaactgccaaaaggcaggcaggcaggcaagtgggcccttacgtgcctgatatccaagaaagaaggagttcaccatcctagcttgggtctcagatgtgccaggatatcttggttgtttccagagaagatgatcacacttgaaaaacaagacttgaagctggacatggtgtacgtatctgtcactcagaaggcaagcatagggctgagatggtagggtagtgagttcaaggccagtgtgggctactctcaaatcaaacacaaactataaaaatggtttagagaaaggaaatcatttagattatggaggtactcaactccataacttcacaaactgttttacagttcctgctcaattcaaaattgataaaccaaggaataataactcagaaagctcaaacagtctgggctggtgctgttaatcagtacttttttattgaatacagcttaacagcagcacatgtaatttagggctgtacgtatagatttaggtgtgtctcaccagttagcttaagaatgtgttggtagtacaacccagatttctggttccttcctccatagtctctatttaagggggaaccatgttttggcctaagcccaggccaactccttagaggcagtgtatgaatcagtggagagggcgagttagagcaggtgaatgcacgagtggtgagaaggaagccagccatgtgctcttctgaggacttcttaggagcaacatcgtgtttgaaagttatagatgatacacagtttagtatacacattttgggatgtttttagagtcgtgactgctcagtatgaatgtgaactaaagcagagaggacaaacatgtacttatacagctcgccttataaatgctactgccccattgctttggagaaattttcataggtttacatttgataaacataccgtagactcccaaatagtgtataaaaaattgaaatgcagctaacgaaatcaactcataaaaactaaagttaaaagtaagatattttccacaattattttcaaatatgttatttactggaaggcaagtccagagaattagccgggatgaggtgtgagtgggtttctcccacttgtaaatgagctcttatttcctacagtgtatattttggtctacaatgactcattttcaacatggttccatttaactcctaatacatttttaaacttggcaggcatatttagatgaacattatttccaattttagacacagcttctaaattatattcaagttttgcagtcatcatgaagagttctttcagtaaaaaggaagtagaattgattggaactgtgtgttttcaagaaggaaaaaataccatctttaaatttcattatatataaacgctaagtgatatctgaaaaagctgtagttgtgacttgtgtagtagtgtttagtgaaagaaggaatcgaaaagaagtcataacttaccttggatagaacgcgttgaagtcttcaccatgcctagcactgtggaaatgttatacatggataattttttctgatgctgacattggaggtaatatttacatttttattcagactctattttggttacaaaacacagaacctattcttgctgagcagagagctacaggagtatacaagctatgactgagcccaccactcaggcagagtagaggcaggcagatctctgtgagcatgaggccagtgagtctctgtctttgtctctctctgtctctctcacacaaacacacactcacacacacacacacacacacacacttacacacaaagtaaatgggtgtgtggaggatttttatctttttactaaggatgtattttatatttaccatttattagagcagtataaatttctaacatacttaatttggctgacctatttagtattcatttttaataatatactttttgacattgtgacctttccattctgccttgctatatttaatactttaaagttgataaaacattggagttgaaaaaaatcatatcattgacaatagattaaaactcacataaactcacagagactgagacagcatgcacagggtctgcatggggctgcacaagtcctgtgcctgtgcatatatactatggcttccagtttagtattgtacagggctcctgagtgtgtggatgatggatctcagcgcctaagtctgcttcttgagcctttcctcgagctcttttcctactaattatttgtttaatcccgttccaatgtgttagttttggttttatcttattatattatattttattatctatttgctgatgacctgaaaaggggatggacctggacaggaggggaagggaggagcagagggagggaaactatcatcaggatgtattaggtgataaaaagatccattttaaacaaatgaaggaaagaacatattgtactcgggcaagacagtgaagacgctcaaaagacagtgaagagtcacacagtcacacgaagcggagccagggttaagaaagacatctgaccgttgttcctgttgttgtttggttttatttgtttgagatagtgcttcatgtagcacaggctagcctcaaacttgcttgtagccagtgcttgaactcctgatctctctgcttgagccacccaggttgtaggattacagttttataccgctgcctctagattaaagaagtattctctctgtttctagttcaattctactgcctgccgtgaattacattaagcttatgaaacagagtgtgaagcataactatgtatgatgtcatacagtaccagtaaataaatgtgtactctcagctatactaagtcctcaaatactctcaacacagcaaaactggaaaccaagctttgtgccagcttgctccttccaaacactctagggaagtcctcttcttagtttttcccacatctggtactccagatgttccttggactcattggcttgtggccacatctccactccagtctctgctcttgccttcctgtgcttcatatatgatccatgtgatgccatttattacctactcagataatgcaggtcaggctcctcatcttcacctacttcatcacactgaagaaaaaaaaaatcgcttttcctaataagaaggtatccccatattccgggactagaacctgggcaggtcctgtgggaagctgccactcagctcacacatggaccttttaatcctcatgaagtctagttagatgagtccattaattgaaatgagattttatttttaaatttaaccagaatttttatcagctaagtttagaacttattaaaattctatatgtgtataaattatcttctgaactttaatgacatactatttaacaaattatttactaattgttgaacaaaatgccacctcagatacttgactccagtttgtgtgacttatgacatatatttattggaagttaaaagttaccttccatctgattttttatgtcattttttgaggtgtctcatgcatcctagactgaccctgaaattgctgtagagctgggggtaaacttagatttctaatcctattgcctctgtctccacgtgctgtgatgccaggcacgtaccatctgctaagacaattttatgcagtgcttgagatataacaagggctttttacacgctagctatttatgctagctacattcctagcccaacctcccataacttttaatgcatttgttacaaagagttgaacctttttaacagacataatgctaaaataaattttgaggcaagctatattgacttcattggttttacagtggtaaggatagaacccagggcttgggacatgctgggaaaatcttcttctattgagcatcatcccagcctttgatattttcacacagaatagtattcctctgtcttggttagagtgagaagagacgccatgaccaaaacaactctttcaaaggaaagcatactaagggatggctcacagcctcgcagatttagtccgttatggtggtgagaaagaagcatggcagcctactgcagacctggggatggaggaactgagagttctacatcttgacccaaaggcagccaagaggaggttgtcttttgcaggcagccaggagggatctgaaattctgcactgggtggggggtgagcatgaagatctcaccccacagtggcacacttcctccaacaagaccatacctcctaattgtgcctgtgggccaagcattcaaacacatgagtccgtttttgtcatcgtgggaaccatgtctgcagcatacaggcagacctggtgctggagatgtggatgagaggtctgcatccagattagcaggagcaggaagtgagctgaaagtcacccctggtaacacacttcctccagcaaagccacacctactcccaaaaggccatagctcctaatagtgccacagttccacatgtctgtaatccccacattcagaaggctgagagacaggatattgaaattgggtccatctgatagagtacatagttcaggccagcttgagctacatagcaagacaccatctcaaaagttaattagtatattgctgtaaatgaagaaagagagtcagtatataattttgtacttcatacaattactagaattaaatggaatttattatgcaatttgaagttctcaatgattactctttatcattatcatccaattagttgattttaaagtaagatatgtaggtattatttttacaaccataaaagttatggaggttagaataagaatggtcctcataaactcatatatttgaatgcttggtcattagggagtgattccacccgtcagggataggggacgtgtggccttatcaaggttggtatggccttgtggagagagtgtgtcacagagagagtgggctttgggttttcaaatgctcaacccaggctctttagctccctgtctcttcctgctgcctgtggatctaggtgtagaactctcagctccttctccagcaccatgtcttcctgcatgctgccatgctgccaccatgccagtaatggactaagcctctaagctgtcagccagccccaatgaaatgttttcctttatacaaagccaccatggtcatggtgtcttcacagtagtggatcacagggtaaggcagaagtagatgaccttctacctagctctggtcaaggctgcttcatgcagctgaataggtaactccccattctaatgctttctaaagaagtgtctttcataaagcttaccgcatactctagctgctagcaattcaagatattataggtttcgtgaattttcacacttaaaaaatatatacccatgtcttagggtttccattgctacgaagagacaatatgaccacaacagttctttaaaaagaaaacatgtaattgggctggctcacagttttaggggtttagtctgtatcatcatggtcaaaagcatagccgtatggaggcagaaatggtgcttgaggagcccaaagttctacaactttgtctgcaggcagcagaagggaacagtggttcataatgggcagagcttgaggataggagaacttaaagcctgcctccacagtgacacactaactccaacaagaccacacctcctaagagtgccactctctattggtcaagcattcaaacacatgagtttagggggtccatacctattgaaaccaccacaatccatgtgttttttttgtttggggaggggggggttggtttggtttggttttgtttgttttttggtttttagagacagggtttctctgtgtagacctggctgtcctgatgtcctggaactcactctgtagaccaggctggcctcgaactcagaaatccgcctgcctctgtctcccaagtgctgggattaaaggcgtgcgacaccaccgcctggctcaatccatgtgtttttaaattgatgtttattaaaattttcatgaaaattgcacttcattttacaaatggaaaccttaccttacttgcaaataattcatacacatatgaagcacaatgaaatgtgagccttgagatagcttacagaagcagcttacaggaaaattaaactagagtgagtagtctcgcacttgcgagaatggattgttctgtgcagtagtgtgtgccacaaaccatgctcttccttacttgccttctaccattggtttaatcatatacttgactacaagtaaagagatgttaaatgagaaatacatgtagtaaaactccctgatttctatattgatcctaaagaaatgactcttaataaagctatatttcaacataaaccaccaaatctttaatttctgaaaaactgaagctatgaaacaaatgctcttaaaagaaatcagtgtgtcgccgggcagtggtggcacacacctttaatgccagcacttgggaggcagaggcaggtggatttctgagttccaggccagcctggtctacaaagtgagttccaggacagcctggtctacaaagtgagttccaggacagtcagggctacacagagaaaccctgtctcaaaaaaaaaaaaaagaaaagaaaaagaaaaaacgaaatcagtgtgtcagccagctttccgtttggttagttcctgtgttctttagagtccagttaaccagtaatgcctctctcatccgtagcaagtatcccccatctctaggcctctcaaatgttaagtgtcttagtgttttattgcagtgaacaggtgctggagaagtagctgagaattcttttttttttttaaatttggtattttcctcatttacatttccaatgctatcccaaaagtcccccgtaccctaccccccccacccacccactccacttcttggccctggcgttcccctgtactggggcataaaaagtttgcaagtccagtgggcctctctttgcactgatggctgactaggccatcttctgatatttatgcagctagagacaccaccagctcctgggtactggttagttcatattgttgttccacctatagggttgcagatccctttagctccttgggtactttctctagctcctccattgggagccctgtgatccatccattagctgactgtgagcatccacttctgtgtttgccaggtcctcgcatagtctcacaagagacagctgtattagggtcctttcagcaaaatcttgctagtgtatgcaatggtgtcagcgtttggaggctgattatgggatggatccccggatgtggcagtctctagatggtccatccttttgtctcctagctgagaattctataagaaagaggtctgagccagccatggggagcaagccagcaagcagcactgtttccggtgttgtgcagcagctcctgccttcaggctcctgcagtgatgtggaagggtaatccagatcagcctttccctcccttcccacgttgttattggttgccgtgtttcaccaccaccatagggaccctaagacagcccttattgtgttggtgtgcctgtccttagttaccagtttcagatggtacaacacttacagcttatatattatgccatggtaaagctacacgttatgacttcttaaccatatatttttagggatagaaaacattagagtagtattgaattgaattgctcaaatgttttataaactttcaatggaatgatagctatagttaattcttggaattcatttgtgtacaattatgaaaaagtcatgaattgtggaaaagttttgacttatgtcctttttatgaattttatttgtaaaaatttaatttgtatttaaaatattttgataatatttacaggtatatcttcacaaacccagacatgatggtgcatgtttgtaagcgcaaggcctgcagggcagaggcaggcatgtccccagggcctcagtagccagctgtattgtctgatggggagctcagggttaagttagagaccctgtgtcaagaaatcaggctgacagccacaaaggaagatagcctaactcaacctgtcttccatatgcacatggacaggcaaagcagctgcacctagatagacagctatacatacaacacacgcacacatctttctcactattttatgagcactttttatttttgtttggttttggtggggatggagcttagagttttctctctgctagacaagcaaactgagctacatccccagctgcatcctttaactgtgcatctaccacagccgggggtactaacctctgtgatggcctcttccctgttcgacggaagtctttgtgccttgactctgtctctgctgccttcactcatcaatgtgtgatgaacctaaagttcctttcctgttgactccagatattacattgctcgttgtctctacattccatgaaagtcaccattatgaagtctgcaccttactgagcacatcaacagtaaaaagcagcatctctcccatgatgtcagaggggaaggtagaggcgactgtggtacactcagatttctctttgttggtggcaaaattagaggtttttatgttcttgtgagtaggccagtgactcaattaggctattaaaattgtctagatttttgtactgattttaactcaacagagcatagattctagcacattgtttgttcttctgtttttcatttgttttttaagtgtttctagaatattgtcatgtctgtttgtaccaccattatcattatccaaactgtacatttttagaaacattaatcttttttatagctccgtcatacctaacctgtaatcatttctggtttctcttttcttctttccctataatttgcttttatcttatactgacacctagccctggaaatgatcatcttagctgactcgctttaaggattgccttttatcagatccgcttttgcgttgtagcctgctatttacctagttagcaatttaattttacaacacctgaaatcattaggtaatatgactgcttttttttttcctcagtaaaaattcattatgaatttccagtatgcccactgatacactggatgctaggagtccagatatgagctagacaagatctctatactccaaaaacaagcattttaattgtactggacagcattgccaccattttccttgtcctagctcacttaattgcccctaacttgaacttgactagtattatgttttgttgttgttgttgttgttgttgttgttgttgttgttgttgttttattttgtcccttgagattttatttggtctaaggcagagccattaaggtcaattcttagaaattctacagatagttgaggtggtcttcccaggctagactagatgagacaaagctcaggggtcattctttctatttggaaagaaatcttgggctggtgagatggctcagtgggttagagcacccgactgctcttccgaaggtccagagttcaaatcccagcaaccacatggtggctcacaaccatccgtaaagagatctgactccctcttctggagtgtctgaagacagctacaatgtacttacatataataaataaataaatctttaaaaaaaaaaaaaaaaaaaaaaaaaagaaatcttgtgaatgctccaggttaccaaaccctaggactctcatttctaaatccccagtgaggaattaaccagttctcctgcacttccgggccatttcttgcctaattaagatttatagggcatgtcttttctccagaagtcatcgtgactcctttagtcgctcttaagtttttccacaccttgaactaggatttccctccaccctgccattgatagtgcttcatcataaaagcagcctttagcatgcttctgttttctttttcttttgatgggggagtactaaggactgaacctaagacacagtgtttatttggtcagcaagaaagcaccaagctataccccccacccgttgtgttttgtttccctttgctaagtctcactcactaagttgtccatgctgacttcagacctgtagtcctcctgcctcctgagtacctggggcagctgggataccagcaagtctagtggtggttttagatcagtccctctgttggtgtagcccggtctaaacacacagtgaaaggactgtgggatgtagctgagtgtgaggcacagatacagtaaatgctcttggctcaaaggagcgttcaggctgaaatggtcagtgttgtcatgtttcccaaaaagacagactagacagcagcacaccattcaaatactgttataaatgttttaccttaaaagttttgtccttcatgctctggtttattttaaaacagcattcctttcttgtatttctttcagttaagtacttttatcttcacatacccggaaaacctctttttctttgcctcaactttactaagttattaccaatattactacatagtgtttattttattaatgcccttacaattttatttgatcatgatatgatagatgcatcgaattactctaaatgcgtgcttgaaattctcataagtccatggtacagttgttaaacatactcagcgttttttaactcggcaaaaaccatctctcacattcatttaagaattagtttgtaagccaaaaatgacagatgtagtattacagctgggaagctaactggttgaagaaatgtaaatgacagaaacatttgcacaaatatgcaaccgcctttcaaatgcttttcttgtaccctgtagcagtcattgttgccacgttgacgggagtttttcttacctgattgcttttcagttggaaaattccatagtgcagcagggaagacctatgtgaccagagctttgtgtttgtgcttaagctcctgtcattgctcctgcaattctcaataaaatgcttgacctgctttctaggtaggtttagaggaaagtacaatatcacatagtgttttctattttaacatcagcatgaagtgaatccctataaacagtaattattttttagtcttagtttgagttttttgagacagtatttcaaatacctcaggctagccttgaactcactatgtaactaaggataaccctaaactcctgacctccctgcctctacctgccaaatgctgtgattataggtgtataccaccagggctggctatatataaagtcaaaacagatcatttaaataaaaatacttaatatctatttttaaaatttgccttatcaaaaattgagttgctttttataaaattacctctaaatcaagccgtatgaggtaaattttccttctgccctcctttaccaagatatccttttacaatcctattatattttaggatatgttcctctttctcataacttaagttgttgtgaggatagtgacctccacgcctagtatcttactgtgtgtgaagatatgaatcggtcttctcctttgaaaagaagtatctcagagcatgaggaaacaaatgaggatattctctactaaagttagagcattagtggctcacaagctttaatctgtgccgacgctgcttggtggggtccatggagcagcctggtttcttaagacatgtattttggtttggggaatgttgagatgattcagaaggaagctcatcattttaggcaaataaaccagggctgtttggtaagagggaactaggcgagaaatggggggtggggggctaaaggtctgatgtagaggatcttcttctaatacaggcgaaaatcataacacagatgaaaataccactgggaaaaggactcactgtggaaggttttgttttgctgtgcggggtgtgcatgcatgcatatatgcatgcctgcgtgtgttttcctgaggactgagtgaacactaggcaagtcctccactactaagtagatgtcttcaacacataaaaatacttttgtaatttacatcaaagggaaagctggcaggcactatttgaaggtttaattcataaaatatacatagcaagtattttataggtacattttatatgaaaatatttgtgaagatatggggaagctataatttatatgcttctagtagcattttaagttgatatagctattaagttaagttgtacagtataccaaagggttcttttgtttgtttggggggcgttgtttgtttctttttgagacagggtttctccatgtcgccctgtatgtcctggaactgtgtaggcaaggctggccttgactcagagatatgcctattctgccttctaagtgctaggattaaaggtgtgtgccaccacacccagctagtgtaccaacatctctgtgacccggcagagctacttgaggattggagcattgacttgtgcttagcaggcagttactgcagtgttctctggagcagtgcaaacatccacagcatgtctgtcaacagcactctgtaaatgtttctcagcttagaattagcaaatgagatgaaatgaatcatgactgtattcacattgtaaactaatgtaaaaggaatgagcttcagacataaagtagtccaaggcacataaactggaaagggggttgtagataaagaagagtaatgcagtatgatgccatctgtttaacaaaggagactggagtccgtcctatacgtgacacatgcatgtttggggaggagggagtggttagaaagttacaaagaaagctggtaactgatggtttctacaaggagaaatggatttgaaagtagtggtaaagatgtctgtaatgtttcaagtttttatcctaagaattgatttagttacttacagagttcaagagaaatttggtaaattgcttgtgctgtgaagaaggccaataatggaaatacaagcagcagtcatcctgtgaatgagagctgactctcattgtattagacaggttagcatctgccctcatcagcccatttcctacagtaaatccactgaaggctggagacccagggacactggcatgttgaagcacagccttcaagaacagaatggttttcagaaggctttgaccccaattgcttgtagcattagaactaaaatccctagtcaggatttcccagccctcgtcaagactgtgaggcacaggattctttctgctggcccatccatgaagccctggaaggccaccctctgccctgagactgcctgcctcatgctgccactgtgcttagctttgccagcctgcctgggctcagtagctcgctccagccctttctttatactcagttgtcctgctgtgtacagacagatgctctatctcagctatcttatggcctgcttccaaacaagaccagctgggaaaggtcctactgtgtggtcatttcctggttctggtgattgcatgactattaccactgaataaaatatattttgggtactttgttgtatactgcttgtctacaaaatgagattaggtcattgtgcttcaaatccatgtccagttttaatgtagtataagccatgaatattttgtagacaacgtttaaaaaccagttatttctgctatttgtcatttgtttgaaaaactgagattaaataaaagattcataatagggagaacgaggttcattagcagggtcctcaagtcagtattcacttccattccgtacggaagggaaggttgggaggtagacgacaaagcccatgcttcctggtacagtggccctgtgtaatctcagcactagggagacagaagaggaggatcccgttttcctacacggtgagttccagggccagccaaacctagaaaagctcctctctcaaagagctggagaggtgaaaggtaaagcaaaacagggaaaggtctcagtaaatgttcctaggaattatgaccttattgcaagattttttttccttttcttaatttgtgctgggtatgctgtgtgcacaattgtaggcaggtaaaagaggttaagggacaaattcaagagttgttcttctggtgctatctatggggtttgttctgttccgttgacacacggttttttagctagcgtgctaggttgcctgaccagggagcctcaaagatctgcctttgttggcctctccagtgctgggatttccagcataggccaccccaccctgctctgttacatgggttctagggatggcacttgggtcgtcatgctttgcagggcaaacactattgtctgggctctccccataggcccaacttaagatcaagattcctgccgtttaacttcctggcaaccttctgcataatactgtattttcgcttctctttccctttgttcttctagctcttacatttctgttaaacagcctttctttgactttttgttattgttttaaagtagtgtgtaatggataggtggcgcttatgaaaactaaagagctgattataagtatatcataaggacaaatgcagccaggttccaggcccagatagctgtgaggacaggtaagcattctgattccactgctgtgaggacaggtaagcattctgattccactgctgtgaggacaggtaggcattctgattccactgctgtgaggacaggtaggcattctgattccactgctgtgaggacaggtaagcattctgattccactgctgtgaggacaggtaagcattctgattccactgcagagtagacttgatctcttcaggttgctttgctgaagtagaacagcaaacacaaaggtgttgagatgtggacagtaccggcttggttcaagtaagtgtacagattaagaggacgagatgagaggtctgagtcgacagagaagaatgcagcaggttgcgtgagcagaacaggttaagtgggcgttccctgaaactgcaggctgagctctggcctcatccgccccgcccctcagttagaccggcttgtgtagctgctgtgctgatgtagcgcttcccagttccacttagcaaattaaaggcatcaagactattttaaggacataatgactgaaggcaaattctttccctagttaaacaccatgaagataaattgatgctgaggattatcatttggttttagagaagctccgttaactaaagtagaatcagatttttcggagacatttatcattttttgttggatagttgtttaacctttgttaagttatattctaatgttccaatggagtctactactttggttttactataggaagagaacattcgagctgcaatgagtgttcaggttctggttgtaatgcataagcgctcggctgattgcctgtttgaagctgccactggtatcaaaaccacccagtgttctcagcccaggaaaggcacatttttcagcttaaccttctaaaacaaattaccctaaaggccaatatctcatagcctcaatgacttctccatatctcctttagttgtatagtttatatatgctctgaagttagcatacagagaccctatggacattatgtgcttgctgtggggttgggctttttttttttttggagacagttttgtgtaacttaggctgtccttgaacttgctatggcggctggggtgaccttccgttccctcccctcatgctcccgcctccccagtagggcattacaggtgtaatgcatacagacgtcatgcatacgatttcatgtgttttaaggatttcactctgaatacagtttaacttaaggagtgaagaagcgtctccatttcagtaaaatactgaatgaataaaattttgagcatgatatatgtgcatcactccacacccactgtaatgtcagtaataaatcagacattgataagagttcacagaaatgtggtgaaggtgtcctgctcttcactgctactgggatataaaatggtacaactatattgtaaaacaagttagcaactcctcaaatagttaatagggtttcatttttttaattagatattttctttatttacatttcaaatgttatcccctttcctagtttcctctccgaaaatcccctatcgcctctccccaacccacccactcccacttcctggccctggcatcccctacactggggcttcgagccttcacaggaccacgggcctctcctcctattgatgaccgactaggccatcctctgctagaaatatagatagagccacaagttccaccatgtgttttctttgattgatggtatagttccaaggagctctgagggtactggttagttcatattgatgttacttctgtggggcttcagtccccttcagctcaatagggtttcattttaactacaagaaattgaaagcatgtttattaaaactttcatacaaatgttcatacccaagagcagaaacagctcaagtgttcagctgttaaatgtgagatatccatagagtggcatgttactcagccgtgagtatttggattcatttagctgagacagtcacagaaggcaaatccattgcagcaagcactttacctggtgagctgtccctccaacctctaaaacagtattcttaataaaatcataagaatattttaaataccttttaaatatattatgttagagctttctaaaatagcataaaagctgacttttccttaaagccttactgttgcaggatatatatgtactgcctagaactttctctagcatatatgcagcatgctattaccaaagataagtgtgctagaagtgaagtgggcttgagcatggacattaaggcccgtgttcttagattacacacactcagagagagtcctggttgctctcttttctgtgtgtcctgtttgacctggagaatgtccttaccactcatactgcttgggttttcacatttgctcccgtcttcccccgaaattatcagttccttaagaaacaaagaacaaccactggtctagtggatttccattatctcttacagttatagctcaatatttgaataaatgaattttaataatgtacataacatagtgctagattctttgtgaaaaaacacagggatgtctgcttctctttctcttaggacacaatcaatacagaatattttcacacttagaatatgtggtgatttgaatgttaattataaaaatttttattatagttatacttatgaaatgaagagaatattcctatctgggttgttaaatataccatttaatgattggtacatcattttcttataatattcaaatgtatattttagtatgtgtttccatactatgcataactaaattataaaagcttttctgaataactgtaaattattcatcatgcaatcgtaacatgatggggtagaaagtgggactgaggtttggcttccatcagctgtcactgctatgcgggaggcctcacccctctcacccctctcacccctctgcctctttcaggtacagagaactccagctcagtacagagagcaaggtatctgagtttctccatcagagcaagttgaagtcctttgaaagtgagcgtgttcaactcctgcaagaggaaactgcaagaaatctcacgcagtgccagttggagtgtgaaaaatatcagaagaaattggaggtacctttatgtaactttccctggacataagcatagagtataaactttgtaaggatgatagttgtgtagaccttgtttctcctagaggaccatacctcgtcctcacaagaaaataaggaactaaagctaggtccagtggatgggatcccaagcactctgaaggctgagacaggagatcacgtgtttgaggctcatgtagccagccagaactaagtaataagtccctgttttaaaaacagagaagtgaaagaaaacatagatgaatagcagcagtatgtgcatcaaaaatgactaaaattttatttaaaaaattggaaaaggtttcattcacactaacaaagagcatataattattgagaatacttatgtgagaaaagtgaaattggcatgaagaaaactgtagaactataatgatgaatataaaaaacccaccatctttctgggatggaatagttggtattttatgttttccagttttcatcaagaaaactgtttctaatgttttaccatttaaaatgttacaattgtttgcttttgcccctgtgagtgtgcatgcttgtgtgcatggtagaaggcatttggaagtcagaggacaacttacagcttatggtagtcaggcctttccttccacagtgtggaacttgggaagcagagctgtttcattggcccaattttcagcatacattttttttacccaacaaagtagttctgtagtacaagtggaagaatgtgtaggtaaaattcaatatttttacatctttttctgaagaaatgagaggaaatatttattacattttaaaatagatggtattttgttgttagcttaacttaagcacttcatgtttttagttttcctcactacatatgaacgttcctagttatgaaaacatataattataggcaaatacaaaaatgggagataatgaaactgaaaattaatcaattaaacgcctttcctgaaaaaaaataaaaataaaaataaaagcctttcctggggctaaagagatggctcttccagaggacccaggttctattcccggcacccacgaggtggctcacagccaattataactctagttccaggtcctctgaaagagcagccagtgagtgctcttagccactgagccatttgtttctccagcccctgttaagatgtattttcagtatgtaagctcctttgttctcagatgctcactgaagtgttatttatagtagtgaacaacttaacactctagcatattactgtaatcacattaaaatcatttgtgtgtgatagcatcaattgatattttaagggtataaatacatgaaatatacttagttcatagtagatggatggatagaacctctcatacaactctattcattgactctttttaaaatgttcttattcggttggtggcatagttcactggcaaagctattagctagcattcacaacaccaatccccaacaccataaaggaaataggttaatttttttaacttattatgattgtgtgtgtgaatgatgtgtatatgtgtggacattttgccactgcacatttgtaaaggtgggaggacaactttgaagagttgattctttcccatctttacatggattataggaaattacctcaggtctccagatttaatacagcaagtgcctttagatgccacgctgtctcaagccccatgttagcttttttaaaaacaaaggaggtatataggattcaggcggttgtacatgtaataataatcaaagaaaatatgcctctttttaaattctttttaaaggattttttttttaagaaactctttctttgaacatagtggaacatgtgtcctgttatatgttggagtgacttttgggtatatgcccaggaatggtatagctggatcttcaggtagaactatttccaattttctgaagagctaccagactggtttccagcttgcaatcccaccagcagtggaggagtgttctttctctacatctgtgccaacatctgttgtctcctaagttttgatctttcattctgactggtgtaaggtggaatctcagggttgtattgatttgcattttcttgatgactaaggatgttgaacatttctttaggtgcttctcagccattcacgattcctcagttgagaattctctgtttaactctgtacgccatttttttaaacttggttatttttgtttttggaggttagcttcttgagttcttaatatatttggatattagccctctatcagatgtggagttgatgaagatttttttttcccaatctgttggttgccaatttgtcccattgactgtgtcttttgccttacagaagcttttcagtttcatagggccccatttactgattcttgatcttagaagctgaaccattagagctctgtttaggaaatttcccccagtgccaatgcgtttgaggctctttccagctttctcttctatttgattcaatgtatctggttttatgttgagtccttgatccacttagacttgagccttgtgcaaggtgattaaaatatagatctatttttatttttctacatgcagaccaacaagttagaccagcaaaatttattgaaagtgccttctttcttccattgtatgtttttggctgctgtatcaaaattcaagtgtccttaagtgagtggttttatttctgggtcttcaattccattccattgatcaacgtatctgtctctgtaccaataccatgtggtctctgtagtaaagcttgaggtcaggtatggtaattcaaccagaagttcttttattgttgagaattgttttggctatcttgggttttttgtttttccatgtgaaattgagatttgcttttgcagtctgtgaagaatcgtgttggaaactcaatggtgattgcgttgaatctgtagattgcttttggtaggatggccatttttattatgttaatcttacccaatccatgagcatgggagatccttccatcttctgaggaagatggaatttcaattccatcaattgaatttcatattcaatttcttttttttttttcagggagtggaagttcttgttatacagatctttcacttgcttggtatgagttaccccaagatattttatactatttgtggtattgtgaagggtgttgtttcactaatttctttcttagcccgtttatcatttgtataaaggatggttactgatttgtttgagttaattttatatccagtcactttgctaaagtttttcattatctgtagaagttctctggtagattttttggggtctcttatgtatactaccatatcacctgcaaataccttggcttcttcttttccagtttgtatttcattgatctcctttttgttttcttattgatctagctagaacttcgaatactatattgaatagatatggagtaggcagccttgtcttgaccccgattttagtgggattgcttcatgtatctctccatttagtttgatattggctgatggtttgctatgtattgcttttattgtgtttaggtaaaggccttgaattcatgatatgtccaatacttttaacatgaaggggtgatatactttgtcaaaggttttttcagcatctaatgagatgatcatgttttttctttgagtttgtttatgtagtggcttacattaatggatgtttatatattgaaccatccctgcatccctgggaggaaatctacttgattgtgatgaatgatggttttgatgtttttttgaatttggtttgtgagaattttattgattatttttcatcgatattcataagtgagattggtctgaagttctcttttttgttggtctgtgtggtttaggtatcagagtaattgtggcttcatagaatattaggtagtgttccctctatttctattggaataatttgaggagtttttttattagctcttctttaaaggtctggtagaattctgcacgagaaccatctgatcctggggtttttttaatggcttctatttccttagaagatttgggactgtttatctgatcttttaaaaaaagatttattcattttatatatatgagtacactgtagctgtacagatggttgtgagttatcatgtggttgctaggaattgaactcaggacctctactcactctggccccgctggctccagcccatatatttattattatatgtaagtacattgtagctgtcttcagaaacaccagaagagggcattaaatctcactatggatggttgtgagccaccatgtgttgctgggaattgaacccaggacctttggaagagcaatacaatgctcttaaccaccgagccatctctccagcccagttttgttgattctttgtatcatcctctttgtttctaattggttgatttccatccctgagtttgattatttcccacagtctactcctattgggtgcatttgcttctttttgttctagggttttcaggtgtgctgttaagttgctagtgtaggatcttttcagtttccttcccagggcacttactgctgtgagttttccttttagcactgctttcattgtgtcccataagtttgggtatgctgtgtcttcatattcattgaattctagaaagtctttaatatcttttcttatttctgccctgaccaggctatcattgagtagagagttgttccatttacgtgggtctgtgggctttctgttgtttttattgttattgaagtcaagccttaggccatggtgatctgatagggtacatgggattatgttgatcttcttggatttgttgaggcttgtttggtacccatgggttccactacatatgtagcacaggattgccttatctggcatcagtgggaggggaggcgcttggtctgtggaggcttgttgccccagcgaagggggatgctagagaggtgagatgggagtgggtgggttagtatgggagtatgctcttagaggcaaagggaagggggaatgggatgggaggtcttcccagaggggagactgagaagtggggacaacatctgaaatgtaaaaaaataaaataatttaaaaatgtggcagtgagagagagataaaaaattcaggtgacaacagatgctggcaaggatgtggagaaagaggaacactcctccattgttggtgggattgcaagcttgtataaccactctggaaatcagtctgacggttcctcagaaaattggacatattacaactggaagatccagcaatacctctcctgggcatatatccagaagatgttccaaccggtaagaaggacacatgctccactatgttcatagcagccttatttataatagccagaagctggaaagaacccagatgcccctcaacagagggacacagaaaatgtggtacatttacacaatggagcactactcagctattaaaaagaatgaatttatgaaattcctaggcaaatggatggacctggagggcatcatcctgagtgaggtaacccaatcacaaaggaactcacacaatatgtactcactgataagtggatattagcccagaaacttaggatacccaagatataagatacaatttgctaaacgcatgaaactcaagaagaacaaagaccaaagtgtggacactttgccccttctcagaattgggaacaaaacacccatggaaggagttacagagacaaagtttggagctgtgacgaaaggatggaccatctagagactgccatatccggggatccatcccataatcagcttccaaacgctgacaccattgcatacactagcaaatttttatcaaaaggacccagatgtagctgtctcttgtgagactatgccggggcctagcaaacacagaagtggatgctcacaatcagctattggatggatcacagggctcccaatggaggagctagagaaagtacccaaggagctaaagggatctgcaaccctataggtggaacaacattatgaactaaccagtaccccggagctcttgactctagctgcatatatatcaaaagatggcctaatcggccatcactggaaagagaggcccattggacatgcaaactttatatgccccagtacaggggaacgccagggccaaaaagtgggagtcggggggtaaggggagtgggggtgggtgggtatgggggacttttgggatagcattggaaatgtaaatgaagaaaatacctaataaaaaaaagatagaaaaaagaaaaaatgttgcagagagagaaaagaagaaagaaaagaaaagaaaagaaaagaaaagaaaagaaaagaaaagaaaagaaaagaaaagaaaagaaaagcatgctaaaagcatgaacaaggcaggttgagcagcgctgatggagcactgcagagctccctccactgtctttgtacagttttgtgctgactgcctagaacctgaccccgagtaagtctctcactgctgcctccatctgaacccttaacaagcaaaggttcattttattcggcatatgtgattaccgagagagtattgcataagttcagttaacgcaacttggaaatcagcgtgtattctttcctctgttgtcctcggctgagctgtgtcttcacatttctgtggttgaaagagaaaagacatgagcagagatctccgcaccaccgtgtgtgtgtgtgtgtgtgtgtgtgtgtgtgtgtgtgtgtgtgtgtgtgtgtgtgtgtgtgcgcgcgcgcgcgcgcgcgcctttagctgtggacctgaggaaatctgaatcctttcagagatctccgcaccaccgtgtgtgtgtgtgtgtgtgtgtgtgtgtgtgtgtgtgtgtgtgtgtgtgtgtgtgtgtgtgcctttagctgtggacctgaggaaatctgaatcctttcagagatctccgcaccaccgtgtgtgtgtgtgtgtgtgtgtgtgtgtgtgtgtgtgtgtgtgtgtgtgtgtgtgtgtgtgtgtgcctttagctgtggacctgaggaaatctgaatcctttcaacttctgtcattctcttcttccactgctaggttttaactaaagaattttatagtctccaaacttcttctgaaaaacgcattaccgaactcgaggcacagaactcagagcatcaggcaaggttagacatttacgagaagttggaaaaggagcttgatgagataataatgcaaacagcagaaagtaagtctgtgtgccctcccccacccacccagggagagtcttttttttcttttcttttcttctccccccccacccccctgcccagacagggtttctctgtgtagctctggctgtcctggaactcactctgtagaccaggctggcctcagaaattcgtctgcctctgcttcccaagtgctgggattaaaggcgtgcggcaccacgccggcctagtcctttttttttggctacaaaggaaaggtggaatcattgctaaaatttcttggtatatatttattaaaaatgtaagtgatttaaagaatattctgtttttaatattacttgatgtaaattttcagtagctagactcaaaaaacagataaagtattaaacatttacttttgtcaggaactaatccaaagccttagcaaaatgttttgcctcaggactagcctcgtagctcactggtggggtgctctgcctactctgtgcaagctctggattcaggccctcacacagcagtgaaaaccaaaacagaaacaccaaaagccaatagtgagtgtggtgacacctcctataatcctcccctcaggggaaggaagcaggaaggtctccaggtctgagccagcatgggctctggtgtgtgtttctgggatctcagaactcagaaagtgggggctggagcatcaggagctcggggtcaccctccacatccttaagttcaagggaaggaagccaaggccacgtgagagcttggcacacagacaaaacagaactcacctttgtcaaatgactctataacttagtcattttataatatatagtccatattaaaagtctttgaatctttcagaataacatacctgaattacttgctctataagaaagtgtggcttatcaggtgatgtaatcccttaacatcttctaaaaataaatcaacaaatacaaccacagtgtactttaatatgcttcacctctctcaatgtgcactagtccttcggaatgttcttggaattcttaattcattgttgtatcttttattttgacttctgctatgctttttaaagagaagagttatttcacatcataccttttactacttttcagttgaaaatgaagatgaggctgaaagaattctttattcctatggttatggtgctaatgttcccacaacagctaaaagacgactaaagcaaaggtaaaatcgatatggatttatcttatctactcaagctaactgtaattatatagtacattctgataatgtgctgagttgaatgataaagctacttgttcttaatattcataaatattaaagtgctcacaaagtaggacatggtaataaccatgaacttcatctatatttaagtgaatttaatggttagtagatgtgtacattagaatgttcatggttttagatgcaataactttgaaagccattttattttcacattaatttcagataagtacaaatgctttgtagcaataattttcaggctagaactaattgaactaccttcaatttctatatcccttgtttattatttatgtgcctatatttcttgatgtgtatcttaacatgtaatatattattgtatataatacatactaagaaatatggagaaagcatatacatcgcagttgaaactgcacagaagtgttagttccatgtcttatggctgtgaccaaacacttgaaaaagagcagcatgaggaaggaaggagtgcttggctcacagtttggggacagttcctcaaggggtcatggcagcaggatgattagggagctgctcacataaatcggcaggaaggaagcagagtgggatgaatggtgccgcccacatttagggtgtgttacccacctcagttcatctaatctggagattctcttatggacttgctaagccttgtctcccaggtgtttcacgatcctctgaaattactaattaatataaaaaataaatcacagaggctagccccaagtgatggtgcacactagctccccaccaccaggctggctgatcttagaacttgactcctgagttctacctaagctaggtaatggattctagaccatcctatggtcaacagagaaagaaggaaaagaaatagggaaagaagagaaagggatgaaagacaggtgacaggagaggaggaagggaagtagaaggagaaaaaggaaagaagagcactttgggcttgccggagaattggttagaggatgtcctaagcaggggtgtggttccctggcatttccactccaccagcaggcacctgcactgatcttgctccctagattcatccagccttacagcagaccctgattgctctgcttgctaccacctccactcctagtgtttctaacagacttgcaaacccctccacaatgtaccccacatcagcatcctcacttgcctctgtactccatgtgacagtttaggactcacctccacttgtaaatatctattttctctacggcacagtaaagtgttttggtttttttcagccatcatttcccatctaattttctcacctagacagaagctcttcatgtcagcagcgtcatcttattctctgaccttcccagctcagagtaatatacctagtgattttttttttatttacctgaatactcaaggtttcaaaactggtattattttatgggggttaatttagaaattcagaaatgtacaaaagaagaaagtccacgttttgatacttttatagatattttcaatgatttttttaaaaaggcttttgttgttgttcttgttttgtttgtttttgtctattccagacagggtttctctgaatttgcacggtagaccgcactggccttgaactcagatatctgcctgcatctacctcccatatgctgggattaaaggtgtgcaccaccaccaccctgctaaggtttttagtgtgtgtgtgtgtgtgtgtgtgtgtgtgtgtgtgtgtgtgtgtatctgtgtctgtgtgtacattttcatttatgcatatgtctttgcaaatgtgagctcaggtgcctgtggagtagaaaagcgtgcatcagatctctgagtgcagctatgtgcacatcagtctgaaagagtatgagctctcctgccgctggacttgcatcctgggaggtgggaacaaaacttaggtctttgcagagcagtgtatgtatgttcttaaccactgagccgcctctctggttccttttgtagatagtttggaagtgatcgatacaataacatgaagagataatttatctttatgaatatctaaaacagtataggttatcattttaaaagaagtttaaaaatacttatgttgtttattgattaaatatttgaaaaatctagattataaatagataactagaaaggatcagtttacagctagaatgattaattatgaataattaaatatttttgctattataagcttcctttccaatgttgaacattgaaattaaatgtgattgttgcttactttttaaagcagttcaggtaaccagagctagctgtgcgttgtttgtttgatggggttggttggttggtgtttgttattggggatgttttgttttgttttgtttcgatgcccaaagatttaaagagccacaagtgattcatagtgcaaatgatcttgactgtccaaatatttctgaagattctatcactgagctatctgtgtgccctgaacaagtgcctaatgggtgtgctattaatacccttgccagctggtgccaggcattcttctcatggtgagcccaaggctattttgaggaagtgcttctcaggtcatctaaactgagggaagagagtgtaagtctagacatccaaagaggacatgtgtgcatccctacacttagtcattcaacaggttttattgagtacctactacgtgcagcttgagtagtagcgcctaatccactttagaatctgatgcacttttgaagattgcaaaatcaacacttggtttcttaagggctatttgtacagaaagcagttaccttgtgccctcttgaaacttatttacttaagacaagaaagaacgatgtagcctttagagaatctgtacttattattttttcgcatttgaaattaaagcactgcagatttaaagggagttatagaaataactcacagtcataagtggaatgctttataacaaagtcatcatcatacatcattgtgaggacatgtattacaaagtgtataccaaggaacctatttctcaactgctatgtatctactgcattcttactttgatttaaaactttatgtattcaacagcaaatattaaatatggaatattactatttaactgattataagtatttattttatttttaaaattgagtaaattgatggtaatcccattattcaaaatatccaatcagaaatttatacaaatacatgattttccttgtatttttttggacattatatagttttagtagtttagtttttaccttagtatcctattgtgaacatttcttatgtatgaatattcttcaaaatatactacctaagggactaagggcaacagttggaatgcaaaagataaccaagggcactagaaggggtggtcagtaggagaattaaacatgagaacaaagactaggggcacacatgcctgacacaaactgaagcctgtcacattgtatgctaaccttaaaactgaggttcaaagtcattttcagtagctaccaaaaactttgatttttaggctttctgtcaatttgtgataaagcccatgaaaaggactaagaattggctcttgctgccaaaagaatattttaagaattaaattgaaaaaaatctatctggacagtggtggcgcacggctttaatcccaccacttgggaggcagagtcaggtggatatctgagtttgaggccagcttggtctacaggacagccagggctacacagagaaaccctgtcttgaaaaaccaagagaaagagggggagggagggagggagggagggagggannnnnnnnnnnnnnnnnnnnnnnnnnnnnnnnnnnagggagtgggagagagagaaagagagagagagagagagagagagaatgagtgaatgaatgaatgaatgaatgaatgaatgaacatgagaatatttggcataatgtaaatgctaggtggttatatcagttaaggtgttcttaagtcagttgcacagttagaaaaatcaagattctaaaacttctccctaggcaccaaatgaagtaattgaattaaaatatttttgttttaaattttttaaaagatttataagtacattgtataagtatataagtacattgtagctgactttagacacaccagaagagggcatcagatctcattacagattgttatgagccaccatgtggttgctgggatttgaacccaggatctttggaagagcagtcaatgcccttaaccgctaagccatctcaccagccctgttttaaaattttaatgaagcctttaaaatacctgaaacatggacatttggggtgggttggtttgtttatctgagtccatttctgggcactgcactgctgatttcctgtgagctgatagcagcagattatgtttctcacttgatgtagaattctaaagtttctgataaatgtgtaagcatacagtaaagtatcttgcgctttgaggtctcctgcaagcataaataattgcagaccttcttaaaacactttctggtacacaatgtggaaagccaaaagggcttatataattgaagtagattaaaatgagattaactttgggacatgataaaacttgaaaatgtgaagtgtttttgtttgagtagcaactgtgtgaaagtagcaaacccggctttctggtcgtgtgctgtttgtgctcctgcactgcacggtgacactagacactctgttttcggagtggatcactcttcctttgtgctgatccagaggatgggagatagtgtagaacagttttcatttgtaaagttttctgcctgttggatttgtctgattctttcctatattttttattttacttttatgtgtataagagttttgcctgtgcatatgtctatgctctacatgtgcctggtgcctgtgtagatctgaagaggtgtgagatccaccaccatttcattcccaaactctaacacctttcatcagccttgaatgggatttctctctcaggatgcctgaactaaaaccaggcgcattcttattaggacactgcccttgggctaacactaaaacactggcatacagttccttccttcagtgtttacatcatctgactttgtcactatatctgcataagagcagtttgctaaacaagttgcccaaaccagtgagcagtgtactgtacttcacttcctatcaccaagtcactgtcctctcagaatgctgttaaacaggtgactggtaacatggcattgtttttagcatctctcattccttaatagaaaacagaggttttatttgcataaaaatttcctctcatctatacttctttgtaaatgaatttgactgtgttctttgttttataagcattattacacaaatgttgtcaatacctccagcatacatttgttgataaattgttatttagaatgaccctaaagagtatgttctgtgagtaacaaaaatatagaaactacacccaatatgtatatgtgtatatatatgtatatatatatatatacaatatatatgtgtatgtgtgtgtatatgtgtgtatatatgtgtgtgtgtgtgtgtgtatatatatatatatatatatatatatatatatatatatatatatatatatgtatgtatgaaaggtaaggaagaagataaaagtgtgattgataataaccagggtttttaattagacaaaattggagctagtaatgtaaaatatggagttcacaggcatagttaaaaccaacagatttaatccaaaagcaacattaagatatgtgactacacttgggaggcagaggcaggcggacttcttagttcgaggccagtctggtctacagagtgagctccagggcagccagggctacacagaaaaaccctgtctcagaaaacaaaataaattaataaataaataaagatatgtgatatgtgactaaagccacttgtgatggcacacacctttagtcccagcactcagtaggcagaggtcagtggatctctgggttcaaggccagtcggtaaacaaagaaaattccaagacagcaaggaaacaaggagaaaccccaaactatacagttgttatattaactaacaaagaaaacatgatcccctccctacccctgaagggagaggttttgtaacctgaattgttttctgtataaaactatgtcaaattctataacagggttaatatgtaaattttattgttgatatataaagtattgtttttagagtaaaaaaataataaaatgtaaactatgaattcatttataagaagaaagttgtttagaggttctctaaactggagtggagggttaagaggcatttaataaagaatggaaaaagacaaaggatggctgttcttgggggtggtagaaatggtctcaagttctgaggttctgagagctgcacaactctacactttaacttggtgtttattgtgctacttgcatattattatatattttagtacataattttttagagaattgttgtcaataaatgaagactacttcgttgtcatctgtaatgtcaactacttggcagataccatgccagaccaatgaatattagatataggcatactgttgagatcactctataaacatttatgaaaacttgtatgttttactttgaatgaacagtccgcaggcattaatgtgttagatgatatttagcagagtcttacatgaattcttcattttgttctgtacagttatttggttgaaaaaaattttttttgttttgttttttttgtttttcgagacagggtttctctgtttaacaatggctgtcctggaactcactctgtagaccaggctggcctcgaactcagaaatccacctgcctctgcctcccaagtgctgggattaaaggcatacgccactgctgcccggctatttggtgaaaattttaaaaacaaacaaacaaacaaaaaaaaaacctcttgttggactctgccatagtgcctgggtttggtggttgtctatgggatggatccccagatgggacagttttttgatggtcattccttcagtctctgctctgaactttgtctctgtaacaaccaccaaannnnnnnnnnnnnnnnnnnnnnnnnnnnnnnnnnnnnnnnnnncagattccatcaagagcttgctgacaagagcctgatatagctgtctcccgagaggctctggcagtgctgacaaataccgaagtggatgctcaccatcatccattagacagagcacagggtccccaatgaaggagctagagaaagtacccaaggagctaaaggggtttgcagcccctatgaggaacagcaatataaactaatcagtaaccccccagagctccctgggactaaatcaccaatcaaacaaaacacacagagagactcatagctctagctgcatatgtagcagaggatggcctagtcggtcatcaatgagaggagaagctcttggtcctgtgaaggttctatgtcccagtataagggaatgcctgggccagggagcaggagtgggtgggttggggagcagcgggagggaggagaggatagggggttttcggaggggaaactaggaaaggggataacacttgaaatgtaaataaagaaaatatctaataaaaaaaaaaaactcaacattgtgagaagttgaattctgtgaattctccattcataggttaaattgataggctaactaatatagaacatgaaaatacagtgcaggtcttgagaacagcatgatttctcggcattactggtacttcttaaaaaaacattgtttcctttcagtccttggaattgtttacctagagagcaaaggctacacagagaaaccctgtcttgaaaaaccataaccaaccaaacaaaccaagggcagttatagagtgcacagcacggtgggctgtgggtatgtgcctgttatcctaacacttggactaatgtacggggagcagggattgaggccagcctaggatacagacttaagaccctgccagggatggggacataaaacactggcaggaagggggttcctttagtacagactctgcctgtactgtggtcattctccgcatgttattacacgcctcttccacctccacatgcagtaggaaacctgttggattatgttttgtattacaaaattcataatattgactaggataaacactttccaaaatgtaagcttttgcacataatattcaagtaatttcaaataataattttaataattcaaataatttttgcacacagtattcaaataattccaggtaataattttaagtaatttgtaatttggaaacttttgttaaaatgagaaagctataaatggctctcttttctggcaagctagtaacataatgtaattctgcctcaatgggcagggctaaaaaccatagtcaagtaatcagtataccacacttaccatatggaaatgtcagggttgctaaagtcttgctcgtgtggcgttctttgctttgtattgccattgccttctgttactatgtgtgttgctaggaaaggatgggtccaccttctagcatacaaatacctgttgtgtgtttaggcagcattctactttggtgtacataagtgcttttcattttatttacctagtgtccacttggcaagaagagttcttcagttagaaaaacaaaattcattaattttaaaagatctggaccatcaaaagaaccaagtaagacagctttcacaagaggtgagtagctgggtcggaagacccagaagcaaggcgctcgcttgcctctgcatgccctgttaccaccgacagttatttgctgagcactgtgaaaataagctggttgcaaaatgatttcaaacttgtaaacttcactgaatgttgagactcctaaacagcttagcgtgtatggcaaagcagaacaggagactgaagaatgcccagcacgaggaagggtaaagtaggcgagcccagagcctcagcctctgagaatatccactagcgaaacaactttggctgatttgttgacatgtttctcactgacatatgatttttttaaatacttgaaatttctaaagtttctgtttaattgaaaagactaatcctttttaattttttttttgagaaaagtttttcatatactatattttgatcatgttttcccctacccggattcctcccagatctccctactcacccaaccttgttttctgtctgtctccaaaaaagttaaaaacagagacaaaagcaaagcaaagcaaatcaaaaaaatcaaaacaaaacaaatcaaaatgaaacaaatagtccacaaaaatacccttgagttagtttgctttgtgttggccaactactactggcacggggctgcactgagtgtggttggtatagccagtgagattctattttttggagttgtatcagttgcaggtagtttcttggttacgactggaagcttgtcttagttggtcttaatattgctgttttggcttacacttccatattgctgttcatcatcaaaggaagttaggacaggaacctggaagcaggaacaaatgcaggcatcatggagacgtgctgttcctcgtaactatttcaatctgattccctatggaacccagtaccgccagtccagtggtgacctcacccacaataggctgggccttcccacaatagtcactaactaagaaaatgttcttggaagggctggagagatgactcagtgctcaagggcactgactgctcttccagaggtcctgagttcaattcccagccacatggtggctcacaaccatctgtcatgggatctgatgccatcttctggtgtgtgtaaagagaatgaccttgtacattgtactcacatatataaaataaataaatcttttctttaaaaatgttctaagcctatcaagaacagaccacatgttcaccttgcccactcagtgttgacccactggctggaacctgtgcaggtcttgggcatgctgccacagtgtctaagtgctatatgcatcatcatgcttggcttctttgttttcttcggagcctgttcctttgtccatatagtatctactgataaggcacctttaatggtaagaggatctctacactaaactttgaaatgagagtgagaatcaccagagattaaggtggacacaatggaatgtggacagccgccaacagtgatgatagcaggaggcgaggaggggctctgttgcctgtgctcactcgcatctgtggcataggacgaaccgtaggctgcctttatgagtaaccgccaagccttatgaggaaaggttttcagcaaacactgttatgagacttagactgtctaggtttagttacacctgtgaacttgcacagtgtaaagtaacatttcgtggacatttgactacatgtttctttgcctttaatagaattgacctttgtatacagttatgtaaattttaattttgattgcatttaacaacgacctcacaaaattctacaaatttactgttggtacaagtcaggtctagcatattcctaggtacaaacaggaataaagtaatcaaaggaaaccaagcactaaggctcacatataaccctagcactcaataggcaaagggagaaagagtatcattaggaatccatggagaacctaggacacaaaaagaaaccaatctcaaaaaaaaaaaaaatcaaacaaggaaagaaagaaactgcggcccttgggaggggctgaggcaagggcatttctgtgagtttgagaccaacataacttgcataccaagtgccagggctcctgttgtggtttccttcctgttggggtaataaacaccatggtggagaaagctacctgaggcaaggacgggcttatttggcttacagtttacagtctttcattgaggaaaaccaaagcagaaacctggagatagaaagtggagcagagaccacagaggagtgctgctcaatggtttgctcccagacttgtgcttagctacttttgtcatccaacctgagcccagctgtctgcagaaggaacctcccacactaggctgttctggtccaaactcctctccaagctgactgattgaaactggcttctctcagcttctcactgaattgctctgcttggccccaaactaactctggcaatctgttctaatctcctggctcctccttattctctggctagttctgtcttcacctgcaaccctgtctctgtaaagcgatcccagtaaaactgtctcctctttctatccccatctctctttgtacctcttaagtcacctctctttcctgtctgtcctttgtgagttgggcatctcctatctctgactcattccttcaatctttctcttactcatcattttttatgccccacaattagacactttcaaacatgtctgtttccttctacaaatcaattttaccttcattggattaaggtgttttctaaaggtgtgtctaaattctagccagggagatgaaaggtgtgtgattccacctggatcacacaagacctggaaggtctttcaatgtggtcccttgtcagagcaatcatgttgctagattaaaatccctctacaaggcactctaccttggaggtctcaacccctcttaaatttcaccccttggtgtttatgttgttgttattcacgtatttgttactaagctgaggatggaacccagtataaagttcagagacagagctatatccctaacccagataccacctatcttaatacagtcacagtgacaacttaattgaaatatgaattaatgagggcctctcaaccataggcatatgttttcaactcatttcctctgatttttagttgtatcttttggcttgatattgttgattggcaggagttctctgtattctgggttgcagtcctttagggcataagtgattgcaaatacattctcccaggttttgtgttgtcttgcatcctcttgtgactgttccttgatgtatgaacttcttttaattttgataaagtctaatttcccatttttatgttttatgattcatcattggtttttaattcccaggtgaaacttacatgtcataaaattaatcattgtaaagtaaaccatcttacagtcattcagaagatggtgcaatcacttctaactagttctaagacatttcttttactaggtaataaagcctgtgcccactaagcaatcactcactcttacccacccccagcctctgacttccatctgtctaaacagacagaccaactggcttctctgtgtgtttacctactcagcagtgttggataaacagaatcatacaggttctgaccttgtgcatctaacttcttttattgagcttactgttttctaggttcatctacattgtatgtagcatataccttatactttgtgacattttactaataaataatattctgttccatgtatttgtacatttaccatagatttatagttcattccttctctggtaaacattcaggctcttcctacctttctgctattgtgaattatgtttcaggaacaattaaatgtttgaatcacgttttcagttaagtggacatgggattgctgggctcagttttgtttctggaataactttttgtccaggtaaaatttgaagttagctgggcctggcagttcaggcctatagttttcttactcaggaaaggattttaagttaaagacctacttgggttatcaaatgagtatatggctagcctcagcaacttagtaaggctttgtctaaaaaattcaaggaattcataagaggactgggaatacaattcagagacagagcatgttcctaacattaacaaggccccaagttcagttcctatccaggaaaggcagaagggagggaggggaagagagggaggggtgtgtgaggctgacttccttctgtgtctcattcttacctaattttggggatttgaaagatgtttttttagtttttagtttaacactgcttctgacaaaatgctgttctcatgacctttgtccctcactgaaatatgttttcatgacttttgtctctgtggtggttttgatatacttggtccagggagttagtggccttgtcagagtaggtttgaccttgtaagaggaagtgtgtcactgggggtggggaaaggggggtcggtttgagaccctcctcctagttgcctgcaagccaggcttctgtttgcctttggaacaagatgtaaaactctcagctcctcctgctccaagcctgcctggactctgccatgctcccacttgatagcaatggactgaacctcagaacctgtaaggcaacctcagttaaatgctgtcctttataaacgttgccttggtcatggtgtctcttcacagcaacagaaaccctaacctaaagtctctcactagaacatgttctcctgatctttctttgtcctcactagaatgtgttatcctgactcgtctctcagtagaacatgttctttgaccttagtccctctaggagatgttctcttgacctttgccctcactaggatatgttcttctgacctttgcccctcggtaggatgtgttctcttgacctctatctctcgctaggatgcatttctttttgttttgttttgttttgttttgtttttgagacagggtttctctgtatagccctggctgtcctggaactcactttgtagaccgtgctggccttgaactcagaaatccgcctgcctctgcctcccgagtgctgggtttctttagctgctttgctgattgttctttccaagttggcctgagacaatttgatgatgatgggcctgctatggtttctttattgctatgcttgggttttgttggatttttttacatgtgagttcagtaaatttacctttttatttcccactgtcctctggttttttttttttttttgttttttgtttttgtaactccaaggtgacatatatgattgcttaaagttatccagagtcgagctaatggtgtacaatatattttcagtctatgttctgcttttgattttatgtaatttctccccccccccaactttttttctctccccttttttaaggcagagcttctctgtgtagccttggctgacctgtcagttgctctgtagaccagacagacctcaaactcagagatcctgagtctcttgcctcagcctcccgagtgctgggattaaaggcatgtgccaccgccaccacccccccagctgattttatgtaatttcttttgtggcatcacgtcctaatgtttcttcaccagcatataaactgccattaatttcacctaccacctccttcatctcaaatagtaggttagttgtcccttcatggagcttgtaattccctttattaaaattctcaaacaaaccctttcaggggagtgaagacgataagtttttcactttgatttttaaaagatttattaaaatacagtttctcactatttgacaattctatacatctatataatttattcaaatctgtcataagcaagaaggtagatacatgtagttagtataacaaaagttacattatgctgagtgtcatcacacaaggttcacactctaaattcctaactctggtcttaagcctagctccccaaggctgatcacctgtgcaccctggctgaaggtcagatctaggctctaacaaaagcttctgattgcagggtcaggatcctaggggagtctccccagcagggcaaatcaaggtgctgtctctctccagattggtctctgcctcaagcctggcagtggtggtgcatgtctttaatcccagcacttgggaggcagaggcatgaggatttctgagttcgaggccagcctgatctacagagtgagttccaggacagccagggctacacagagaaaccctgtctcaaaccaccaccactttacccccccccccccaaaaaaaaacaaaaacaaaaccagattggtctctgctgaaaaagaaatcttgattatggttcatccttgaaaaatatcagttattctaaatctaggacaatatactaagagccatttgcaaaacgctatacaaatctcacatgtaatctgacattgctatacagctgagtcattttaaaaagaatttcttagccagtcagtggtagagagtgctttaatccaagcactctggagtcagagataggaggatctctgaatctgagaccagcctgctctatggagtgagttccaggacagccaaggctacacagagaaactctgtctcttaattcatttcttagagatagagatatggagagcacctgctgctttgcaggggacccagacttcttccaggcctttcattacaatagtactttgtctgaactctaaaggcacagtatcataaatatcctctatttttctctcaaccctctcctggcttttccatgctgagtcttgaaccttattgatcaccttcatggtggtgctcactagcactctgcattgcctggctgccaagtgtatctaccgggtctcttagtgtctctagtttatagtctattaagtattctataaagacgtatcagaagagagcaagagaagtctttggccttatgaaactgtgctaaaattttgttaaggaaagctgttattttcctagcagtttggaagcatggcgaatccgtgttgttgactgttgactgggctccacctgctgctacctggtgccttcgctctccatagctgactcctccctcatcacaccgtggagcatcagcagctcatagctgactcccctgagctgatcttcactgagtccctttagcagaggactttttagcatcttttttattctcatcctccgtcagtatgccctttcctcatagttaaataacgccctaatgactagtgtgctcagtgcccatcaaatttgatctacctgaggtgtaacattctatatattctagaaatcatttcattttgccttacaaagaggccactgtagccctgctctgccattcagatgctgctgtagttgtgtgtgtgctgttaggactatgcttgtgcatgtgctgagcatgtgtgatagtcctagaacaactagcagggtctgttttactgtgcagcctatgggatcagacccaggtcatcctgctgtgtgggaattctcgttactgagccttcttcaccttctcctcctcctgcctcttatggagttggtcctctcatatctgcccgtggctcagttctcatacctcaacagtaattctaaactattaataaagtcagttcccaagccgggcgtggtggcgcacgcctttaatcccagcactcgggaggcagaggcagaggcaggctgatttctgagttcgaggccagcctggtctacagagtgaggtccaggacagccagggctacacagagaaaccctgtctcgaaaaaacaaaaacaaaacaaaacaaaagttagttcccatctataatctcagaatttgggtgactgaggcatggctaagttgtgagttccaggccagcctaggctatggtgagagaccctttctgaagtaagcagacagacattagtgagtataacgatcatccaaggtcctaatttaagatacaggtgtgtaatcctgccctcgaggattgtgatcaaggaggtggggatgaagctgaagcatcgttatttgtaacaactcctaatggacattatgcaggaccacactttgaatggagactgcttacagtcttgttcacttcagtaaatccaatacacttgtctcctccatgccagtaattcaaacgctttgccctcttcctcttatgactgatctccttcatgccaacattttgaggttggggctagaccatgccttgtgcagtgcatccttataatccagacacttggatcatggaagagtcaatggactacacatagagactctctttttttttttttttttttaagaatctcaaaaccagggctggagagatggctcagcggttaagagcactgactgctcttccagaggtcatgagttcaaatcccagcaaccacatggtggctcacaaccatccatagtgagatctgacaccctcttctggagtgtctgaagatagctacagtatacagttatgtataataataaataaatctttgggctagagcgagcagggttggaacaaacagaggtcctgagtccaattcccagcaaccacataatggctcacaaccatctgtacagctacagtaaataaataaataaatctttttttaaaaaacaaacaaacaaacaaacaaacaaaacaagaatctcaaaaccagagccatagctgatagtcaattaacacataattgcttttgattattaacgtacaggaaaacatgcagaaacaatggtgaacagctgctgttctaaaccccacgttgttgtctcgcctgtctccactctccctaccctgggactctccaggccttcctacagtccagcctccagcggagcacactagacacaacactttggccctttctcccggatcctaacaactgaatcttaaacttcttggagctgatgatgtcgataatgcacaaaatagaactggctttagtgtactcagctcaagttataccatggctaactcacaaaaatagttgactgaagcagcccaaagcaagtgcaagactgatagctgcccattcgccaggcctagctgtttctcagagccagagccctgtcgaagtttagtttagtcctggtcaggatgagactcattgttttgtaacattttcccaagtgattgagagcacagcttttgcctagtgttgaacatctagtagacattttatattcctagcatgatctgaaagagtaaccaaagatgtgtaagcagctattataatccacctctacttatatcatatatgtgtaagtccacttcatagaagacagtgcaactctgtccctgataacaaagggcctatttccacaagttcctatgaaaggaaactccacaagaaaaaaattctacatttacgaaaaaacacacaggcagactaggcagtggtggcacacatcttttatcccagcactgcgtgggcagaggcaggtagatttctgagtttgaagccagtctgatctgcaaagtgacttccagaacagccagggctgcacaagagaccctgtctcaaaaaaagggaaaggagtgagggagaaagagtgaaaattatatatctggattatcatccgagtataatttgacttaatatttgaatgtaaaatatacatatcattcaggtactgatttcctctgaatcatatgtacaaatgtttgaaacaaaggaggaataacaattctataaactgatgtatcatgggtttagtcatgagtcatgtattgtatagtgccttagtcattcattactaacgcctttctataaggaaaagattactaataaaaggcaataactgattgtgaaactttttgactatgtattactgtaagtaggaaaagccttttaaagccatattggagaaaatttttaatcagaggaattagatttgttcaattaactttttcaaaaatagcaaaaataacaccactttttagtctttttttcccctcgagaggctgaagttatatctcagttgtagagcacttgcttgctgtgttcaccaggtggtacacacaaggccctagagagctggggggggggagtgcacaaatatttggaagattacacaaagttataatgacatatgtccttaaaacagtaatgttgtggttttcatgagcgtgagcaagtcccgacaggtatatttgataccttaaaagtaaggcttttggctcgttttactatttaaaaatgaaagacatgcaattgccgttgtgaaaaaaaaaataaaaattgaactaaagcgggtaggatggcaactgttacactttgttgttgttgttgttgttgttgttgttgtttgttttttcaagacagggtttctctgtatagccctggctgtcctggaactcactttgtagaccaggctgacaactctttatgcagttaaaattggattgctaagtcttagactgctcactctagaccaaagtctacgacagtctatagctgcccgccagcccacccgcccttccctccacctttgcccgggacacctcaggcacaggcagaagactgcactttgaaacacaaagcgacttgtcagttgaatttattcagcctgggtcagttctgtggaaacaaagtcaaggcaattgtttgatataattgactaaggaaactggttttacaggatagtagaactaacttagttggtttctaaagcaatttaatagagtaagattccagtgacgtcacagcagattctaaagaatgactatctagacaaaagaaaaacacaccagcatctgctgtcacctgaatttttgatcttagacattctgactggtgtgaggtggaatcaaggaacactcctccattgttggtgggattgcaggcttgtacaaccactctggaaatccgtctggcggttcctcagaaaattggacatagtactaccggaggatccagcaatacctctcctgggcatatatccagaagatgccccaactggtaagaaggacacatgctccactatgttcatagcagcattatttataatagccagaagctggaaagaacccagatgcccctcaacagaggaatggatacagaaaatgtggtacatctacacaatggagtactactcagctattaaaaagaatgaatttatgaaattcctagccaaatggatggacctggagggcatcatcctgagtgaggtaacacattcacaaaggaactcacacaatatgtactcactgataagtggatattagcccaaaacctaggatacccaagatataagatacaatttcctaaacacatgaaactcaagaaaaatgaagactgaagtgtggacactatgcccctccttagaagtgggaacaaaacacccttggaaggagttacagagacaaagtttggagctgagattaaagggtggaccatgtagagactgccttatccagggatccaccccataatcagcagccaaacgctgacaccattgcatacactagcaagattttatcgaaaggacccagatgtagctgtctcttgtgagactatgccggggcctagcaaacacagaagtggatgcccacagtcagctaatggatggatcacagggctcccaatggaggagctagagaaagtacccaaggagctaaagggatctgcaaccctataggtggatcaacattatgaactaaccagtaccccggagctcttgactctagctgcatatgtatcaaaatatggcctagtcggccatcactggaaagagaggcccattggacacacaaactttatatgccccagaacaggggaacgccagggccaaaaagggggagtgggcgggtaggggagtgggggtgggnnnnnnnnnnnnnnnnnnnnaaaaaagaaaaacacaccaaacccccacctagggaggaaaaagtcgtccttcccagacgttttcttttcacaaagctcctacattttcctctccccatctacttttctgtctactgccactctgttcattctttccacattccacaggaaacatcccttctccatctccccccacccttccctctgtgtgtgtgtgtgtgtgtgtgtgtgtgtgtgtgtgtgtgtgtgtgtgtgtgtacatagacaagcatggtgtagcagaggtcagaaaacaaatttttctccctttacatggagtcatgatcctgcactctggtcacaaccctttctctgctagggtctatactggctgagcccacgaactgttgacgttttttggttggttggttgattggttttcccacactagggactcactgtgtagctttctagctctggctgtcctagaactttctatgtagaccaggctggtccggaactcagagagatccacctgccgctgccttccaagtattgggattcaaagcatagaacattacacccagcttctcctactgtgttcgtaaaattaatgaaatttccaccccccccaaaatgaactaataagttgtatatagagcttaaagtttacaagtatgttaacaagtatgttaaagtttacaagtatgttacaagtatgttaaaatggacttacaaaaagaaatgtaaacagatgttttattatatgcctacaatctcccaatcatgaggctgcagcaaagccatgactcagtcttgaaaaacaggtagtccagctagttctttgagtttggaacataattagttgacatgtatgtgacatgtatgtgacatctagtttctatgcatatgaccctggcttccattcctaacactgaaataaaacataagtacaatggttctaaaacattgtgagcataattaaagccactgaattgtacacttaaaaattgtttaatgcactagtgacccttgtctaagacgacttaagaatcaagggaccattgctttgttacagatctttttagatatccttgcttctttaatgggttactaaaaatttcactatatgtggttcagttatctgtctgctcatagtgtccgtccttcagctggcctgtcagcccatgcgccctggaacttgagcagagttcataaacgtagctcctagggtgtcttgcctctccacacttagcgtctgatttactttgtttttactgattgtgtcttaagtcttttaaaataaatgtaagaataaacaatgaaagacagttttagtaccaggaaaaaaaatttttttaatgtgctggacaaggtggcacagggttttagcccccaccccactccccaaaaaatggaaatggttaaaaaaaattgtttaaccatgatttttaatttttttttaattatataaaatgattaaggaacataactatatattttaaaaactaaagggaatatgaagagataaaagctgttgaatgatgatatatgtacatatgtatgtgtgtttgtttggagttttgtttttgttttacacaaggtttctctgtgtaatagccgtagttgtcttggaattcactttgtagagtaggctggccttgggaactcaccaaatctgctcccctctgctgctgagcgctgggattagttcatgtcctaccatgcctggtgcaattcaaagctagcctaggccacagagttatgtattttcagaaataaagtcaaaatgaaagattttgtttttatctagtgagtttttattagaaggaattatttatgtataagtgtgtgtgtgtgtgtgtgtgtgtgtgtcccctatggttgttgaggtgtacaaacagaaaatgtgggtctctgagattgctatctattagcattttacattttcttgtattgtgtacaatcatattctcattattaataataactatattgattagtccctttttttttttttttttttttggtttttgcttttcaagacagggtttctctgtgtagtcctgactgtcctggaactcactttgtagaccaggctggactcaaactcagaaatccacctgcctctgcctcccaagagctgggattaaaggcgtgtgccaccacacccagcagatttatttattattgtacataagtacactgtagctgacttcagacacaccagaagagggtgtcagatctcattatgggtggttgtgagccaccatgtggttgctgggatttgaactcaggaccttctgaaaagcagtcagtgctcttacccgttgagccatctcgccagccccccctttttttttccagacgtttttggttggttttttgtgacagggtttctctgtgtgtcactgactgtcctaaactcactttgtaggcaagtctgttgtcaaactcagatccagctgcctctgcctcccaactgctcctaggattaaaggcgtgcatcacccactcagcaattagtcatttttttaaactcccaaatgtatacaaatttatttagcctttcagaatagaatagaatttggtgcaaaagattgtggtacatagctcagtgcaggcctgaggccctgggtccagtcgccagtgtcagaaaagtcatgtcagggggttaatgtgcactaatgctagagcatttggcatggtttcagtgtgttgtcaagttttctgcagtttaatgaaatgtgtggtttttctagcttgacagagccaattcactgttgaatcagactcagcagccctacagatacctcatagagtctgtgcgacagagagatgccaagattgactcactgatgaagtctacagctcaacttgagaaagatgtcaggtaagccatctacacgtcttctatttaaataggagagacattgttaatatgctgctgtttcagaactcagattgtactttctaaatagtttaattatgagcatagtcttaaacatggactcaaggattcgaactaaaaagaagtgtggagctggctcactgggaaagtgcctgctgtgtgaggacaggagtttagatctccagaacttaggtgtagccggactcagcagtgcaggtctgtgcttccaaaacaggagcgggaaggagatgggaggacctggaaactgacggagcagctatcatggcagaagcaacagcaaaccaacaacaaacaaacatgtctgaaacaagggggaaggcagtgattcttgacctccatcatccatacactgagtgcatgtgcacacctgtactcccgtgttatcttcatgggaagtgtccatctttaccttatgaccagaagtctgagcatggaaatcaggcggtactcactagcacaacactccataccacagcaaagagccagcttgctcttgtcctcttagagtctttacctagacgcgggcagccaggaaggaaggatagaagcagatagcatttgtagagtcaaaacggcttttgaaacagatcaagtttacacagttacaatcttatctgcctctcaccctttatgtgaaataacccaagaattaccttagtttcagtaaataaatttcttttttaacacctttgtttaaaactggttctatgctagaaacaaaaaatcttatgcaaaaaaattgcttcacttactggtcactcgcattctttctagaatgcctgtctttgtttctttttttggtttttcatgacagggtttctctctgtggccctggctctcttgaaatagctcaatagatcaggatggcttcaatatgagagaatttcctgtctctgcctcccaagtgctggggttaaagtgcaccaactcagtcactagtcacgtcctttaatctgttcatttacaagtctggggcattggggggggggggtgcctgtgtttgtgtgtgtgtgtgtgtgagtgtgtatggtgtgtgtgtgtttatgtgtggtgtgtgtgtggtgtgtgtgtgtgcctgtgtgtggtgtgtgtgtggtctgtatgagtgtgtatctgtgtatgtgtgtgcctctgtgtgtgtggtgtgtgagtgtgtgtgcctgtgtgtggtgtgtgtggtctgtatgtgtatgtgtggtgtgtatgagtgtgtgtgtgtgtgtgtgtagtgtgtgtgtgtttatgtgtgatgtgtgtatgtgtttatgtgtggtgtgtgtgccagtgtgtatcgtgtgtgtatgtggggggtcattgtgcaagccccctcacctgctgagccctcctgctggcacctatttttagtttttttattgttttgttttgttttaagattgggggatttattttatgtatatttttacactgtagctgtcttcagacgcaccagaagacagggtcagatcccattacggatggttgtgagccaccatgtgattgctgggaattgaacgcgggctctttggaagagtagtcagtgctcttaaccactgagccatctctacagccctatatttagtttttttaacaggaaaaaaaaatgatagtacacgttaagaacaaggttttgactcatgagaagttgtttatttaatcttagttattaaacttaagattgatataaaaatttcattttctgaataaccattaaatatgaaaccaaaaaaaaaattacaggtttcctaagatgtgcaaccaaaaaaagtgttctttcaatacaaatcttcttcatctctcatcattcctaccaaaataattgtcccagaattttatttgtgttcttaatatttgctcatgtaataaaataaagtcagatatatacagtaaacatcaaagtgaataaaagtttatttctaaaattactggttaaagnnnnnnnnnnnnnnnnnnnnnnnnnnnnnnnnnnnnnnnnnnnnnnnnnnnnnnnnnnnnnnnnnnnnnnnnnnnnnnnnnnnnnnnnnnnnnnnnnnnnnnnnnnnnnnnnnnnnnnnnnnnnnnnnnnnnnnnnnnnnnnnnnnnnnnnnnnnnnnnnnnnnnnnnnnnnnnnnnnnnnnnnnnnnnnnnnnnnnnnnnnnnnnnnnnnnnnnnnnnnnnnnnnnnnnnnnnnnnnnnnnnnnnnnnnnnnnnnnnnnnnnnnnnnnnnnnnnnnnnnnnnnnnnnnnnnnnnnnnnnnnnnnnnnnnnnnnnnnnnnnnnnnnnnnnnnnnnnnnnnnnnnnnnnnnnnnnnnnnnnnnnnnnnnnnnnnnnnnnnnnnnnnnnnnnnnnnnnnnnnnnnnnnnnnnnnnnnnnnnnnnnnnnnnnnnnnnnnnnnnnnnnnnnnnnnnnnnnnnnnnnnnnnnnnnnnnnnnnnnnnnnnnnnnnnnnnnnnnnnnnnnnnnnnnnnnnnnnnnnnnnnnnnnnnnnnnnnnnnnnnnnnnnnnnnnnnnnnnnnnnnnnnnnnnnnnnnnnnnnnnnnnnnnnnnnnnnnnnnnnnnnnnnnnnnnnnnnnnnnnnnnnnnnnnnnnnnnnnnnnnnnnnnnnnnnnnnnnnnnnnnnnnnnnnnnnnnnnnnnnnnnnnnnnnnnnnnnnnnnnnnnnnnnnnnnnnnnnnnnnnnnnnnnnnnnnnnnnnnnnnnnnnnnnnnnnnnnnnnnnnnnnnnnnnnnnnnnnnnnnnnnnnnnnnnnnnnnnnnnnnnnnnnnnnnnnnnnnnnnnnnnnnnnnnnnnnnnnnnnnnnnnnnnnnnnnnnnnnnnnnnnnnnnnnnnnnnnnnnnnnnnnnnnnnnnnnnnnnnnnnnnnnnnnnnnnnnnnnnnnnnnnnnnnnnnnnnnnnnnnnnnnnnnnnnnnnnnnnnnnnnnnnnnnnnnnnnnnnnnnnnnnnnnnnnnnnnnnnnnnnnnnnnnnnnnnnnnnnnnnnnnnnnnnnnnnnnnnnnnnnnnnnnnnnnnnnnnnnnnnnnnnnnnnnnnnnnnnnnnnnnnnnnnnnnnnnnnnnnnnnnnnnnnnnnnnnnnnnnnnnnnnnnnnnnnnnnnnnnnnnnnnnnnnnnnnnnnnnnnnnnnnnnnnnnnnnnnnnnnnnnnnnnnnnnnnnnnnnnnnnnnnnnnnnnnnnnnnnnnnnnnnnnnnnnnnnnnnnnnnnnnnnnnnnnnnnnnnnnnnnnnnnnnnnnnnnnnnnnnnnnnnnnnnnnnnnnnnnnnnnnnnnnnnnnnnnnnnnnnnnnnnnnnnnnnnnnnnnnnnnnnnnnnnnnnnnnnnnnnnnnnnnnnnnnnnnnnnnnnnnnnnnnnnnnnnnnnnnnnnnnnnnnnnnnnnnnnnnnnnnnnnnnnnnnnnnnnnnnnnnnnnnnnnnnnnnnnnnnnnnnnnnnnnnnnnnnnnnnnnnnnnnnnnnnnnnnnnnnnnnnnnnnnnnggggcatctagattgtttccagcttctggctattacaaataaagctgctatgaacatagtagaacacatgcccccatggccaggggtgtgtgtatcttttgggtatattcccaagagtgatatagctgggtcttcaggtagatctatttccaattttctgaggaacctccagattgatttccagagtggttgtaccagtttgcaattccaccagcaatggagacctcctctttctcgacatcttctacaacatgtgttgtcacctgaggttttgatcttagccattctgattggtataaggtgaaatctcagagtcattttagtttgcatttctctgatcactaaggactttgaacatttctttaggttcttctcatccattcaagattcctcagttgtgaattcttggtttagttctatatcccattttttgattgggttggtttttttggtgattagctccttgagttctttatatattttggatattagtcctctctcagatgtggggtaagtgaagatttttttcccaatctgtaggttgctgatttgtcttattgactatgtcctttgccttacagaagctttccagtttcaggaggtcccatttatcaattcttgatctgagagcatgagcctcatggagttctgtctaggaaatttcccccctgtgccaatgagttcaaggcgttttcccactttctcttctaattttcccactttctcttctaattttcccactttctcttctattagattcaatgtatctggttttatgttgaggtccttgatccacttggacttgagttttgtacaaggtaaaaaataagggtctatcttcattcttctacatagagacagccagttagaccagcaccatttactggagatgctttctgtttcccattgtatatctttggtgtctttgtcaaagaccaagtgaccagaagtgtctggttttatttctgggtcttcgattctattccatcgatcaacctgtctgtctctgcaccagcaccatgcagtttttattgctctgtagtaaagcttgaggtcagggatggggattctcccagctcttctttttattcttaagaattgtttttgatcttctgggtttttggctttccagatgaatcctaagcatgtagttattttagggaaactgaggacgaaactaaagatgaaactttttgtcagagtgttatatatttattacagattttataatactttcattctacctttataatcttggagaatggatatgtaaaaacctagagcaaaatgcctcctacactttgccttggaataatttttaagtactatattgctaagaatcagagtaactggaaatgtttaattaatttgtttaatttaattaaaatgtttcattaatctgttagaaaagatttcgtagataaattcatctcttgagaaagtaagtagcttatcttctgaaacatatagtgtgtctacagaaccaaacacatagtgtgtctgtagatccaaacatatagtgtgtctgtagagccaaactttgactccctgtctccctacctggtaattctgtggtcctgccattatgttatactacctccctatgctctgccctgaataatgggtaacttcttaaatagccttgctaaggaagacccatgaaatacagcagggtatttattaaaaggaaggcttcgagctgatgatgtgacagatagatatggttatagttgttctcatttcaaatattccataataaatgaactttttttttaatcctaagggcatactggacaggttagggaggtggcttagtagttgagagtgtgtgctgctcttgcagagagcacgggacccacaagggttcactcccaggtgccccagccctagggggatcctacactctcttctagtctctacagtgcctgcactcacatgcacacagacgcacacgcagactcatgcatgcatgcataattaaaaaataagatgaggggctggagagatggctcagtggttaagagcactgactgccgttccagaggtcctgagttcaattcccagcaaccacatggtggctcacaaccatctgtaatgggatcttatgccctttgctgatgtgtctgaagacagctacaatgtactcagatacatgcattaaataaataattaaaaaaaataagatgagtaagatctctttataaggttgggggatacatcatgctgactctttacatgggttacatgaggtacaatgtagcccagggcttctctttgagttgggcaaagttagtaaagctctctgtcttattatcctttttttgggttggttttgtttgtttgttttgttttgttttgttggtttttcgagacagggtttttccgtgtagccctggctgtcctggaactcactttgtagaccaggctggcctcgaactcagaaatctgcctgcctctgcctcccgagtgctgggattaaaggcatgtgccaccatgctcagcttctgtcttattatcttaacaaactttctgtaacaataaaaaaattccatatccattccatatccaatatgatagccacttcccacatgttacaaatttcttagttctatttaaagtaaattaatgtttattttaattgtcacagtggctatggtattgaactatacagccagctttttcatctgtgaaagtggtgttaacatacctaattcatatggttattctgaggattaagatattttatttatttatttattttaaagatttatttattttattcatatgaatacactgtagctgtcttcaaatacaccagaagagggcatcagagctcattacagatggttgtaagccaccatgtggttgctgggaattgaactcaggacctctggaagagcagtcagtgctcttaacttctgagccatctctccagcccaagatataatttttataatacacatagcataatatctagttatcataagtgattgccattattggtatttatctaacttttgacaactcagagtgttgataattatcttaaaaatgaaaaatgagaatggtggatttagataaaaatgtataattatagcaacattaattatcaagctaagtcgatggtgagattagcctccagagtctcactgtgtagccttggctgtcctagaacccggtacctaaaccaggttgttcttgggctcacatgtccacctgccttggcttcctggtgttggggttaaaggagaacaccactgtgctcagattaccaaagtagtgtttcataaatccacaatatatgttaacaggttctgaagtagtatttgatgggatatgatatctggctcccaggtgaagcacgtgccttccattgtgaaaaatctaagtagtgtgattgtggtattggacagcctgcctctgtgcatgtctaaatgctaagatgtggttcaaccgtcagaagccaggcacagtgctagacacatggctcagggggaagaatgctcgctgtgcaaacacagagacttgagttcagatcccagtgagcatcttaacaactaaaataacctacagtgcctgcagtcactgctgtggggatgcagtaaggagggtcactggggcttgcaggctgcctctagctccgggcttaggagaccatccaagggaataaggcagaatgagagaaaaccttatctatctcctccacataggcacggatgctggcccatctctctctctctctctctctctctctctctctctctctctctctcacacacacacacacacacacacactaataagttcacggttaccctcagttatgtaggagcttgaggctcacctgggattcatgagaccttgtcttaaccaatgaaaaactgagtaacttcattattttctttgaaaattaaataccatactaccctgaacccttacaagtttaaatatttacaatttattcacgcaagcattctaccactgtgccataccaccagacctattacatacagtgtatttagtatccagaaggtttagggtaactatgtactgaaataaaaccatcagaagcttgtcagaaagctcacagtaagatgttgctagtgcctcctttgagctcccgtgtcattaaaggagtaagtattctaagagtagcatgtcaactcttcagcacagcaccagagacggtcagtctggagaatacagtgtgatctgcctttggatctgagagggccgtggacagagaatgatttgcataggttttctttccctgctggcggtcagctctcggtttattcttaactaagtagttagagaagaaagactacattgtcaacttctcttacaaggctaagccacactatattgatccaggaagtcaaggtacaatatatcagaaatatgttttcatatagcaggtgagacagagccataaacatgaatttctaagtaataattaacagtgaaatgaacaattacaactgtaatataccgttccagatagatgtgctcgtaaggagatttgttttgtagctttatgagtcacacatgcaagctttatatttttaaaagtaagtttccattgttagaaactatgacttttgaagactaaaattcttctttttatataaaagatttatttattgttatatgtaagtacactgtagctgtcttcagacacaccagaagagggcatcatatctcattacggatggttgtgagccaccatgtggttgctgggatttgaactcaggaccttccgaagagcagttggtgctcttaacctctgagccatctcgccagccccaaagactaaaattctatgtgctcagtgctgtcaggacagtggatcatgtgaattttagaaatacccatgttaaaggtaaatatgctatagcgaggatattcccagatcttccagtcacagaaatgtggtctgaagccttcatgttgcttgtaacaaactgctgtctttgagatgcagcacaaatactgtgtgttatccccaccccacccagcttggggtccacagtggggctgttctgctgtttaattgtggaatacttgctttattcttgaaaagttaagttagtatccttcaagtacttcaacacccattcccatcgtactgtactttatttaatgggcttattagtgtttggggcggggggcgggggagagcagaggaagagagagaacaaaactgcacataagcaagtgtttaagcactgtgtgtatgtataagaatgtaacactccttgaaaaagcctagttctttttactgaattattttacattcgttttgaggagtatatatcttcagataaaatataaatagcttcgaatctgagcatttcagaaatatcagttgcttaccatgccttagagcctggcggcacaccacttaattcttttcagtgctttgctcagtaggctccctggcgcctacctctgcttgtcagtttgtttttctgccgagctgcttgcctttattggcatttaattactgttttcctctgatgcctgtttttcatctaagttagtaatagtgtacagcatttatgtggagttttatgtgttctgcgctttatgtaatcattcactaggtaattcgcatatccctttgacagccctgagcagtttacactcttacagaagtgcagatgagtttctgtggagctctgcctttgcatggctccgctgagggaatggcacagtaggaagccggtccgaactgcctccagcctctgctcccgaggctactgagtcctctctgagtcccctcgggaagttgacttattccagagtttgtgggagtgggttttttgtttttgttttttaaatcctttgatttaccaatttttccacaatgctcattatctttctttaagttcggaaaggccctcctattattttgataattgataacttttaattaaatataacctgagatgtcttacagcaaaacgcatctcgttagcttcatttcacccttgcagatttttgtctcgacatttgaggaactgtgctactttgattaattattgcttttctcaattcttatagaactggtcacatagattgttttttagtaatgttattatatagactttcatttgattcttcccactaatttctgtacatcaaacagtaattacagatagtataaagcagtgctcagtcatttcttagaatattaatatgaccttataatgggcactgccataaattaggatttatcagagaaaaatcacaatgaagacacagaaattgaagaggaaactaagaatttggagacacaaattattttcacagagtttacagttgactgatttatttaaattatatatttcacaatttactatgttacaaattataaaatttctagggataaatgtttcagttttacttctgaaatatatcttaaattttttgttgttttggtttttttttgttttgttttgttttttcgagacagggtttctctgtatctctggctgtcctggaactcagtctgtaaaccaggctggcctcaaactcagaaatcctcctgcctctgcctcccaagtgctgggattaaaggtgtgcaccaccacgcctggccaacttctaatatcttgtttcaatatttgtctatgcatgtgtacttgctctttacttcagcatttcagaagtaagcagtcaatgaaagagtggtgatggggctggagagatggctcagtgggtaagagcaatgactgctcttcccaaggtctggagttcaaatcccagcaaccacgtggtggctcacaaccatccgtaaagagatctgactccctcttctggggtgtctgaagacagcaacagtgtaaataaataaataaataaataaataaataaataaataaataaataaataaataaataaataaatagagtggtgatgtgcccaccaggcagagtagtccaactgtcaaaaaaactcctcttgcgcaaactcctcttagcaatagctaagccactcatcaactaagtataacagtgcctgctctgctgtctttattgattacaaactcgatttatctttagttcaagccatcagattcatgtttattctttttatttttctcttaactctcacaacatgatcacttttttaaacttgggtttttaacagcaacttaaataaagagaagtcagccctgctgcagacgaagaaccagatggcactggatctggagcagctcctcagtcaccgcgaggtactcgtcccacctgcaatccatgtctgtctgcttcggcctggccttcaaatgcagctttgggttaagataacaccgggatcctggtgtccagtggtctcagtgacttctgtttgtagctcactgcgatcgctccattgttataacatttgatttgtgatatactttattttagagctaactcacttctggagggtgtttcttgttgaccggtatgatttgttctatctcagtcacggatttgcacattatttaatcactacctgctttctttctttctaccgtaactttcctcagtgttgctctctgtcttacatcacagtctgcctagctgtagtacacagtactaaagttcaagggcttcttttttggctttttctttttgcgttgttgttgctgctgttgctgttgttgagaggggtggtgtgatgactctgaggccagcctccagctccctagccaactgtaatgatgcacttctgaccctccctcttcctaaatgttgctcaccaaatgtttttacttctttgagaaactgaattttttctaaagatttatttatttattttatgtatgtgagtacactgttgctgtcttcagaacagggcatgggatcccattacggatggttgtgagccaccatgttgttgctggcatttgaactcaggacctctggaagagcagtcagtgctcttaaccactgagccatccctccagccccgaaactatgtttttaatttataaacgttattgttgaatattaaagtgcagtgtattttggtcacactcacacagtctctcagattctgacctacttcctactcacttagccttggactcctttcctcccgtctggcttaccgctcccttccagccttcctgtctctttaaatccattcagtccatttctccattttatactggcctaattttttgtggttttcttgagatttattagaaaatataaacgggacaggtatatagcacgattggtaaactgcttgtctggtatgcacaagggcctaggtttcatccctagcagcagataaagctgagcatggtgacacctataattccagcactcaggtgacagaggaaagatggacagaaattcagggtcatccttagccacataggaagtttgacgttggcctgaggtacatgagaccacacacgcacaaatccatagtgtgacgtgactttgggggtgttgatgcccctgtttcttttggcaaataaatgtagttgttaactactcccagtgtcaatatgtaaaatagtctcaccaccccaaaaactccctcatgccccctttgaggagacttcctttcttttcccctgtcctgtgccttaatgtcagcctgctttcttcatctgcagtttcaccttctatagaaagttttatgaatgtcattagcaacgtagcgttttcacctggctgttctcattcactgagatctgtgccacattacccggctgcagcgcggtgcactggtccattcactgcttgatggctggctacttgggtcatgttatggtacatttaaatgtttaatttactcttacattaatatgacaatttaatatactagttataattttatatctagattatgattgcatatttatgttatttattcatgtgtttcattttaaaatacagtaccaaatctacagataaaaacccctctaaaaagttgtttgcaggtacttgtgcaagccatgggcctctctttcccttggatgcatgctagagcacaaactcggggtgagcatatgttggtaagaaactgccaaacatctctagggtcagtatgctcttgcactttctatcacaataatacgagttccagtatctctgtatccttaccaacatattgctaaatgtaatgattttgcctaaagtatttttccagtgaattatcttaagcattgcttcttctcaataatgtttttatcaattttatttttctacaacaaaaagtttaaaaagaaatcactgtttttcgaggttaataaagttgctttctggtgtagaaaaagtctgtcaactctgtgggaagaaatcactgaaagaatatcatcaagagggctggagagatggctcagtggttaaaagcactgactgctcttccaaaggtccttagttcaaatcccagcaaccacatggtggctcatagccatctgtaatgggatctgatgtactcttctggtgtgtctgaacacagctacaatgtacttacatgtaataaaaaatatacatatatatattgtcaagagagagtaactggagacagttgctggaaacagtttcaaggtgctgtcccagaagtggtgttgaaggagttggggggttgtctttgctagagatgaggacggggctggagctggctcagtggagggcacctgctgcttggacatgtgacttggttcctggcacgcccatgccatacaattcccattcacagctgcatacagctccagctgtaggaggtgtgacatcttacggcccctgtgggcagttgcgtgtccgtggtgcatatacagccaagcaggcacacacatacacataaacaaatggcttttggaataagatctcttagataataggcacaagagtaaagtgaccatggcaaccatggcctgtgctgcagctctctgggtgctgagggggaagatgaagaatttgaggcagactggcctaaatagtgaaagtcttacaaacttaacaccaacaaagcaagggaccagaaggtagtcccgaagtgatttggttgtttggttggttggttttcttgctttttgatacaggctcatgtaccccaggttagcctcaaattcactttgtagccaaatgttgaacttatgatcctcctgcctctacctactaagtgctaagattttatgtgctgctattttatatgctgctatgttattgggctgctgggaccaaacatgggacttcatgtgtgctaggcatgctttcagctgagctccatctcagcctctgaatttgatgtacggaaagaagtccattagtgagagatggcagagccaggaagctgccttgctcttcttctggcttcgggcattctaggccttctccatcagtaccgccatcacttatttcccggaattctgcctccggggaattatttcttccctatggaagcctgagttagtcagtgtgtgtttttaaatctgaatgtgtaaaagatcatatccaaaggtttttgatctgtcatatatctctatctgactttcctttcagaatggtcagtctcaattctgcctcaagaattaaaattctttaatgctaaagaattatgccagactttgaaaattatagaaacaatttacttctacattttatatctcaaactcgaagccacatttttcatgagttcaaataatagctaaaaagccgtgagccaggataatccatcttcccttcagttaagttttctcaggcatttggtcacaaggacaaaaacctgattaacagcacccaaggtattggcttccttcacactggtgagggccctggggagatcatttaacattatgtcatgactttaatcagctaaatttcaaaagtttaaattaacgattcagatagaaaacaaataaagactttcaagttcatcagagttagggctccagctccacctttaaggcagaccactgtcttaaagttcttgtgtgcctctgcatgttcacgtaccctgagttccatcaaacctgtcagtcaaacgctgacaggtgctgggaatgggaaaggcatttggagtctgaccgcacaaagttcccattttctaagttagtgttaccacagaacagcacctgttcagaagtaggtgtgctatagagctggagtatggctcaattgatacagtgctttcctatcatgcctgaggctccatatttaatatccaaaacttcataaaaaaccaagtgtggtggcacttgggaagaggaggcaggaagattagaagttcaaggccattatttgctatatagcaggttcaaggccagtctaggctacatgagattctgacccaaaagcaaccacaagaaaaagtatgtcctctcatcttacacgaattcataaaattatatattggcctcatatgataacaatattttagtatttacattcataaatagttgtgtatattagagttatatgttagataatttttagtcttgacttctttacggaaaatctatatgtaaaatctatatgtgccaggccactcctcttcattctgtgttccccacatttgtttctgtattcagtgagactaaaatgcaataaaagacaggttggctcagaaaattccttccatcagagcaaaatttattatcatgatctcagcttttatgatgagcatcataaaagcataaagtccaatacaacctctccattttagaaaactaccctaggaacctattaagccctgccgcgtagatcccgcagtccagccctctctgcaccccacctctgccatgggccctggtggcacagatgaggctgcttatgagactgacgcagatgtgcctaccatacagacagctcacatgatgctgaaagtaagaaaatgcattttttttcttaaaaacaaaaaggcaagtcaacttgtttttttatgcttagtaccatttaggcaaaacaaaaacaaaacagaaaatatgaattattgtttgcattacttccaggaaagttttgcctctgtagctgaagttgtagctacttccttctttctttcttcaggaaatgaaaacttcatttttccccaattgccaggaaagctcatagctgaacatctcagccgacattaccatctttttccctcttctacttttgaggctctacaatgaccttttctgtctccttcccagcagttataatctgttttactcttttgggttttttttggggggggggggttggtttttttcaagacagggtttctctatgtagccctggctgtcctggaactcactctgtagaccaggctggcctcaaactcagaaatctgcctgcctctgcctcccgagtgctgggattggattaaatgcatgcaccaccacgcccggcctctgtttccctcttatatgtctgcacttgccctgggattgacacgggatggcacagataaaatagaaaccttaagcagttgggtttagaaagaaaccgggaaaaggaaacatgggccatgggctgtgcttcttagcagtagcaggactgaaaaactggaggtgggaagcactgagtgaaggaactgtgacctcttggaccagctattccccagcttgtcccctgagagtcaccaaaagtcacgtactgtccaccacttccttcagttcatattgccttaagagaaggagaaatatgatcatgcctgaaaattctgtttctgcttttctttattattagagtgtttgtctgtctgtctgttgtaatgctaagagttaagctcagggcctcacttctgggaaggtgctgtttcgttgagctaagttacacccctaagccttcaatgctgcttttctttctccctctcccttcatatatacatattcattcatatatacatatatgtgtatatgtgtgtatatgtatatatgtgtgtatacgtatatatatacatatatgtgtgtgtgtgtgtgtgtatgtatgtatgtatgtgtatatgtgtgtgtgtgtgtgtgtgtgtgtgtgtgtatggcagatcataggtcctaataaactcttgagagttggaagaatgtctttaattgaccaaatgtgtattttgatactatccaagacttattaagctctggtgtaaaagcctttttcccacagcctttagagttatagtaagggcagtggtaagatctccacttaagaagctattccagaattttcctgaactagattgctggtgatggcctgagtcaaaggtagactgatttaaagcacatcacagcacttaggaattggatttaggtgctgatgcagagggagaaatgagagctgattgccagcctttggcttgatcctaggtctgtggtgggagaaggaagaataaacttgggaaagaaaggtaaatatctacgtggatataccacttcagggttaaaagatgagtttttaagcccaagagagaattcatgtagaaataaagatgtgagtcacagcataatttttttatgtggaaacagattaactcgtgagaatacatagattgagaacaaaagaggtgcacagcaggatccccagaaacactaacatggaagggcactgccacaacacagtgaagagccactgacatcatgaagagcagcaggaggaaaggcaagccgagaaagcacaggtaatgccactaagagcagaggatgctgttagcaccagcgcatactgcaaagaggtcaggccaggctctcagaggcttctgtctactatgatgtcatgttccatcacatctatcctaacatggaaacttctgaaatgaccattcaatcagtagttgtgaggtacagtggattagctggccatagtggcacagaccatggtggcacagtcctagttcttaggagtctgaggcaggaggatggaacagttcacaacaagcataggatacatactaagtttgagaccagcataaagtacatggacaatcctgtctgagatggggagggggggaaggggaggggaaaagaggagaggagaagagaggcagaggcaggctatgaccgactatgatttcggtccatcctcctctgcatagtgatttctatatattgagaccctatcttaaagaaaaaaccaaaacaaaacaaaaagaaaggttctcccttctaaaggcagctggagtggaagcgacagtgtgctttagaggatatcttagtgcaacagccgatgacagcaacccactcagctcaccagagcgctgggaataaactggaggactcgtgaatccattaacatctccacaataaagaggactcagggaaaagctgccaaagcaatacaaagacaacactatccctcttaacctttccaggacatgcacacacacacacaaagaccaccgcttagtctaacctggcatcctccctatccccacannnnnnnnnnnnnnnnnnnnnnnnnnnnnnnnnnnnnnnnnnnnnnnnnnnnnnnnnnnnnnnnnnnnnnnnnnnnnnnnnnnnnnnnnnnnnnnnnnnnnnnnnnnnnnnnnnnnnnnnnnnnnnnnnnnnnnnnnnnnnnnnnnnnnnnnnnnnnnnnnnnnnnnnnnnnnnnnnnnnnnnnnnnnnnnnnnnnnnnnnnnnnnnnnnnnnnnnnnnnnnnnnnnnnnnnnnnnnnnnnnnnnnnnnnnnnnnnnnnnnnnnnnnnnnnnnnnnnnnnnnnnnnnnnnnnnnnnnnnnnnnnnnnnnnnnnnnnnnnnnnnnnnnnnnnnnnnnnnnnnnnnnnnnnnnnnnnnnnnnnnnnnnnnnnnnnnnnnnnnnnnnnnnnnnnnnnnnnnnnnnnnnnnnnnnnnnnnnnnnnnnnnnnnnnnnnnnnnnnnnnnnnnnnnnnnnnnnnnnnnnnnnnnnnnnnnnnnnnnnnnnnnnnnnnnnnnnnnnnnnnnnnnnnnnnnnnnnnnnnnnnnnnnnnnnnnnnnnnnnnnnnnnnnnnnnnnnnnnnnnnnnnnnnnnnnnnnnnnnnnnnnnnnnnnnnnnnnnnnnnnnnnnnnnnnnnnnnnnnnnnnnnnnnnnnnnnnnnnnnnnnnnnnnnnnnnnnnnnnnnnnnnnnnnnnnnnnnnnnnnnnnnnnnnnnnnnnnnnnnnnnnnnnnnnnnnnnnnnnnnnnnnnnnnnnnnnnnnnnnnnnnnnnnnnnnnnnnnnnnnnnnnnnnnnnnnnnnnnnnnnnnnnnnnnnnnnnnnnnnnnnnnnnnnnnnnnnnnnnnnnnnnnnnnnnnnnnnnnnnnnnnnnnnnnnnnnnnnnnnnnnnnnnnnnnnnnnnnnnnnnnnnnnnnnnnnnnnnnnnnnnnnnnnnnnnnnnnnnnnnnnnnnnnnnnnnnnnnnnnnnnnnnnnnnnnnnnnnnnnnnnnnnnnnnnnnnnnnnnnnnnnnnnnnnnnnnnnnnnnnnnnnnnnnnnnnnnnnnnnnnnnnnnnnnnnnnnnnnnnnnnnnnnnnnnnnnnnnnnnnnnnnnnnnnnnnnnnnnnnnnnnnnnnnnnnnnnnnnnnnnnnnnnnnnnnnnnnnnnnnnnnnnnnnnnnnnnnnnnnnnnnnnnnnnnnnnnnnnnnnnnnnnnnnnnnnnnnnnnnnnnnnnnnnnnnnnnnnnnnnnnnnnnnnnnnnnnnnnnnnnnnnnnnnnnnnnnnnnnnnnnnnnnnnnnnnnnnnnnnnnnnnnnnnnnnnnnnnnnnnnnnnnnnnnnnnnnnnnnnnnnnnnnnnnnnnnnnnnnnnnnnnnnnnnnnnnnnnnnnnnnnnnnnnnnnnnnnnnnnnnnnnnnnnnnnnnnnnnnnnnnnnnnnnnnnnnnnnnnnnnnnnnnnnnnnnnnnnnnnnnnnnnnnnnnnnnnnnnnnnnnnnnnnnnnnnnnnnnnnnnnnnnnnnnnnnnnnnnnnnnnnnnnnnnnnnnnnnnnnnnnnnnnnnnnnnnnnnnnnnnnnnnnnnnnnnnnnnnnnnnnnnnnnnnnnnnnnnnnnnnnnnnnnnnnnnnnnnnnnnnnnnnnnnnnnnnnnnnnnnnnnnnnnnnnnnnnnnnnnnnnnnnnnnnnnnnnnnnnnnnnnnnnnnnnnnnnnnnnnnnnnnnnnnnnnnnnnnnnnnnnnnnnnnnnnnnnnnnnnnnnnnnnnnnnnnnnnnnnnnnnnnnnnnnnnnnnnnnnnnnnnnnnnnnnnnnnnnnnnnnnnnnnnnnnnnnnnnnnnnnnnnnnnnnnnnnnnnnnnnnnnnnnnnnnnnnnnnnnnnnnnnnnnnnnnnnnnnnnnnnnnnnnnnnnnnnnnnnnnnnnnnnnnnnnnnnnnnnnnnnnnnnnnnnnnnnnnnnnnnnnnnnnnnnnnnnnnnnnnnnnnnnnnnnnnnnnnnnnnnnnnnnnnnnnnnnnnnnnnnnnnnnnnnnnnnnnnnnnnnnnnnnnnnnnnnnnnnnnnnnnnnnnnnnnnnnnnnnnnnnnnnnnnnnnnnnnnnnnnnnnnnnnnnnnnnnnnnnnnnnnnnnnnnnnnnnnnnnnnnnnnnnnnnnnnnnnnnnnnnnnnnnnnnnnnnnnnnnnnnnnnnnnnnnnnnnnnnnnnnnnnnnnnnnnnnnnnnnnnnnnnnnnnnnnnnnnnnnnnnnnnnnnnnnnnnnnnnnnnnnnnnnnnnnnnnnnnnnnnnnnnnnnnnnnnnnnnnnnnnnnnnnnnnnnnnnnnnnnnnnnnnnnnnnnnnnnnnnnnnnnnnnnnnnnnnnnnnnnnnnnnnnnnnnnnnnnnnnnnnnnnnnnnnnnnnnnnnnnnnnnnnnnnnnnnnnnnnnnnnnnnnnnnnnnnnnnnnnnnnnnnnnnnnnnnnnnnnnnnnnnnnnnnnnnnnnnnnnnnnnnnnnnnnnnnnnnnnnnnnnnnnnnnnnnnnnnnnnnnnnnnnnnnnnnnnnnnnnnnnnnnnnnnnnnnnnnnnnnnnnnnnnnnnnnnnnnnnnnnnnnnnnnnnnnnnnnnnnnnnnnnnnnnnnnnnnnnnnnnnnnnnnnnnnnnnnnnnnnnnnnnnnnnnnnnnnnnnnnnnnnnnnnnnnnnnnnnnnnnnnnnnnnnnnnnnnnnnnnnnnnnnnnnnnnnnnnnnnnnnnnnnnnnnnnnnnnnnnnnnnnnnnnnnnnnnnnnnnnnnnnnnnnnnnnnnnnnnnnnnnnnnnnnnnnnnnnnnnnnnnnnnnnnnnnnnnnnnnnnnnnnnnnnnnnnnnnnnnnnnnnnnnnnnnnnnnnnnnnnnnnnnnnnnnnnnnnnnnnnnnnnnnnnnnnnnnnnnnnnnnnnnnnnnnnnnnnnnnnnnnnnnnnnnnnnnnnnnnnnnnnnnnnnnnnnnnnnnnnnnnnnnnnnnnnnnnnnnnnnnnnnnnnnnnnnnnnnnnnnnnnnnnnnnnnnnnnnnnnnnnnnnnnnnnnnnnnnnnnnnnnnnnnnnnnnnnnnnnnnnnnnnnnnnnnnnnnnnnnnnnnnnnnnnnnnnnnnnnnnnnnnnnnnnnnnnnnnnnnnnnnnnnnnnnnnnnnnnnnnnnnnnnnnnnnnnnnnnnnnnnnnnnnnnnnnnnnnnnnnnnnnnnnnnnnnnnnnnnnnnnnnnnnnnnnnnnnnnnnnnnnnnnnnnnnnnnnnnnnnnnnnnnnnnnnnnnnnnnnnnnnnnnnnnnnnnnnnnnnnnnnnnnnnnnnnnnnnnnnnnnnnnnnnnnnnnnnnnnnnnnnnnnnnnnnnnnnnnnnnnnnnnnnnnaaccctctgtttctatgatgccctttgaatgatagatagtagcttatgacaaaagatacacatacacacacattctctctcacacacacctacacacacataccacacctaaaaagctacaagtcttttgaaatatacaatagcaaagagaaaatactagcagtgatagtaggttatggtcagaattaacaatattggtgatattttgatgtaaacctaataggtgattgaacatatcattaacatatcaagaagctaaaactgagacaagaatggaatgctttgaatacaggtcaaagagtatataccctgaagtaagctacattccaaactgtagtgttcacaatggaggatcaggattaaaagctaaaactgatgctgaaggtgaatcacagagggaaaaaacatcaaagaacttttagattctgccaaaccgataaagaccagaagtagagagcaactgaatgaatgtgtaaggacgggccaagcaaagtcagcagccatagcagagttcatcagaagcttctacagtgggcccgcacttctacagtgggcccgcacttctacagtgggcctgcagttctacagtgggcccgcacttctacagtgggcccgcagttctacagtgtgcccataattctgcagtgtgaattctgcaaattcatattttggtgagttcacaccagttgtccatagttcagtatacatgtatttatatacatttatgctttggttgtccatgcttcaggatggacatgcttcagtatagtcatacttccatgtgttcttacttaaatgtgttcttagtgtgttcacactttactgtgtccatactgtgtctttgattgtcttcatacctcactgttcacacttcttcaaagtgttcacacctcagtttgttcactttagccttctctcccaccatcattgatggaagtgatccattcacctcacattgctgtcactctgtcatgtacggagcacagcaccacacatcattgcgtcatcacaaaacactgggatgaggagctagaacctgatcaacagaggctgaaacatattacacgatgatctgaagcacacaatgaagacgattaaacactcctgctctctcctcagagggatggatggatggactgggtgtttaggaaagataggacagaaagaaaagcaagcagctctaaggaggactcatccaaggctggagacgccttccatgtttgacttggttttgcttttattggcagatggggtgggggcagaattgattttggtttgtttttgtagctcagtagagaaaagctaagttgataaatttgtctttttttttctagcttgagctagtagccatatggtcaaaggagatgtcttttttaattgattcataataagtgtatttgtggaatacagtgtgaagactgaatacatataaatgggtgtgtagagggagtatttaattgtgtgtgggtctgggttaaatcatgtgagctacctttcaaacctggcattatgtatcaaaggccttaacagaagcccttatacataatctacactttgaacccagaaaaaaacctgcatttggatactgttttctcttcttagtaacaaaatgaatttgggtagacttctccggcctactaattctcattttaaaaactgagatggtatccacttcttatataatagacaacatgaagcctggcacattggaaagattcagtggacactagtccctgtcttcatttcctcctcccccactctgtacactgtgtggcacagccagtggtgaggcgaggttgccctgcaaatgagatggcccactgaaaagtcaggctggagaattctgaagcatatgctgatactgttttctgacactttgccatataaaagctatttgcctattgtttccctttgtaactgaagtcttagaatatggaaagagtaacttttagagctggggtttctctattatacagccccagctgccctgaaactcagagatcatctgcctctacctccacctcccaagtgctggggttaaagatgtttgccacaacccacctggaataagtaacttttaattaaatttacatgggcagggagggggacccagagctttgcacatgctaggccggtggcactgagctctggaaccaagaattaccttgaaccctcatcctcctgtctccacttcctcaggactatacaagagtaatggtacctgtaaatacagatactcctagacttagagtgggttatgtttcagtagattcaccatatttttaaatatgctaaacgaaaatacatttaaaacaatttaccaaacattcaaggtggcaaactttgaatgttctaagaatacttatacaaaattatcaaacataaagcctgttctctattacagtattgattatctcatgccaggtgtgtgtgtgtgtgtgtgtgtgtgtgtgtgtgtgtgtgtgtgtgtgnnnnnnnnnnnnnnnnnnnnnnnnnnnnnnnnnnnnnnnnnnnnnnnnnnnnnnnnnnnnnnnnnnnnnnnnnnnnnnnnnnnnnnnnnnnnnnnnnnnnnnnnnnnnnnnnnnnnnnnnnnnnnnnnnnnnnnnnnnnnnnnnnnnnnnnnnnnnnnnnnnnnnnnnnnnnnnnnnnnnnnnnnnnnnnnnnnnnnnnnnnnnnnnnnnnnnnnnnnnnnnnnnnnnnnnnnnnnnnnnnnnnnnnnnnnnnnnnnnnnnnnnnnnnnnnnnnnnnnnnnnnnnnnnnnnnnnnnnnnnnnnnnnnnnnnnnnnnnnnnnnnnnnnnnnnnnnnnnnnnnnnnnnnnnnnnnnnnnnnnnnnnnnnnnnnnnnnnnnnnnnnnnnnnnnnnnnnnnnnnnnnnnnnnnnnnnnnnnncgcgcgcgcgcgcgcgcgcgtgcactggcacttagcaggcatgcatgtggaaatcagcaggcaggttgtggaaatccgttctctcctcccaccatgtggaccccagattaaaatcaagctgttaagttccatggcaagcagcacctgtccccactgagccatctcaccggccactccagtaattaggttaatattatgctgacagtgcaaggcaggtgactgtgagttctccccatgaacactgacaacacttcgggctgaggactgtaaatcacagagcccagctgcacagctggctccgagttgccgctcacaaccagagcgcactatcaccgaagtgcctgtcagcaggcatggtgcgggtacctgtcatcccagcactcaggaggcagcggtgctaagaggattgtaagttctaggccaggctggaccacttagctaattccaggctagccttgtctacagggagttggggagagagggaaaggtgatggagagaaggagaaggaggctatgtcacatgtcagattcagaattgtacatagtgtactgaaatcttagcacttgcacacctttgtcaagctgaaaaccctaggtcagcctttgtagggatgtctatgtcctaaaaacttctgaacattttaaataaaagaattatgtagcatatgaaatctggttcaataaagctttgaaaaaatagttttgaaatctggccctgatagcatcacattcaaatgtctgaagcaggagtcttcaccgcaagttctcaccagcctggagcatacagtgagtagcaaagccattaaggctacaatgtgaagtcctgtcttgaaaagaaaaaaaaaaaaaaaaaaaagttgcggctgcagggatggctcagtgggtacagcatatgttgctttagcataaggacctgagttgaagcccccaaacctgtgaaagtttgtcatcccagggctcctgctgcagggtagaggcagagacggggaacaactccagaagcttgcaggcctcctacctagcctggcacatgcaggtaaagaaacctatctcaaggtgtaaagcaaggaccagcaccgaggtctcacacatgcgcacgcccatgcatggtcccccacaatatgtgaataaattagtcagtaactgactaacaaaatgataagcggtgtacactagtgtacaagttaagtagtgaacagagcattcagtgtgctaaatgtgttagatacttttctggtactctaatttaaactccatacccaaaagcaacttgaggaagaaagggttgacttcagcttgcaactctcaggtcgcactctatctatcatcaaggaactctgaacaggaatctggtggcaggaactgggtacagagaatggaagaaggtcacttactgcattgctcaccctgcttctttatagagcctatgaatattgtgccctgactttggctccactaataatggactgggcccgctcacagcaatcgctaacttttaaaaacaatgaccagcagggttgtcagatagatacaggcattttcccaactcttcagtaatggatcatatcaataacagaatcatagtgattctagcttgtgtcaagttgaccaataaaagcaaaacaaaacaacccagctagccaaacatgctgcactcttcacttccttttcaaatgtttatgtgtatgggtgcttggcctgcatgtatgtctgggcactacttgctgtctcatgtccatgcaggtcagaagagggagtcaaacctcctgggactggagttacagatcatcatgagccaccatgtgggtgctgggaattgaatctggatcctctagaagaacagctggaaatcttaatcgttgagccatttctccagccccctcttaattgttttgtaattctgtatttattttgtgtggggaagtaggtggataccacaatctctgtgtggaggtcagaggacaagttgtgggtgttggttatctccttccaccttgtgggtctttcaaatcaaagctaggacctcaggtttagcagcaagtgcctttacccactgagccatctttctagaccaatttctactttttatttcctttttgttgcttccttgattgttgataggttccttggttggtgttttggtggtttggtttggtttttggttttgagacagggtctcactacatagctctagctctctggaactcactgtgtagaccagtctagccttgaactcacagagatccacctgcttctgcctctcaggtgcttagattaagagcacgcaccactatggccagctggcccaccttcctgtctttgacattttctaaagcaaaatgctttctttttaaaagaaggcatgatggttcacaggtataatcccagcactggagataatgaagccgaggcagactgattgccacgagtttaaagttagcctgggctacactgtgagtttgagatcctctacggttacgtagaaagaccatgcctcaaaaatccaagtaaatgaaaatgtacaatataagttaaaatatacctttaaatgaaatctattcaaagtgtgttcttgacttaaagccagttgatttctaccctgtataacctaaagccaaagatgtacagaattgtctagcctgttggtcctgacatgtcgttgctcatatataaaagcacttccttgtactccagggcagcacatagtttgtattatacttgtcagagctattttcatcgagaaatgctatctatgtgtccccttgccaacatctttgcagagtttacaactttgagcaatttattggcatcagctatgcaataccattaagcagctgctcggctcggcagttgagctgtgctaacatgccaccactctgtgtggatccttaagagtaagtgaccaagatgtgtgctttaggattcaagagagcagtttctcagagattgggcagtaacagtcaccagcatcagtaatgtcataagcagctcttcagcgttcactctgccattctatagtgctgtgctgcagggggtgctctggggggaaggaggggtctccaaaggtgactcaggctgggcttcaattctcagtcttccttccttagcgtcttcagtggtcaggattgatgccatacgtagcttactagatgggttttttgttttggtttatctttgatttagccttagtttcatttgagtaatcaaatagttcttcatttgttaatgtagtgaatgccccactcattctcctaattataatcattgtgtgtactttacataccagaaaaacaaggttttttttttttattttcagaaatgcctttctaaattaatcatcagccaagaataagctagagttagacagaatgaagggacactcactctttgggaagagttcagccctagagtgagatgtgctagaaagatcatcgtgcccacacaaatggtgatactgattttttttttcaaccatctttttcagatgaaccttgtcctgtcattctggcaaacaacccctaagacccaaaagaaaccatgtaaactttacttcattcataaattagaaatcgaaattagaaactataaggacaagaggaaaagttacagcaccaagcacatcttcacagctgacagacacaacccctccctaatgtggggggtgatgagccactgggacaggaaaaagagtgcaaactactaacattcacttcttcagagagactgtagaaaggaatctttccagaacataagcaatgaacacagctttgtgatggtttccagagatgctaaaaccaagtcatgatgcttggctagcatggtgcacacccatcagatgcctcatagtcttcataaacttgatttatatgacatagaagttatactgtgaaagcacaatactttttcccctgacactgagaaaattaataaagtaaaccagatgaggttatatacaccagtaattccagcatcagggaggcagagacaggaggatcaagagtttcataccagcctggactacacagagactccacatccagtctgggctacataatagaataggacttaaaaagattagaaagatcagggttagggaatgaatatgtgtctattgacacatgagagagaaatgattccacgaaagaataaaattgggctggtgggatgattcagtgggccaaaactcctgctgccaagctctggagtcctgaagcctacacagtagagacagctgactctgacttagtcagagtcatgttatcctctggctgagtgtgtgtgtgtgtgtgtgtgtgtgtgtgtgtgcacgcgcacacagagcaaaaaaagacttaaaagagaggatacaacagccagtcggtggtggtggtttgcacacgcctttaatcccagtacttgggaggcagaggaagggggatctctgagttcaagttccatgacaacaagggctacacagagaaaccctgtcttggggtgggaagggcagaagaaaggaacggaaagagggagggggagagaggggggaggagagagggaaggaggggaggaaaagatagaagataaaacttgccaatatacccaataaaataagtttcagaataacagtaacgagtcagttctaagagtagtcagtagaaaatctgtcccattagctaatgttagtgtgtaaacctagaatcccagccctcagaaaactaaagcaaaagatcctgagcccagtctgggttatgcagaaccttctcatttaccctgaaccacgccataaaccatgttcaaaaagacaaggaaagggctggagagatggcccagtgcttaagagctctaactgctcctccagaggtctcccagcaaccacatggtggctcacaaccatctgtaatgggatctgatgcccccttctggtgtgtctgaagaaagctacagtgtactcacatacataaaataaatctttcttaaaaaactaatatttaaaaaaaaagaaaaaatctcaaaaaacagcataattataaactaggcactgtagaatatgcttttaatctctgtgtttgtgagagagaggcaggagggtcagagaagtttaaaaccagccttatattcacagttgaatttgaggcagggaaacctaggcttatattagaccctgtccaaaacaaaaacaaaaacagctaacaacaagaaggcactgcttagcactttccatctgtgagacaagaaaactgcagaaagtatgaaaagaaaaactttttattaaaaaaaaaatcaagtacaagtagacatttaaagcccggtgtactcaacagagcggaagaatctcgacaagtcagaggccgtgtttgtctacatagcgagttccacatcagcctggctagccctgaggtacttgatacagagtaagacctggtctctaaaaagtgagcctaaataactgccatggctttgagtattgataaagtattagagaaagaatccaggggccagcgagatggctcagcatgtaaaggcacttgctgccaagcctacgaacctaactcattgtcaggacctccacacacaaaccatagccccagtatggcctctagtgtgtgcgtacacacaaataataagtaattaattaatttgttgatttttttagtgcagagtcagagagctgtgagttaaaggtcagcctgttgtacatagcaagttccaggcccaccaaggttatacaatgagccactatttgaaataaacatcatatgttatatgtatatgtgtaagtagtaaaaaaaattatgttgctatatgctaatatgttaaggactcagcatatatgccaaaaatgagagagctgagaaatgtcttgtaagcattattctggtgtgtacagtaacaatgtgatcctaataggaattttaccaaatctggctgcttttaaagtgttctttctggatttcagagaccatgttactactgtttatgctctcagatgaaagtggcactgttatcttagctttccaaattgtgctaatcatagtctaggtgaaacaaagacattaatctcccttctaatcgtctgatcaacatcaaggaaaatctgtttcttgagcctgcttctatatacaccagcaaacgcaaaagagagactgcggtttggactgaccaggaaaatgcccttttccctttcccattgagtagcgcaaaagctcagctgtccgtgaggctgaggctgaggctgtagctcagtcggtaaaaagcctgcctggctacacaaagcactgggtgctgtccataaacacataaccacagaagcaggtggtacacgcctgtagttccagcattcgggggatcaaaagtccaaaatcatcctcgcctacaacgaaaactagaggccagcctgggctatcagagaccttgtcaaaggaaaacaaaaataagaaagtaaaatctgttgcgattgaataagctccacatcaaatcagtgctgcattctttaccataaattaagtaagatggtcttggaagtaagacggttccagagcggccctgatcattgtggttgtgtttgcgctgtcttgtgtgttttggacactgcagagaggagaaaggaaggattccagctcctcccctggccctagagttaggaaggcagcgtggctcaaaccccacagtctgttttaaaatatctgctccagctaggtggttctaaatagaactaatgacagccagaaaagagaggcctgtagggacttgctctgacacagcgctgacgtctgtaaacagatcagtagcagggagcaaggcatccttctattgccctaagttttatgtgttggcatgaaggaaagaattgcctagagcagagcccaccattattctacagctaaatgaggtagctcgccatttctccaggtatttgggtgtgatgtataggttttagtaaacataagcatccactagccaaagactgtctgtgaggaaagtccactctaaattcttcagagttcagcataattaatttttcactcaaaaggcaaactaaaatccaagtgacgtgtgcttaaaatcccaacagtgtagccgggtgtggtggcacacacctttaatcccagcactcaggaggcagaggcaggcggatttctgagtttgagtccagcctggtctacaaagtgagtttcagaacagccagggctacacagagaaaccctgtactcgaaaccgcccccccccccaaaaatcccaacactgtgaagcactgggactgtcttgaggccatcctgggctacaaagtaatgacaatatagcatagcactgtctcaaataagtaaagaaatacatattttggaaaggcaacttggcaggatgaggtgtggcttagtggtgaagtacatggggctggtatgcaccaagacctggactcaatccccaggactggaaaaatgagaaatggcaactccagccacctccatttaccatgtgtaaaagactccaggaaacatacagctaaagaagtgctaaagctgtgttaaactgactgactgaatccgcggtcacagaactcttctgtgttctttctctacctccttcagttccgacttcacaaggtagtagtatgtatggatggcctaagatggaggggaacctcatcaggctaagactacctgccatgtacaaggcctgggttccatttctagcaattaaagaataattaacccatctactcaacaaaaatgagcagaacactgcagtagaacagcaattgtgtcactgtctatacctgtgacacacacccatcatggggtatttgttgaagcttcgtgtttgactctaatatacagaagaactagcaaccactagcagagtacaggtcactctgagttcaagaccagcctggtttacagagtaagttccagaacgcccaggcctgttatacagagaaatcctgtctcaaaacaaacaaaaaagttagttgtaatgctaaaagtaatgtcatatttactattttaggaatcctgagccgggcgtggtggcgcacgcctttaatcccagcactcgggaggcagaggcaggtggatttctgagtttgaggccagcctggtctacagagtgagttccaggacagccagggttacacagagaaaccctgtcttgaaaaaccaaaaaaaaaaaaaaaaaaaagaatcctgtgcgttactgttatacattaatgttttactttcacaactttccttatatatggtataattattcaaatatttcatgcacttaaagtaatgctttaatgtcaatcattattagtctgtctgccaaaatcatacttactgctttcttgttttcatatatcaacaggaatttgcagctatgaagcagatcatcattaatatgtgtagtaaacattctgagaacaacttatttcttacgaaaatggaatcaaaaagtgtgacagaaaatcaagcaaagactttgaatatgccaagagaacatgaagagaatatatttatacccaagccaacgctctttgtaagtacagctaaaaatatttagaattgtaatctctgcttctcactaaatatattttttccttctcaatcatatttgttttaaactaatttggatagtattatgaaaaggtctagcaatgtctatactaatgtattttctaaatgtgtacattagatgagagttggattttatgtttctaattagcatattgaacttgcttagaaattatcctaagtctacatttttcctcctcccacctataggaacaaattacaagggactcagaaaattattctgcctgatttttgcattttgggtatgaactcgatgtggctgtgcctgtgcatgttcactggagtcacgtgagccacatacacatgagaggggttggaagacaacgttggggctcttgttgattgctccaggccctcaagcgtcccggggtttttcagtctccaccttccatctcatgccaagactctgagcttctagacttgtaccactgcatccaactgtagtggatgctaggagtccaaactcaggtcatcgtgtgcgtgtgcgtgtgtgtgtgagtgtgtgagagagacagacagacagacagacagacagacagacaagcactttacccaatgagtggccttcccagagaatcattttaatttgcataacagtaaaaagaatagaaaatagcactgctcctgttgattataaaatgttgtcttctgagtctctcctacagaataagaacagcccatgctaaccagtacgtgcttgccttctcagacacttgggaggcttgcgcaggggaattgtaggttctaaaccagtgactcaactttgatgaagataatttttaaaataaaatttaaaggggttggatagccaaaaaacaaaagggacgctggagagtacacctgtcttcccagatgtggcaggcagaataaggtcactcaggaactcaaggccagccttatccacagagtgaactggaggccagcctgaagtatggagtaaaagccctgacttgaagaaagggatggagacgtgtatagaaagcactttaggaaatattgaaatttatgtgtctcagcaaataatacaaaaagaagtcaaaaggcaacagacagggcaattacttcaagatggttgcccaaggggctggagagatggctcagcaggtaagagcaccaactgctcttccagaggtcctgagttcaaatcccagcaaccacatggtggctcacaaccatctgtaatgagatcagatgccctattctggtgtgtctgaagacagctacagtgtacttacatataataataaataaatctttaaaaaaaaaaaaaaaagaacaccattttaaaaaaggaaaaaaaaaaaaggatagcaagttgatattccagttcagtgagcccttgaactttaaaaagaaaattaagtcctctagatgcttataaaaacgagttgagcacaggagttgtgaccccagccttctccttacacactcagacctggcctctcaagatcagtggtatggaagctattttgtgattatgtaatctaagctccgttttcctcctgtgctagggcctgaatctcctttcaattgtgtgtggtaaggattccactgttgagaaaggtcgcatagataggctttgctggactggcctccagccccatgcctgtctgcctgcagatgctgggcttacagatgcatgctacccccaagctttagcttcccattgacgatgacggagaccttcagtctgcagcagacaaatgagccctactataagggtccatgtcgcagaaatgtgggtcaaggagaacagcaagtcatctgagcactctccttaaggggcagctgggggaggtcagcagccgtggccactgtgcgccaccccccccccaaatccattgagcatgctcatggctccttcctgcctctgacgtcaccatggccctttgtctcaagacaccttctgtacattctttgcacatccactgcgtcagcacacacttgctgtcggggaagaaatcagttctttatctctccagtttggttgtcccagaagctcctaaaacagcgttctttacttagtagggaactaaactctgggaagtgaggcatctgcaacagagtcagcagcgcctgtgcagctagcgacacccatgggagtctctcactcagaaacccgcagctcagctgggcgtggtagctctcacctgtgttctcagcatgcgggaggctgaggcaggagactagccttaagtttgaggccagcatgaattacatagtgagtttcagtccagcctggactatacaatgatagaacctacctgaaaaaaaagaacgacttaatttttatttctaaagttagaaatactactctaggctcttccatatatagtttagtcttaagccctttgaaatagatttctgagtgagcttgggatgagggaataagggacaaatgatcccagacagtctcgtgttctgtccgtataaacccagaccaactggaactccttgaagttgggctctacctgtgaagccttagaaacccgtaattgcgtcctagcctgtagcgttggcaaacagactcattatgtctactgagcacagtcttcccttccttagaagttgtgctggttaaacactaatagagccttaatctccagctctttttctggatgccagcagtaatccagcaggcttactttgtctgcttttatcagtcactcttccttctcattttaacaaactttctcactgtgttagaatccctgagttacagattaatgccttagctggctacatctggatgacacaaaggtttttgtcttatcagttgatcgtctccaaccccccctgggactaatgagttacttctggtagccccagttaatctggtctgtttctacagcagctctctggttgccttacagaatgtggagtagtttacttggggacctgttaacattgtaccaattaaagtatttttattaatttgtactgtttctctataaaattataaatataattagcttaagcaagcacaagtacataataattaaggcaatgttcacagtaataaaagataatcattaagtatgtctcagtaatgctacatacataaataaatggaaattggcttcatctgaaagaacttatgtgagtggtgaatttaaaataaggcctccctgccaggcaatgatggcacacgcctttaatcccagcactcaggcggcaggagtggtggatctcagaaacctctctttgggcagggtccagggattcttcttgcttaaaaggttaattgtgttaataactgaaggaggcatatcaaacttagttgcacatagcaccattgtatgggttgaagggccaaaaactgttaggatggtagaataaaagagattccactgtttatctaaagatggaaaataaagaatagctacttgtatatctgaatcattatgcccaaaaatgttattcatggtctgttcagagttagaaaagtttttagagggtccatcagtgaataatttgcctctgtgagccacacccattctctagtatattgcatttatatttctttatattgtttatttctcttaaaatatctaatttggtatctaacccatatacaaacagaccatgggcacacctgttaacccatggttcatattatactaatcacttcatgctaatcaaaagttggtaatagattagaaacttataatcaactctaatagaattttctagaagttcaagcttcactagtgtactagtaatagcacatcactagctgaactatctggaaatgaagacttcgtcatttcatgagtcagatcaacctatcaaagctaccgttactcacttggcacttgttcacattttggtagtaacaaatgagaataagatgctaggtagataagaaatcatgtgttcaatcctaatgaagtacaaggtagcataaattataattaatatgtgagcaaaggcagacatttcccaatagcagacatgatgatacacacctgtcattgcagcaggggtgcctgatcacaagttcaaggccagcttaggtgatacacacataatcagaagaaaacagttcacccatggaaggccccacatgcacatctttgggtgataactgagattgaatacagtgtaatcccacatttttatgctagcagttgggaggtaagggcaaaaggattttcaaaaattccaggctggccagggagggctacatagggtctaaataaaaatgagtgtcatttcacacaactgaatgtggtacttctgtgcgctcctgattggactgttgcttagaactttacattgtctttctggtaaagaagcatgcttcctggtttagctccagccgtgacctagcccaattgtcctgtatgctctttcatatgacctaggagagacactgtgtagcaacgctcaaacctcgcgcccagactcacgtagaactgagcagtgtctgctgtggcagatccaagccacatcccttcatctcctttgtgctaagtaatagtataggccagtgggttagaaaatccctgtttgcactccagatggagataaactagaagtcaacatacaaaaatagactgaagtttcttcttttcaccataagcattataagggattcactctgatttgaacattgtacagttacatactgagacattacacaggaactccttacatttatgcagcttttatgtgtctcacacaggcggggatggagctccgtggcagagcattaacccagcatacaccaggccctgggtttgcctgaaatccagagcagtggtaaagagctaggcctgatgtgctgaggtcccagcactcagaaggcagaggtaggaggcttgccagttcgaggagtctaggctccatagtgagacccttcctgcaagacacatcgaactaactatacagggtgtaaaagcatgctatattctgtaggaaggacggagggttgagaaggtctagcctcttgcaaaggccatgcttgagcctgcccaagatctgtgggaatgggctctcaccatcctgccctgtgtatagtactgaggaaggcttagtttggtttggcttggtttggtttggtattttggtttttaagatagggtgtcattgtaaatgaggaaaatacctaattaaaaaaaaagatagggtgtcattttatagtcagctttaaactcactgtgaagagcaggctggcctcaaactcttagcagaacccctgcctcagtgctgggatgacagacatgagctaccgtactcaccacatggagggattctgtttccttcttttccagacagggcttctctctgtatagccctgtcctgaatttactctctagaccaggctggcctcgaactcagagatccacctgacatgaagacgtaaagatgtaagccgccaccatccaggccttgggggaatttttaaagggcagtattccaagtaaaaacacctttgctgttaagtatagaagactataaaataaaaaatatatagcaaaacatatgaatgatataacaattcgagtagctatcaggaaataatacattttctaatatgtatgtttctcacccatctccaaggtccaaggatgacgtgacacttgtgtagagcacagcctcgggtctctgtgtcagccaagtgctgaggctgcaggtgcactgccactcccgatgtacctggttggtgctggggaccacacaaggctttgttagtgtcaggcaagcactctacaggcagcccctagccttgagctctccttgatcctcctgcctcagcctcctaatgctggcattgcgcatagtgtccccaaggccatctcaaggtgtttttgtttaaaacttccactttccttttttctctattgtaatacaaaatgtgtgttctgccatcttaaccattttacatgtatagcttagtagtgttaaatatatgcaatcttataagataaatctctggatttttttccatcctgtagaactaaattcttaccatgaaatcccctttccttctcctccagccattggtaaccatcattctactctctgctcacaggaatttatctaatttagagttatctttctgtttattttactcagtgtagtgtcttcaagattcattcatgtatgttatatctctaaaaaaaaatagtttcacctgggtatggtggttcatggttgtaatttcagccctcgggaagcagaaatagagttatctgtttcacagttcaacagaaattcacaatatattgaaggaggagaattgacaggtataggaacagactggatgacagaccgcccccatgaggaaagataggaaatgtgggataatgcgttccagtctgttagaagtggaattttaagaactacagggagctgggagggtgctggaggctggctggtgactagcttgcttttatttttttattttttttttcgcccttttaagactggatctcttgggctggtgagatggctcagtgggtaagagcacccgactgttcttccgaaggtccgaagttcaaatcccagcaaccacatggtggctcacaaccacccgtaatgagatctgatgccctcttctggtgcgtctgaagacagctacagtgtacttacatataataaataaataaataaataaataaataaataaataaataaataaataaataaataaatctttaaaaaaaaaaaaaaaaagactggatctctctttgtagattttgctggcctggaaatctgtgtagatcaccaagcctggaactcctagagatccacctgtctccgcctttcaattgctgggattaaagaaatgcaccactagccctgtctcaaaaaacaaacaaacagaaacaagatatggagaaaatgtatagaaaagatttcaagctgggcatggtggtgcatacctttgatcacagacaggactctggaggcacagtgaatctctgggagttcgaagccagcctggtctctaaagtgagtccaggacagccagggttctctttgacatggagaaaccctgtctcgaaaaacttggggggaaaaaagcttacaagaaataagtttaaaattaagttctttctaatacttagaaatgccaacaatccacagaaagtattttactatgtactctttaaagcttgacttgaatcctaatcagaaaagtttcaaaacaatctgcttcacctttaaaaggttttttaaagaaatattaattggatatccaaaattttaatccaattaatatccaattttaaccagtctcaaaacttggtcttacatagaggcctgctgccaaatactctcactaatatagatcacatttagattaaaagttaacagtagagatatgtgtgttcattaaaccaccctttattgaacatcattttatgacttcccacagcgagtgcacagcttattaagtagatgattcaagtaaccacctgtaatgactgagtcaggcccagggctggggctgggtgtgcggctcagttggtagagcacttgcctctcaggcatgaagccctggaatcagtccttaaaaccaggcctgctggctgctctgtgatcctagaacttaggaaatgagggcatgaggatcagcatctccgaaacagcctcagctacatggctgctcttgttacacttcctttgggaggaaggtacagtccggtgtggcacaggctggccttgaactcactatgtgtccattctggctctcggtcttcctctgctttccaagtgctgggtgcatcacaggtccaacaacataactaatttgagacctgcacaggctatgtgaaactctgtctcaatagcagtaacccttgaagaggcttccatgagcgccaaaagaagtcctgaagttcagagcagggcaggtagagtagggataactttgaactgaggcctgaggcaggatgaccaccagttacagaccagtctcatcttagcagccaactctgtctcaggaaagcagaggggaagggcaaaggggacgatggaggacctagcttgaggtttaagtgatatcatgcatggtgccatttattctcctaacaaccctataaggcatactacaatcaaggacccttaagggggtatgacacagtcggagagaattgctgctcacaagcacatggaaaccaagtgatacaacagacaggaactgtgcaaagctatagccattcccaggactcaaaaggacctaaggaatgatactctttctttctatggaaactctagtgttgaggtcagagactttagctattatcaaactataaccagacaaaaagagaagggaattaaatacccagcttctccctctctgcacctgcaagccctgtctgcttcctattaataaacctagtcagaaactagcagaagagatggctcagcataagaaccaagatcaggtggctcacatgaccctagtgaggtggctcacaaccatctctacctcctacacctctgacctgcacagcacctacactcaagtgcacatatctacacatagacaaacatatacaaaataagtctttttaaatgtgaattgagacttctatctatcaaaacaataaggcaaggcagtggtagcacacacctttaagcccatttgggaggcagaggcaggtggatctctgaatttaagactagcatggttggagctggagagatggctcagagggtaagagcactggctgctcttccagaggtcttgagttcaattcccagcaacaacatggtggtggctcacaacatctgtgatggaacccaatgccctcttctggtgtgtctgaagacagtaatgctgcattcattcacaaaataaataaataaatctaaggctcgcatgctctacagagtaagttccaggacagccaagactatattagagaaaccctgtctttaaacaaaaagcaaaaacaaaaactaaaatcaaaagccgggcagtggtggcacacacctttgatcccagcacttgggaggcagaggcaggtagatttctgagtttgaggccagcctggtctacagagtgagttccaggacagccaggactgcacagagtaaccctgttacaaaccacacatcccccccccccaaaaaaaaaagcaaaacaaaacaaaactagaatcaaattatttaactggtaaattcgaccaaaccttttttttttaagatttatttattttatgtatgtgactatactatagctgtacagatggttgtgagccttcatgtgattgttgggaattgaatttttaggtcaaacccacttgctccagcccaaagatttatttattattataaataaatacactgtagctgtctttagacacaccagaagagggggtcagatctcatttcaggtggttgtgagccaccatgtggttgctgggatttcaactcagaaccttcggaagagcagtcagtgctcttacccactgagccatctcaccagcccctaccaaatgtttaagaatgaaattataacagttctccatcatctctttgaaaacttcgaaacaattcccagtttgggggttgggagtgtaactcacttgatagatttagtaagagtgcttacctagcatgcaggaagccctgggttctacctccacgtaaatcggataagagaaagcaagccccatcttcagcactggggaaatggaggcaggtgtatcagaagttcagggccatttggggcttgctggtataaagcccatcgagatatatgagacccagtcccaacggaagaagtaagggagggagagcattcacagcccactttacaaagccagtcctaataatgctaagcaccagaaacattataagaaaaacatagtccattctctcccatgagcatgtcttatagacactgaaattgttctgtataatactgtaaagacatatctttaaatatttgcccaaaacctaagaatttgtatcagcagtgactctagcatgcactctggccttcagcagcgataacagatgtgccttcactgtggagaaggatgcgggtatggagaagaggcagctcagtgggagagtgcttgccgagtgctcaagaagtcctgggtttgagcattgctcatgtggataatccaaacagttaggagatggaagtaggatcagaagtttaatgccatctttggctagagttcaagaccagcatgtgttgcaattgggaccatatctatgcctgccctttggttctgctgtgtactaaaacctgccctaaacaaagtctaaataacagaaatcagattggaaggactgactcgagttcccagtaatcccagcactcaggaaactgatgcaagatcgtgattttaagatcatccttagaaatatgtgttcaaagccagccctggtgtacctggacagtggctcttcccctgaaataaactgttaactttcctattgagtcaggggaatttatacaggcctgtggtctcctcaccagctcagcctcatctcacccaagctcaataaagatgacctcagtttctctccacttccagagccttccatagaggccctcagcaaagacagtgcaatcaatgacagccctccctgaagctctccccactctcaagttctctctcactcttcctgcctgagtttccctgtattgcctgggcttgaggcaaggagctgggaagccaggggctgggctggcataggtggccatgaattgcctggtgccctgccacctgaaggtgaaagtgtgaaaagaccccacatcaaccaagtaggagctcatttcttacataggactcagcaagccctaacctaaccgtgctgtgtcaatgcgtgctgttgcatgaattaaagagactggggttttgtctagcttacacaagataccccaggtgggtgtgccgtcctctgcatcacctcctccttggaatcacttatttaatatgcttttttttttcttctttttcagactaaaaaggaagcacaagagtggcccaagagtcagaagatgaagacctagtgtttggtgttgaagaaagctggagcctaacccagccaggccctcggctctccattggaacaggcctgtgttatcatgtactcctgaagtgcaatgtctgttggggagaaaggctcacttcaatcatgtacttgatattttcaaatataagtaacttaatgtttattttaactaatgttaaattaacaaattttagtatagtcagcatataaggtacaaatagtcatactttatatgtggttttatgtattttgttataaaataaattactctcatctcctgagtagactgtagagtttttataaatatggctttccctccctccatctgcctgctacaccatttaatctccccttctaagagagatccgagcatcctcactgtgccttccttcttgtttcacctccttggtctgtggagtgtggcatggtacctgcactttatggctaatatcacttgtcagtgagtacataccacgcatgtcctttggggtctgggttacctcgcttggcatgatattcctaagttccaaccatttttctgaaaaattcatgatgtctgtgtttttaatagcagaatagtattccattgtggagatattccacattttgttatcccttcttcagttgagggacatgtaggttgtttctagtctctggctattatgaataaagctgctatgagcataggtgagcatgtgtccttgtggtatggggagcatttattgggtatatgcccaggagtggtacagctgggtctcgaagtagaactattcccagttttctgagaaaatgccacgtgggttcagttctggtgttttgtggggttttctcttttttcttatatctcatattctcattagccagtaaaatctggaagaagtctgcttttccactggtgtttgttcagtttgctgtcaagtcgtaacattgtttgtcatggtgcagtggcaaccacatagctgttcagtgggaaggtaagtaatatgatttgttctgacttctcatacatgttcccctaggtatgggagcatgcctaaaatcccagccccaaaaaatacagatcagtcttacttgggcgctggaagtgtatctcagtgaggcagtgcaaggctctgcaccaaagtctagtgccactgcacaaggatgatggatgttctgcttaggaaatttttaattttgtaactcttccaatttcctgtcagctcagatagcaacataatgtcacattggatacctagaatgttgataaggactaaactagcacatgtcagcaccatttgaggtgtgtgtgtgtgtgtgtgtgtgtgtgacagacacagagacagagacaggcatgcaggcaggcaggcaaggtaactcatagcccaggttggcctcaaacccgaggctgtcctggagtttctctgcccctctttcctctcctgagtgctggattacgagtgtgccccatcacacttgatttatgagtgctggggactgaacacagggtttcttttcattcacgttgggcaagcattctgcaactgagccacaccccagaccatgcaccatttagtggaggacagaggggggccagtattggtaggttggttggtttttttgggaggcttttaaagcagcttgacctaaaatgacttacttcctcttggatagtgccatgacctgtgacctcttaacccttacctcctctcccactggtgaatgttttataaaatattgcctaaatgtaagaagggtccctaccgccgggcagtggtggtgaatgcctttaatcccagcatttcggaggcagaggcaggtggatttctgagtttgaggccagcctggtctactgagtgagttccaggacagccagggctacacagagaaaccctgtctcaaaaaaccaaaaaaaaaaaaaaaaaaagagtccttaccattctgaagatggtcccaccagcgagggcactgtgttctgtagttccggctcctttgagtattaatacttaannnnnnnnnnnnnnnnnnnnccggctcctttgagtattaatacttaattttcacagtatctctaattagacagtggttctcagcctttcttttgctttgttttggtttggtttttggtttttggtttttcgagacagggtttctctgtatagccctggctgtcctggaactcactctgtagaccaggctggccttaaacagagaaatctgcctgcctctgcccctctgccaagtgctgggattaaaggtgtgcaccatcacgcccggcgttctcaacctttctaatgcagaccctttaatgcagttcctcatcacgtggtgaccccagagccatcgaattatttttcctgctgtataactgtaatttagctagtgttgtgaaaggtaatgtagatatctgttttccgaaggtctgaggcgatccctgtgaaaggattggtcaacctctcccctcaaaggggtcacaacccaaaggttgaaaatcactgggttagggggttggttttggggactttgggttgattggctttggtttttgcctctgtgagacaaagtttcctgtgtcccaagctggcctcaaactctatggaatgagaaatggaaatagccgtgaaattctgatgttcctatctctacctccatacttttgggattactagtgctcaccaccaaagcttgtttggtggcagtagggctggaacccaaagctccatgaatgttaccagctgagctctgtctctaccccatcttgagtttttcttctgtgtttagttggtttgctttgaggagcttaataacgatatcgtagtatagattttagcctaagagatttaagagagcaacagagcctggagagttgtcctggcagttaagagcacatgttgctcttgcagaggatccagatgggatttgcagcacccacatggcagctcacagccatcctggcgatccagtgcttccttgggcctctggcatgtggggcagacaagtgagccaaacacgatgagcaaatctgaaaagagaaaacaggactcgcagaaagaacaacactgtcagcagcatggttgtgggctgcagagattgctctgcagttaagagcactaactgctcttccaagggtcctcagttctattcccagcaaccacgtgatggctcacaaccatctctaatgggatctgatgccctctttctggagtgtctgaagacagctacagtgtacatacatacatacatacatacatacatacatacatacatacatacaataaaagagcatgcctgcatgctctctgggagacagtgggcacattagagtaaattaatggcccaagatcaaaaagagttgaggttcagagagatgttcagcagtaaagttgcctgctgcccagtctgagtttggtccctggaacacacacggtcaaagtagggaacctactgatctactgtcctctgaccttcacacgtgtgctgtggcatatacacacactaataaagaaagaaatagatgtaaaaacatagaaggtggaaactagaccagggtctgaactgagtgcaagaatgaccacgctgctccgtgtagtgcagggctccctatgacttccttccaggtctcccactcccgagaaaggccttgttctttgagtcctttttagttgtttgctttttaagatagttttcactttgtaacccaggctggcctccagctagtgattctcctgccttgtgctaggacgatgggcttgaaccatcaggtacagacactgttaaacttgaaatccccctgtctccatccccaaagtgctaggattataagtatgcaccaccaagcccagttaaaaaaccatcttgatcaccctttgggggcttaggaggacagatgggaccatgcgcagtagtgtattaggtcaccaggacagattcctgggtagcaggcagatctagtcctgcagatttgaaagatgggctgtggatgtagcttagttgtgtgcctgcctagcatgcaggcagcattggcttcccagtaccacataagccagtcatggtgcaggtctataatccaagcgcctgggaggtgcggcatgaagatcatgttcaaggtcagcctacactacaattagggagttccagcccactctggggctacactctgagtctgaggccagcctcaccttgtaccaattagggctacccttttctcaaaacactgagaaattactccacaaacctggtatagcagtacatgcctttaatctcagctactagggaagcctagaaatgatagtctttgacctagctagttctagatgtgcctagccaacctagcaagaccctcatctcaaaaaacaaaacaaaacaaaacaaagaacagggatgtctcaaaccctggaaggagttcattcttaataattttctttttcttttttctttttctttttcccagccccgctcactcccttcggccatatttatttcatgtatgtgaacacactgtcactgtcttcagacacaccagaagagggcatcagatcctataacagatggttgtgaaccaccatgtggttgctgggaattgaactcaggacattcagaagagcagtcgatgctcttaaccactgagccatctctccagccccttaatcatttataaaatggtatttaaaaaaaaaaaaaaaaaaaagaaccatcttctagtgaccccaaaatgttctaaattcagtgtttctactagtcaggagtgttttaaattatttgtttatattatatacatggtatttttttatgtctgtgaatcatatatacctagtgtccaaggagagcaaaaagggacagtcaaccctggagtgacagacagcaggaagagagaggccaagtgatcagttctaaaacttgtgttgtctgagaggaaaatactgaagaggtagcaaaattacctgttagggaaaaaaacttgttattagagattcttacaataataataaaaataatgtcaacaggtggtcatcacacatgcctattatccaaggtggatgaatctctgagttcaaggccatcctggtctacagataagttcaaggacagtcagagttacacaagaaacacacaaaggaggaggaggaggaggaggaagaggaggaggaggaagaggaggacgaggatgactgaacaactgaagcaggatgattgcttgaggccagattctcttggcagcatagtgaggccttgtctatttaaagtattttactttcaaggggctaagcatggtggtgatggacccctataatcccagaacattgcaattagagaccagcctgattcacacagtgaattccaggtctccaggccagaggctatacaatgagaccctgtgtcccagaggaaaacaacaaacagaaccaaatcaaaagctgcttgtttctgatgataataatgtgtgttattgtccaacttaggaagctgagacaggcaagacgatgtctcaaaaaaaaaaaaaagtagctataactttctattgatattggatagggtagccatttgtacaaaggaaaaatagcttaatagtactttgttttaatttaatgaataactagagcttccgagaaaggtgtcctgaggcttagaaatcgctggacacttgcagtcaggtagccagcaggagtcctcagggggcagcttttgtttgggttgagtccataggccaatcttcaggtgtaaactcagaaatgccatcctctgtgcaggtgcaacgtcttcgtttgtttcttcctttgatgtaggactggctttagcttcatggccctgcggggcttggaaatccctcttgtctataaggattgccaaactttgcaacaatcctgctccctctgcctctggagtgctgggattgcaaagtacacctcatgcatggtggtttccctctcctctctttccattctgtaattaatatatagtttctgcccggatccaagctgttccttttaacacctgcctatttggcacttctgcttctgtgtccactgccccttaaacttacacaggttcaaaatgaactctccaagtttgtcctttagtgttccccctttcaagaagcaatacaacctacctgtcgctgtgactaatgactaatggtcattcctgatccttccccatacttccctcaccaaaccagaccctcagggcccaagtccgaagcctcattgctctacctcccaaaatgtttttgttgttgttgttaacatttgattattattgttgttgttatttgtttttttcaagacagggtttctctgtatagccctggctgtcctggaactcactttgtagaccaggcgggccctgaactcagaaatctgcctgcctcttcctcccaagtgctgggattaaaggcatgcgccaccactgcccgtctcatttgattatttttattttctatgtgttagtggtttgcctcgatgcaggcatgggtaccacacacatgctctctaatcatagagttcaaaagaaggtgtagcatcccctagaaatggagttagaaaaattgtgacctgcgaaccaaacctcggccccctgcaagagcagtaagtgttcatgactgctaagcaagccattgctccaaccacaatcctgacttctttgtggatttttttaaacaatgaatgaatgaatgaatacttccaaatatataaaagactaaagggatatcttggagagacagaatcactatcttgattatggtgatggttttgtgggtattaagtaatcagtgctcattacatggtacctgtttgatgtggaagccacaggatgaatagggtttggcacaggtaggcaagccctgcacctctgggtcacattcccagcccttaaactatacccccccccttttttttccaacagagtctcacgtaacccaggctggcttagccaaggctagccttgaattccttccatgttcccctcccagttgctggaattacaggcatgtgccaccgtggcttaaattacacctctttagaatgtgcagttaactgttttactcctcaaggatgcctttcaaaaagaggagaaagtcccggaggtgatcacaatcgaaaagtaaaagatctgggtcactatcactaggaatgctaacgcaatgcgataaacggcagcaaggaatttgtgtcacctgacacacaatcagtcttattaccgtcactaaaacagatacaacccgaaatgacgcgcttcttagggtgatataattgaaccagaaagcaatacctttgcaaagtaaaaattttaaattagcccaaatcaaatcttcaggtcagatgtaatgtccaatctttagacagaaaaacaaaaacaaaaacacaaaaaacagaaatgccaagctagttgtaggtagctcagtggtctcctagcatgcacaaagccctgagttctagcccctccgtgcataattcaggcttggcaagactgcctgtttcccagagctctggaggtggaggaaaggggatcgggagtccaaagtcatcgtcagctacataataaattcacagatagcctgggagatatatatatatcacacaaaaaaaagaaagaaaggacgagaggaaaaggaaatggaaagacgaaggaaataaaatccagctaaaggacggacactgcgaggatgcaacttatgaaatcttgaacatggagcattctgagtgttaataacactgctttggagtaggcagaactatggaagaatagggttcgttgttatttagtggagggggagaatcacaagttcctggtgatgtctagttggaaatgaaagccttcagctctggagttttatacacgcatttcattccctccgcgtgaattccgatcaccagctcaggtcaccccggcacacgctcctcgctaaactactccagcagtttctgtcacacgcttactgtgacaaaatacctaaggacctacatttcttagaggaaggaagacttgcttgggcaggcaggttcagttggcaccattgtctttgagcctgcggtagagccaagccctctgctggcggcggtcacgtgacagagcaagctggctcatctggccatggccaggactcagagagcttcagtagggtctgtagcccatcaaggcctccctcagtgatgccgcttgcttctaccagaccccagatcttaaggttccgttatcccctaaagctgcttgctgccccagggtggtcgtcacactttctcacatgctgttgggggacccgagtctcatgatactggagtgctgctactcactgtatgcgtggagcacctaggacttaaaatgtaagccaaaattatccccaagtgttgtctctaggcctatacattcccgaagcctagaagtcctttctctgtttcctgttatactttttgtttgcttgcttgagaactgttctcgcgtagctcctcctggccttgaaaactctatacccaaagtgggccttgaattcccgatcccgcaccttcattgcaagtgctgggattgccaccactgtgtcaccatacctagttttttggggttttgttttttttcttttttgtaagtctgaacaattttcaactaatattttcagggaggagatgggacaggtgttaaaaggaacagcttggatccgtgcagaaactatatattaattacagaatggaaagagaggagagagagggaagcgaccatgcatgcgtgcatataatacattctgaatgtattatatgtaaaaaaaaatcttcagtaaaatatttttatttaatctttgaaaattatatataaacatatatgtatgtaccttaaagataattactcctactccacctcccaggacccttgaagcttcatctcatgtactcacgatgaatattgccccacattgtaagaaatagatttgaaaaatagaaaaaaatacaatttaagtaattatagcctgaaagccagtaggtcatgttttaacaaaaaaacaaaacaaaacaacaacaacaaaaatcaaacctttttagccaggtacagtggggcactcctataatctcagcatttgcgaggcagaggaaaagatcacaagttcaacaccagcctgggcttacatggtgaagactttaaaaaacaaaacaaaacaaaactctgtaactggccagacagatagatgacagttgccctttaccagggctgtttttatcattgctgtaattgatttgatctcatcaagaaattgcatatcggtgacacatttttttaaatggtttactagtgggccaatgaacttttttttttttctgaaacattgcagaaaacatttctccccttccagaccagaagtgcccattgccttaaaggctggtgtaccatccttgtatatgagattgacgatgtcgccttatccttggctacaaagtgagagtctgtctcataaaacaaacaaatgggggtgatgaggaacccactaatatcaagaattttcttttgtttttaaaaacactgcagaccgctcccccaacacacacacacacacacacacacacacactcgctcgcgccctttgaaatacttgcttggcctaactttgctaagtacacttccgctcggactcccttaaagcgctctgtcgtatggactaaacaggtgaaaggcacacacatagccaaagaacttcgcagggaactgagtcttgttttaggccatgctgaccccaaacctgtgatctttcttcctcttttctgagggcagaattagtaggcactgggctactgcactcaacaaaagaattctatacactcacccctatacttgaggttgaagccaggctccagagcacgcaagataagagttctatctttgggctatagcacaccgcaccccctctttgaattgaaaaagaacattagaaatttgttggcaaaaccagaacatgggcttatcagtagcggaacagttgcctagcctagcacgtaggagtcctgacttgccattctctgcccctcgggctccaccagaagaaggcaaagtgaaccctgagccttgccattgttacagaaatacagcagtacacctcagtccacacagtttcattcaagttgaaactaaagacaggacagtaaagagctccaaaaatattcatatttataaaacccttttcacgtgtttcttttaatttttgagggagaggacaaggccccatgtaaccgggattgtaccaaactctacaaagccaaggatgaccttgaacaacggattccctagcgtctacttcccaaactagagattacaagtttgccaaacccactggcatccttgactctgcagtctaggctcagtctcctaggggctagaattactagtgtgtgcagtcacacattttttttttccaaacaaattttcacacattctttgggggcagagtatgaggggaaagaaatcatattatggataaaatatgtctagctctccaagataacaggggcatttttcagctcaaatatggctgggtgacaatggttgtgatatctcctttgtgtgcgttcc

SEQ ID NO: 532 - DNA, 3023 bp, Mus musculus
cgtccctgtctgccacgccccctcgtcaccacgcggccccgcgtccacgcacctggtgcagcagcacattggtgtccggcagaaggtagtgcggccacgggcagaggctgctcgcctggtcccggggctgcagctccagggccgggcccgcgtgcgccccgccgcaggccgagcaagccggcgcgccgcagccgatgtcatcccgcagaagattgattcaaataataaaatgtctcgcaaaattgccaaggaaccaaaaaaagtaaatatctctagttctctggagtctgaagatattagtttggaaacaaccattcatacagatgatgtctcatcatcagaggagcgagaaggtaaagtcaaaatcaccaggcagttaatcgaaagaaaagagatacttcataatattcagttactgaaaatcgagctatcccagaaaaacatgatgatcgacaacttgaaaatggattatcttacaaagattgaggagctagaggaaaaacttaatgacgcccttcaccagaagcagctgctaactttgcgattagacaatcagttgactattcaacagaaagatgccaaaaaatatcaagaactaatgaaacaagaaatggaaaccattttattgcgacagaagcaactggaagaaacaaaccatcagctgagagaaaaggctggagatgttcgccgaaatctgcgagactttgagctgacagaagagcagtatgtgaagctaaaatcttttcctgaagatcaactctctattcctgaatatgtatctattcgcttctatgagctcgtgaacccattaagaaaggaagtctgtgagctacaggtgaagaagagtgaactctctgaagaactgagtacaagtaaaggccaactgaagcagctgacggagacatatgaagaagatcgaagaaacaacgctgaacttctaattcgatgtcaacgtttgaccttagaattagcagacacaaaacagttagttcagcaaggtgattaccgtcaagagaactatgacaaagtgaagagtgaacgcgatgctctggaacaggacgtactcgagcttagaagaaaacacgaagtacttgaagcctctcacatagctcaagctaaggaaaggaatgaattatcaaaggaggtcagcagcctgcagcagacagtcaccctgctgcagaaggataaagactacctcaatcgccaaaacatggaactcagtgtacgctgtgcccatgaggaggatcggctggaaaggctgcaagttcaactggaagacaccaaaaaggctagagaagagatgtatgagaaatatgtcacagaccattataaaacagaatatgaaaataaactacatgatgaactggaacaaatcaaattgaaaactaatctagaaattgatcagcttcgaagtgcctctagggaaatgtatgaacgagaaaacagaaatctccgtgaagcaagggataatgcactcgctgaaaagaaccgagcagtggcagcggaaaaggacgctctgggaaagcatgagcagctcctagacaggtacagagaactccagctcagtacagagagcaaggtatctgagtttctccatcagagcaagttgaagtcctttgaaagtgagcgtgttcaactcctgcaagaggaaactgcaagaaatctcacgcagtgccagttggagtgtgaaaaatatcagaagaaattggaggttttaactaaagaattttatagtctccaaacttcttctgaaaaacgcattaccgaactcgaggcacagaactcagagcatcaggcaaggttagacatttacgagaagttggaaaaggagcttgatgagataataatgcaaacagcagaaattgaaaatgaagatgaggctgaaagaattctttattcctatggttatggtgctaatgttcccacaacagctaaaagacgactaaagcaaagtgtccacttggcaagaagagttcttcagttagaaaaacaaaattcattaattttaaaagatctggaccatcaaaagaaccaagtaagacagctttcacaagagcttgacagagccaattcactgttgaatcagactcagcagccctacagatacctcatagagtctgtgcgacagagagatgccaagattgactcactgatgaagtctacagctcaacttgagaaagatgtcagcaacttaaataaagagaagtcagccctgctgcagacgaagaaccagatggcactggatctggagcagctcctcagtcaccgcgaggaatttgcagctatgaagcagatcatcattaatatgtgtagtaaacattctgagaacaacttatttcttacgaaaatggaatcaaaaagtgtgacagaaaatcaagcaaagactttgaatatgccaagagaacatgaagagaatatatttatacccaagccaacgctctttactaaaaaggaagcacaagagtggcccaagagtcagaagatgaagacctagtgtttggtgttgaagaaagctggagcctaacccagccaggccctcggctctccattggaacaggcctgtgttatcatgtactcctgaagtgcaatgtctgttggggagaaaggctcacttcaatcatgtacttgatattttcaaatataagtaacttaatgtttattttaactaatgttaaattaacaaattttagtatagtcagcatataaggtacaaatagtcatactttatatgtggttttatgtattttgttataaaataaattactctcatctcctgagtagactgtagagtttttataaatatggctttccctccctccatctgcctgctacaccatttaatctccccttctaagagagatccgagcatcctcactgtgccttccttcttgtttcacctccttggtctgtggagtgtggcatggtacctgcactttatggctaatatcacttgtcagtgagtacataccacgcatgtcctttggggtctgggttacctcgcttggcatgatattcctaagttc

SEQ ID NO: 533 - protein, 820 aa, Mus musculus
VPVCHAPSSPRGPASTHLVQQHIGVRQKVVRPRAEAARLVPGLQLQGRARVRPAAGRASRRAAADVIPQKIDSNNKMSRKIAKEPKKVNISSSLESEDISLETTIHTDDVSSSEEREGKVKITRQLIERKEILHNIQLLKIELSQKNMMIDNLKMDYLTKIEELEEKLNDALHQKQLLTLRLDNQLTIQQKDAKKYQELMKQEMILLRQKQLEETNHQLREKAGDVRRNLRDFELTEEQYVKLKSFPEDQLSIPEYVSIRFYELVNPLRKEVCELQVKKSELSEELSTSKGQLKQLTETYEEDRRNNAELLIRCQRLTLELADTKQLVQQGDYRQENYDKVKSDALEQDVLELRRKHEVLEASHIAQAKERNELSKEVSSLQQTVTLLQKDKDYLNRQNMELSVRCAHEEDRLERLQVQLEDTKKAREEMYEKYVTDHYKTEYENKLHDELEQIKLKTNLEIDQLRSASREMYERENRNLREARDNAEKNRAVAAEKDALGKHEQLLDRYRELQLSTESKVSEFLHQSKLKSFESVQLLQEETARNLTQCQLECEKYQKKLEVLTKEFYSLQTSSEKRITELEAQNSEHQARLDIYEKLEKELDEIIMQTAEIENEDEAERIKYGYGANVPTTAKRRLKQSVHLARRVLQLEKQNSLILKDLDHQKNQVRQLSQELDRANSLLNQTQQPYRYLIESVRQRDAKIDSLMKSTAQLEKDVSNLNKEKSALLQTKNQMALDLEQLLSHREEFAAMKQIIINMCSKHSENNLFLTKMESKSVTENQAKTLNMPREHEENIFIPKPTLFTKKEAQEWPKSQKMKT

SEQ ID NO: 534 - DNA, 254396 bp, Homo sapiens
gttcaaaagaaaatgaactcagaacagaactatatttaggtaagaacactattacatatgaatacctccaaatttccattttcgagttctcgacaatgtagagcatcgtctatatcagtacatcctggtgggtctacactacaaatacacagatgcctcaggtcttctcggtttttcatgtcctagaagacatgaaatgataaacaaataaattatttccaaagcacaactacaacatattaatagctcttgtgaaatcagtaatatgtatacaaaaacaatttagctgtattttcttgatgacaaccacatttctttttcctgcactggagcagagagacaccacgtatgatttgtaactaatggtttccttccctttgaaacatttaacatatgaaagtgtctgccacatagaaaaacttacccttcaatgaagaagcaaatgacttcttctataattcctaagaatgctatacccaacaaaatgcaggaaaagagggcccgtggtgtctacatatttaaaaacacatatagaaattaaacaaaactaggcaggatataataatttataaagtcactacaaattactttcaacttaccttttcagtaatgctccagggcatctttggcagaaaactaagaacagcctgtgaaaaaggctgatggggaacatcgtgttcaagtaacaaaacttctgtttcagtctctttctctccaacatcacctaaatttctcacaaagtgtccctgaaaccaagaggcattattagaaacgcctattttatagcaaatttacatcttatcatattaaattcttcagcatttacatatcttctcagtattcctaaatattcccataacgatttctgaaaaatgaccctttagtaaattagacaagacttctcaactgatttatgatggaaactttgtaagggtccagctcttacattctaaagcatctatttcttattaatgttcaagtttaaaatgtgcttccaatataatcttttcaaaatttgttgattagaatctatatagaactcacttttcatagtcatgatcaataaaacttataggtttaaaaacttacataaaagaggccaggcacattggctcatgcctgtaatctcagcattttgggaggctgaggtgggtggatcacttgaggccagttcaagaccagcctggccaacacagcgaaaccctatgtctactaaaaattagctgggcacggtagtgcacgcctgtagtcccagctaatcgggaggctgagacacaagaatcgcttgaacctgggaggctgagggtgcagtgggccgaaatcacagaactgcactccagccggggcaacagggtgagactctctctcaaaaagaagaaatttacataaaagtaaccaaatgatttacactggaatttcataaaattaattttcaaagtagacatgctacttaccaggtcactttgtgaaatatctctaaatttcagtacaaattctacataaaagtagattgtttttattaaaagcagaaatactattcacaaaattttaattaaacatccccacataaaattaatactttaagcttacatttggatatctggaatttctgggccaaccatcaatagcaacaataattctccgtccttctaatgtggaagcctgtctggtttctatgcgaattcgagggattctcttatcagcaggtgtaaagagatgtcttcttgactagcaaaaattaggaataaagattttacacaaaaaaaatctgaggatggaggcaaaagaaaggctataagttctattaaatgtttatcatttttttattacatagtaaatgctctttactcacctccttaatgtcagacttggaaagcatgccacaatatggtctccaattcctttttattattcctacaactctacctgtaggcttcaacattttctcgcttacagcagtcttaagctgagatataaaaattaaaatgttcagttatattcctctaagtattatcaggcaatttcctttcaaaatcaaaatgcatacatggatactaatccattcaggcagtaaattatgacataagactacagaatgttgatgtttcaacattctagacaagaacatgcatgccaaaccaaaccacagacattctctcttgataataaagtactacaaaacaatcaaaaagcaaaaacaaataaataaatataactgaatacgtatgttagaactcaacacttttcaggattaacatgaggatttactgactaaaatacacacacaggtctgggaattagattagggttttagtactagtttgtacaaattagctatgtggtatggtgactagttccctttggacctttatttattaattctaaaggttcttccttataaaaaataaaaacccaaataaagagggtctgctattagaaattacaaaagttcctatggtatttcacctcttaacactatccaaaggcctggactctccatggataattttatagtgagactccagagcaatgaatataaatgatggaaaaagaagaataaaaaactgttacatgcattccaactatttataatattgtaattataaaatacagaaataggccatatcaagtagacttagcgcatatcataagaaataactgaaagtattctcttcataataaatatggtatcagataagttgcccaaatataatggcccagaattacgtctattatgttaagggaattttacctaaagcattttctaaaacatttcctaaaacattacttaaagcatttcagaaaatgttaaacacatatttacttaaatctcactaagtctaataatatacttgactgtcacagattttcagtttcatacttgtattaactcatactaacagtctgtttgcatttaaacccatttatttgagcaaattaagacaataaaagaaaactacatagaagagaaaaaaaccatgtgtatgacatgcgttaaatatacagaactatgattttatgcaataaatctgaaagcaatgaaacttgttttccaaagctgacatattaataatacaaagctacacagacaaaaaaaaatcctgcttagattcataccattcgttctgtctcttcttctttctccacatcttcttcattttgaccttcatcatgtaaaaccacagaagatggtgctacccactgactcttggggagaagctccacagccacaatatcttcgtgaacagctctgtttaaatgtttaagtccctgtaagattatctgtttaaaacaacagagggcacgtgcccaaattatttttaatggcaatataataaagggaagatcatctaacagatatttacatacactctgaatatctctatggaatctctatttctcctttatagattttctttctctattgtgtccctaattccacaactttaatttctcaataccaggtagaaaaaatgtaagtcagaaaacacaggctgtgttcatggctccatcataacttacactggtaacaagagactttggaaaaattatttatgctctctaaatctcaagtcctgattggtcaaataagagtacactacctagtttttataggttgggttgaatattaaatgaaatgccatgcgcaaagatttaaaaaactacctgacaaattgtgagcactgcaaaaaaaaaaagaaaaaagttactatttgctttaaagtatgtgaagcctcatatgttacacaaatagtatttaccattaagtgttcataatatataaaatatcatctttattttagtgtataaggaatttatttatatacttgcctctttattttcttcactgtcgccatgaatccatactgtagcttccaagtaattttccctgctagctctaaatgttccttgaaggtatgtaccagattttatgccttgctgtagcttacttaagggaagatgctctgaaaatattatttttccactttctatttcattctatgaaagaagcaaaccaaaagatgccgctaataagtcttctgttcactcaatacacaactattattaatatcagagaatttttgaaatctacattatgatatacacaactctgaataggagagaagatagcagtgtttcttataggccagtgctaacaaaaacagctttctatgatgaaggaagtattcattttgcgatctctaatatggtagccactagacacaagtttctcttgggcacttgaaagacagatagtaccaccaagaaactgaatttttaatacatattaaatttaaatagtcatatataactaagtggctacatattagggcaatactaaatctgtatttcaaaaatcaaacccaacttttatcttctcatttccttttggtttcataaagtatcataaaggtaagaagggatgacagaagtgtaaagactggatttatgtataatgtcctatcacttaaaacctatttctataacaagggctaccatttatatttaccatacctatgtgccaggcactaggatgaaaattgtattaatgctacagttatcatcttatttgatccttataacaacactatgaagttattattgctaaacattatatatttatatataagaaaatgaatgctcagaatttaattattcccttagcactccttctcacatcagctattgtaatgactcctttactcacctctctgcctctaatctttcctggataaaatgcttaatgttacacactgacatgagagtggtcttacaaacaaataccatttccaatcattctctcctgctccaccaatccacattcatataccattactttttcttagcctgacatataaggaagggatctcagaatcctttcctcttcatagcagcccttcagggagatctttataaatcaattgaaaaattactaacctacagaataagttctaggtctttactatctggacactcccctccctcttctttcctctgtctgcagtgcctgccacttcatttgtcagcagctactctttattcacaaatcagccatggactccgttcattttttcctcaaccaaacagtgctaccaggtaccaggccctactcaggttaatgggaatatatctattttagaaagttaactcctttaggaatggcatttcaataagcctatgacatccactcctgtttataacacaactattccaaatccagcttacccaccgacattccaatttttaaatttggtaactatatgcctaatattccaaagtggctattttaatatttttacttttcaaaaacaaaacaaaaacataccccttcttcagacaaacaagcaagacgatctatgagttcggggttagcagttaggctctttacatattcttcacctgaaaaaataagtttatgttgtttttgataagtgttttttccttagatatgaaaaaaatggatagtcttgtttgcgacagtatacacgtcattctttcattcattgagacacactgagagtctcactctgtctctcaggctggagtgcagcggcgcaattacacatcactacagcctagaatccctgggctcaagctaccttcctgccttagcctcccgagtagctgggactatagttacatactaccatgcacggctttttttttttttcctgtagagctatagtctccctatgttgcccaggctggtcctgaactcctggtctcaagcaagcctcttgccctgacctcccaaagtgctgggattacagcacctggcctcaatttatttaaaaaacaaaacccaaaaatctgttgatgtgatcatacctaagcagaagcaggggttccagtatatttatgagatttcattgctaaaccagttgcaaatagtgaggggaaaattaacagccactgggcacaacatatttaggttaaaaactatgtgaaatttaaaaatacaaaaatatcacatgaagttatataggactacgaaaatactaaatagtaaagtgaacatctgactataggcctaatgattatttttacacgcatttgcaaacatgcactaagtacttctacatttagacttacaagtgaaagctggtattccttcttctatggctttctctttgtttctcctgtcatttgttatgaagataacttgcagctggttgtctgctgacatttttttcaaatgttcattgtaccattttgctgctactcgaatcgctctatcattcctgtcattagcattttctccctgttcttgttctacataggtttctctaaatggaaagaaaaaacgaaataaaaggaaatcagtagaaacaaggatatgtgaaaactcttagcacataaatgcttaaccactaaactagaaaaagtcaatggtatatcttttctcttgaatgtattcagatgtacacctcagagaagaaatcaagattcttataattaagtttttaagaaacaatttgcttggaaaagaagaaaattatgttattaaggggacaagaaaaaggctaatacaattttatttcctaaaaagaaaaattcaagatcagaatttatactttaggttgagacactaaataatagtttgttgacaaattataatacaatttcacaggtatgataatcagatttcattcaaactgtaggttaatagcaattcctaaaagctacaaatagtataattagatcatttataatcagaattctacagtcattaataaataatgcatataaattatccatggtaaacactaatagctgaagctatgtagagactgaaaagtcaggtatattaatagatattacgtatttcttctatctaaactcccaagtatgtcaacacattcatctatttctttaaatctgttcatcaaagccaggtttaagtacaacagcaaagttcactacaatagcttccagtacttaatggtaatagattcaatttaataatttgatttatattaatagttttagaattattttattcctcatcgttgaatgcacttgctaatgctttttttttttttttgaaacagagtcttgctctgtagctcaggctggagtgcagtggcatgatctcagcttactgcaacctctacctccgggttcaagtgatcctcccaactcagcctcgcaagtagctgggactagaggcatgtaccaccataaccagctaatttttgtatttttaagagacagggattttccaggttggctaagctggtctggaactcctggcctcaagtgatctgcccacctcaacctcccaaagtgccaggattacagacataagccaccacgcccagctgctaatgttttaagctcatcagtgaaagacacagtcataaatttttgaattggttttaaacttgggtctttctgcactgaaaaacaagtgatgttgctatttctggatttcaaggaggtactaacaataagaagcctacaagggctttactggtattctttacaagaacattgaagtttgagatataagaatcaagaaagttgagatattaaggtttttaaaaatgtgcataatctgatggaatttcattaccagaagtctacactctaatccaatggttctcaattgagtgaattcacccctcagggcattttgtatcattacaactgagtggtggtggtggtggtggtggtggggggggtaaggggtggtgatcctgccaaataggctaggaacactgttaaacatactacaatgtataaaacagcctttccaccacaaaaaaattattcagttcaaaatatctataatgccaagattgagaagccctgatctaatccaataaaagtaccatactcatcatagattatttatgtaatataacgtaataggcaatatcatatttttgagaccacacactgagttcaaaggtcttgaatctaaaagcacaacaaagaattatattcctggccaggcacggtagctcatgcctgtaatcccaccactttgagaggctgaggcaggtggatcacgaggtcaggaattcgagaccagcctgaccaacatggtgaaaccctgtctctactaaaaatacaaaaattagcctggcatagtggtgcgtgactgtaatcccagctactcaggaggctgaggcagaagaatcgcttgaacttgggaggtggaggttgcagtgagcagagatcacaccactgcactccagcctgggtgacagagtgagactccatctcaaaaaaaaaaaaaaaaaaaaaaaaagaattctattccttaacctaatcttgctcaatgtaatcagctgcaaagtattaaacttttaaaaagaccattaagaataaatctactttctatttttaaacaaaatagaaacttcacaaactcatatattttattaccctctgttagttgttcacataatatggtattccaggaacttaagcaaatctcatcttccaagattctatggtccaactcatgctaaaaccaattcaaaatgaaaacattttggaaattaaagtacctattgtagtctaggagtcagcagaccttggttttaggcttgagcccatcaatgcctgtgtgaccttagagagatccacttagcattatcttctgcacagccatgtaagaattaaataaggtatgaaatctatcacttatcttctgacaatgtcataaattactcacaggaaccctctcccgaattttgctaatcctgtggttttctgatatttaacgtaatattcctcctacctatggtgctcattagtgaaagtatagaaatgcttctcttggttattagtcacatctcggatgcgtttatatacgggggcactgcgatttctcacttcttgaagaactgtttgtagcacaattacattcctgatggcagggtcctcaagaacatcaatcttaaagaaagataaagttaatttttcctatattcatttgtaaatagctctgtcaaacataaaatcctgttttatgttgggcataaatactttatgttttaaaaacactgaataagttaagccaagaagctatttggctatagaaaacgagacaatagtcactaaacccttcagatctattaaaaaaagcacacttaaacagaccaatcacaagacttcgtagaattaagggtattaataaaggaatacgttggcccacatagttttttgttcctaggcacttacaagctgcctgggagtcgcaggctggaggccacagaagcccaggtccccggcctccaggcacttacaatctaaggcagaagagacaccaggagttagaaaaataacgtgtctgaactacgactccaagaactaaattttttaaagcacaaggaaaagaacctcggcctggggaacaggaagcttcggtcccgagggggtttccctttcgctaggtatgtgacactgccaaagacccgcctccctgggcctcagtttccctgtcatacccccttgtccccgtggggccgcgctgtccgcggttcgcccgcccacgcacctggtgcagtaacacattagtgtcgggcagcaagtagtgcggttgcgggcagacgctgctcgccgggtcctggggctgcggctccagggccggcccctcgtgcgcccctccacacgctgcgcacccgggcgcaccgcagccgatgtcgtctcgcaggtagtgctcgcgcacgatcttcatcacgccgcccgcccgggtcttttttaagaacgtcttggacttgagcatcttgcctcgccgcgcagaatcctaaccccagcagcgctcttccagcaaaaggcgtcaatctagaatacgcctaaccccggaggttcttccctttccattcccggatattagtaacacttctcgcgggaaaatgccgagataaacattggttggctctctgacggccgcggggattgggcgagagtggggaggggcggcaaagcaaggcgaggagccatttccgcccgtggcctaggcggggcttccttctggacgccacctcacaacgtgtgttgctttccgctcctcggaacatccgggagagttgacttccggcggcttgtgggagtgctggttctgtcctccttgcgggtgcggagatggttgtcttggttacgggtcctaacggtcccctgccttgaaatcccttgttgagggcctgcaaccttgtgcttccgaccggagacgcctttggtccctcggtgtctgcactggctgctggtcaaggcttcagtgtggagtaattgacactttcgaggtaacttgcgactatcatcgctttctttcccgcgtggggcaaggaatcccccgagctgccaagtttggggcttaattttcacgccgagtgtataggcagtccccgtctcgggccctttgtaatcgaggagagaatttgtctttgaattcactttttcttacctatttcccttcaaaaagaaggagggaggccgatcttagtatagttctcgctgtttcccctccacacacctttccttatcattcagtttagaaaaactgaaatatttaatagcataatttgttatatcatgaggtattaaaacaaggtagttgctaacattcttatgagagagttagaagtaagttctatttagaatttcttgaatttttcttatatcctgttgttttcattctgctatctataaaaaatgtttttgtccccgttttccctatttaaaacatcttcaatgatgcctcattgcctgtagaataaaatccaaccctattttgacatttaaggccttccagtcttgatcgttaagggcgtgtgtgtgtgtgtgtgtgtgtgtgtgtgtgtttgtgtttgtgttgggggggcggtgaaaggagtaactattccaagacttggctttgtttttttacttccacttacgtatcattaataactgcatgatttctcctttttaccatgcctgtccaaatctttaaagattctaagtgctacctctgtgtaacgtttccctgaccaactcagacgtgatttctgttatctttgagcatgtgttggttttagtggtgccattcttgattataatgggcttttttcttcatcttgtacatttctttgtttcctccaagtaagattcctccccgcaggaactgtttttttaagtttctcgaaggctgacttcatattaggaattaatgtgtttgatttgagcattaacttaactgcaataatctgttctagatttgggatgcagtaaattgcctaatatttatttaaggaatccttagtctctctttaatacagtccatgatttctgtagttaattttatagtacatttgaattaatgttttttaacctacagaatattaaaatcaaattagagaagaaaactgatccataataataaaaatgtctcgaaaaatttcaaaggagtcaaaaaaagtgaacatctctagttctctggaatctgaagatattagtttagaaacaacagttcctacggatgatatttcctcatcagaagagcgagagggcaaagtcagaatcaccaggcagctaattgaacgaaaagaactacttcataatattcagttactaaaaattgagctatcccagaaaactatgatgatcgacaatttgaaagtggattatcttacaaaggtaagatcaggtttaaattttgtgttctatatgctttattgtcttcaaacggcaggtaaataagaattaaatacacacattatctgaacttgaaatgatacatttatatttcttgacaagtacagcctttaaataattttggtgttcatagaagtagagaatagaatggtggttaccaagggctggcatggttaggggtgaaggagggttggggagatgttggtcaaaggatacataattacagttgaataggaggaatacattcaagagatctattggacagcatggtggctatagttaatgacattgtaatcttggaaaacattgtgtttttgaaaaacacagcagatgttaagtgttctcattactaaaataactatgtgaggtaaaacattttttaattagctagagttaaccatttcacaatgtacgtatacttcaaaacattatgttgtacatgacatatacacacagttttatctgtcagttgggatcacctgaggtcaggagtttgagaccaacctggccaacattgtgaaaccccagctctacttaaaaaaaaaaaaaaaaaaaaaattagccagccatgatggtgggtgcctgtaatcccagctgctcgggaggctgaggcaggagaattgcttgaacccaggaggcagagtttgcagtgagccacaatcgtgccactgcactccagcctgggcaacacagcaagactctcaaaaactagtaataataataataataataattggaggccaagtgcggtggctcacacctgtaattccagcactttggatgctgaggccagtggattgctccaagctcaggagttcgagactaccctgagcaacatggtgagaccacccttgctactaaaaaaataaaatagccccgcgtagtggtgctgcgcctgcaggcccagctacttccgaggctgaggcgggagaatcacttgaatccgggggcagacattgcagtgagctgagatcgtaccactgcactccagcctgggtaacagagtgagaccctatctcaaaaaaataataataataatttaagtattgaaatatggagtgatttaaacgtagatatggataaattacttttgtaggctcaatttaaaaaatctaacatatgaggtattttgttgttttttgttgttgttgttggagacagtcttgctctgtcacccaggctggagttcagtggcacaatcttggctcactgcaacctccacctcttgggttcaagcaattctcctgcctcagtctcccacgtagctgggattacaagtgctccccaccatgcccagctagctctctgggatcacttttataagggcaccaatcccaacagtgagggttctacccttataacctaatcaccccaaaggccccaacttcctgctactcacattggtgattaggtttcaatatacaaattttgaggggagaaaaaaaaataagcacacaagacgtattagccgttgttgttttcaactaacatagcatccttatctgtttcatccctttcattttctgtgccttttatggccatcggactgaatttgtttgttatttgtctgtgaatagactatgaggtccatgaggacggggatgtttttgtattcatggttgtatttccagcacttagaacggtgcctgacacaaattaagtgcccagctatttcttaaatgaatgactgaaccccattttgctctgattaaacaaagccactaggtggttaatagcatacccaaggccattcagatgaaagtgatagagccagataggattcaaacctaggaagtctaaagcctatactctacaaaagtgaagctccaaacactttcttttaggtaccctatacagtcacctacctagtctaggtcacttggtagtttatccatgcatccagtggtttcccatccctattcccttactctttttgcatttcacatgaactccatctaccttcacctctccagaccttagtgcaactcattgaagaaacctgaggttatctcccattcattaattcacccactcagtcaacaagtatttttttaagtgccacctgtataccatatccagacttacattttgttcagccacctcttgtattatttgttttcaacttgcattgtccttggttgtcaatggctttgcttctttttaggtgtaagctttatattatagaaatgttggttgattcatgacaggctctctagtgtaacaaatccaaattacagttctagatgcacacagtttgggttttgaattccagccttactaaattccttaatgtttttattccgtgatttcctataaaatgataatagtatttattccgtggaattatcgggaggattaatcaatgtatgtaagctcatagatgcttggtgtatactaataataaacttattatttacatattattttatttgtagctatacttactcagcacaatattattatttttctacttccatggtgcttagtgtagtttttgttgtggttttctagtttgactgaaaatgtagaagattgcaatagtcgtgttcctgagtttgacacataatcatcattgatccctgaaaggctgctgtttttctaatgtatttattcttttcattcctatagctcattccatttcttaatgcaaacattttaatgttttgtttacatgtattcttgagaatgtgtatcttttaactttacagaaatgtaaattatatgctttgttttagttctcatctcttttttcctactcagcactgtttttgaagttatctattactttgtatacatctagtcctttgcttccaactcttatataattctttgtgtgcgtctaccagtctttctactcctacattgctaggcatccagattgcctccagctccttgcaacacatgcagcattagacatttctcttctggacctctgtgagcatgtctttgacatatataaatgtctccttcatttaactaagtgtactgccaggttatctccaaaatagctgccctgctgtatattagtagagtttttttctctatcatacgagcactcaggattctctgcttgaagactctttaggaataagatgtttgctctcaaatatatgaagaaatacctattgtagagttagccttccataatttattgaacctaaagcacctctgttgtaagatgcatcattacatacattgctaaggttaaacacttccagttgaattgttaagtgccttagattgtaaaatgcattccaattttagagatgttaaaatgtgagaaagtgtgagtctggagttgatgaaagaatatttaaaaaatatttttattaaagaatatgtatatgtatgttaatgtgtgtatgtgtgtatatatatgtttacttcttacatgccctgggaataacaccttagacaggcaaacagcactacacacatgatatatattttttcacttatttgtttatgtataaattggtatgtgacatatttctttatatgttttaaaataacacctttatttgtatgtgttattatatgtttagttatgtctttatttttgtctttatgtgtgaagcactccagatgaacaaagtgctacactgtttcttgtgagcagtgattctaaagctagtacaccccactgaattttgtccctctggtcgattgtgaggactcagaagtatattggactcctggtgttagagctgtttgttttcttggtgtttcaatgaggtccagctctagaagaaagcaaagaaggttcatggggtattttgaaatgaacagggtccccaaaagcctgatggatctggtaacaccacgcggtatttgattcaaatctatctggtagcatcctctctgaatttttaagtgaagaagaaaggggctcaatttggtagtgctgccatatactttttttttcttttaatttttttgagacagagtctcactctgttgcccaggctggagtgcagtggcatgatctcagctcactacaaccttcacttcctgtgttcaagcgattcttgtgcctcagcctcccgagtagctgggactgtaggcccgtgccacaacgcccagctaagttttgtatttttggtagagatgggggtttcactatgttggccaggctggtctcgaactcctggcctcaagcaatccacccatttcagcctcccaaagtgcaggtgtgaagccactgcacccagccatgccatacactttttagcctgggcaggaaacttaaagcctaggtcttgaaagaaaggtatttttaattggtcattcattctccaaagcttattgagcatcgtatgctaacgttatgaaaaataaattttcctcactagactatagctccatgataatggttggaagtcacaggaaaggtagatttctgctcagtgtaagcctgttattgctattaacattgaaatggcctgatcttaagtttctgagcttcctgtcattggaagcatttaagtagtcctgaatagtcaactgttaataaatattataggtatttctattttggaaagagattgaaccaactgcccagggtttcaaggattaagttcagcagttaataccagagacttgaaaaatggtggtttctggtaacagagacctggaaaccatggcttaagcaagagaaggattttgtttctttggtataacaaaaatccaaaaataggtattttagtagacctcaagtgattactccttgatcgcattaggaacccaggctccttttaaccttagctattttcaacatatgcttttcacctgaaatcataagatagcttatctgcctccagtattgtgtacatgtaaaaggtggtaataaggagaaggatagtggaaaagggggcatgtgccaaatgagtcagtcctctttaaagagttcttccagaagttcaagccagtggcctcaattgactaacattgtatagcatgaccacccctacctacaagggatgggaagctaactggacatgttgttactaataaaaaccagagtatgtcagaaagaagggaaggtttgatgttgggaggcaagtaagttttttcttctacccatcaaaatctttttttagttagaaaatatttgaatctaacatgtcccactccattgtggcaccaatacaaatggttatggatacatggctttattatagtttgttactaggaatagtcttggccgtattgatttgaattctccatgtctaaaaacaggaacaagcaggtccaagaacactttaaaagcacttcccactcagctgcttgttaactgaaagaatgtagaaaagctactcagaagagtagctattcaggccaaacttcctgatagtagagcattgttagctttacacttttatttccatctattgctgcctagattcccttccttactgtacttctttattcctttcctcttctctgttcttgcctttcaaatttttagacagggtctcactctcttgcccaggctggagtgcagtggcttgatcacagctctctgcagcctcaaattactgggctcaagcaatcctctcatctcagcctcttgagcagctgagactacaggcgtgtaccaccacacccagctaatttttttaatttttttgtagaaacagggtctcactatgttgtccaggctagtctcaaactcctggcttcaagcaatcctcccaccttggccccccaaagtgctgggtttacagcctgagccacagaattgagctctttaaaatttttaaatgccccaaactctttttatttatctctcattagagatctgtgggttccttattacctgggaaatgaatacatttcccagcttgtccttgagttaagagactcaatttagaagttaattgaaattataaacattgaaaccctgaaaaaaatgttttttttttcctcgtgatacaggttgtttcttatctaaaatgcttgggaccagaaatatttcagatttttgattttttttttaatttgggaatatttgtgttagaccagttgagcatcccagatctgaaagtctgaaatccaaaagggtcaactgagcatttcctttgagtgtcatagtgactctcaaaaagtttcagacttcagagcattttgaatttcagattttagggtttgggatgctcaacatgtaacagtattcttgatttgggaaacagtaattataaggaatgtgtttattttacattttatattgatttatttattgagatgttgctggatatatgccaatggatatgacagaggtcccccttcttatggccaagacagaaaatattttatgctttgtaggccacctatgctctatcagatttttcttatgggctggatttagcccatcaccattttttaattcttgctttagactatgtagtcagaaaagctattggcaaagtttagcagttaagagttacatgtcctgatttctgtattcaaaatggcactaaaataatagactaagggcagacaagacagaaacagaagagttacattcctaagtttttggcttatttaactggggccatttataagaatggaaggctgggagaaaactgatctgggaggtaaaatatattaataagttcagttttgaaggtgtaacttatagattcctaaatgtaattgtcagttagagtttaggaggagtccatcacacacacacacacacacacacacacacacacacacacacacttatagatagatcacacacacccttatagatagatcacacacacacatagatagatagatagatagatagatagatagatagatagatagatagatagataaatcagcatataggtggcacctaaagccatgggattgtatggtatttcctagggagaacagagggctataaagtaagtcaaaggggtagtccagctgaggagcctagaaagcttaagagtatttagtgagttaagaaaactagagaagagtatcatggaagctaaaagagaatgaagtggttagctgtatcaagtcatgctgtcaaataagataaataggcagaaaaaaacaatgcacaggacattatggactttaacaagaatagtttcactggaatagtatggggcaaaaactatattgaagttttgctctgaagaccaacagagaaatggtgctatagcaaagagaatgatgtgatcaagggaccatttgcttgatgatagaatgattcagtagagaagagggacttgacgatgcaagaggagggatttacttgcatatgttatggattggctgtgaaattcatgtatttttgtttgtttgtttgtttgtttgtttgtttgttttagatggagtctcactctgtcgcccaggctggagtgcagtggcatgatctcagctcactgcaacctccgcctcccgggttcacgcgattctcctgcctcagcctcccgagtagctgggactacaggcacatgccaccacacccggctaattttttgtatttttagtagagacagagttttactatgttagccagtatggtctccatctcctgaccttgtgatacacccgcctcatcctcccaaagtgctgggattacaggtgtgaatcaccacgccctgcctgaaattcatgtattttaaggggcaaacaggaatcgtcttggttaaagcaaagggaataaagaattttctaaatagactaagagcaaaatccaagtgcttgagaaagcacagcatacttgggggatggcaagcacttaatattggctgaaatggagtttccttttaagctaatgacaaaagtagttggctagatcaagaaataccactgtattatgccacagtgtttagaatttattctgaggacagtgaggatcctctgaagaatgtaaaactaggaaaataatttttttttttttgagacggagtctcgctctgtctcccaggctggagtacagtggtgcaatcttggcttactgcagcctccgccttccaggttcaagtgattctcctgcctcagcctcctgagtagctgtgactacaggcgcccgccaccatgcctggctaatttttgtattttttagtaaagatggagtttcaccatgctggccaggcttatcttgaactcccgacctcaagttgtctgcccgcctcggcctcccaaagtgctgggattacaggcgtgagccaccgcacccagctgaaaataaatttttgatagcattttttaaaggtaagatagaggaatataaatttggaggttggcaaaactggaggcaggaggccaggcgcggtggctcatgcctgtaatcccagcattttgggagggcaaggtggactgatcacttgaggtcaggagttcaagaacaccctgaccaacatggtgaaaccctgtctctactaaaaatacaaaaattaaccgggtgtggtggcacttggctgtaatcccagctactcaggaggctggggcagtagaatcacttgaacctggcaggaggaggtggcagtgagccaaggttgcgccactgcactctagcctgggcaacagcacttggccttccaaagtgctggaattataggcgtgagcccctgtgcctggtccctctatccatttttagcctgtttctttcaagtgtttttaaaatatgtttattatgaaactgaaagtttttctttatgacaaatcatataatttatctttttctctttacgaagattgaagaattggaggagaaacttaatgatgcacttcaccagaagcagctactaacattgagattagacaaccaattggcttttcaacagaaagatgccaggtaagaaaagttttttttaaaaaaaaaacaacatctatttagcaattaaaagtaattttattgcctgttcatgtttgtgactgtaagctaaaatagagaaattttaagtcagagatagcaataatttttacacctagaccacaaaaaaagtaggatacttgatatggtacataaaatacagaaagtcaaaattcaacattcattcaacaaacattggtcagtgtaaaccatatatgataaaggaagctctctaaactgaccaccattaacctttcttcttttacgcaacatattgattgattctcatgacccattggactttcctggcctgaagtactttctattattcctgtgtactttctctagctcagttgtgggcttatcatgcttaaatatgcctatggcaattatacttatgtaacttaattaaaaataatacaaacaatgaaataaattctttggaacgattcaataaaaggaactaaaaaaattatgaaattaaatataagcaacacaagtttaaagattgagggcaaacatgaaatccatataagataccttcattggtttcttcctaaatgtcttttaggatctcatgccattgtaaagaaattgaacttggaaatcatacatgatgatttacacaaaatcaaatcatacctctgtattcaaaatatctggatcctatataaaaatgtgaatgtttagttctatgttttaattacaggtaaaagtgtaaaacaggtaaattttccctttttaagattttactacttaactgatattgtaaaaaattatcggacctttttatcagccactatcacactagattagtggacctcaaactttagcatgtatcaggaacagttgaagggcttgttaaagaagcctactggatcccaccctcagagtttctgacttgtgggggtggggtcctgagaatgtgcatttttactgggttcgcaggtgatgcagatgctgctggtccagaaacaatactttgagaaccactgcatttgataataggtcttctatgctaattctgtaagacatatatcagattgaatgatgctgctgagagggcagtcacgagtctattgtaataaaactcttgatagctgatggtcataaaaaatggttggattctgaatattttttggagggctgatggattcaatgtggggcttaagagaaaaaggggagtcaaggattacatcaaaagttttggcctgaacaaatgaaaaaatggaatttctgtcagctaagaagaaagaaatcatggtagcaaaggttttgtgagtaaaaagcctgagttcaatttgggacatgttaagttggagttttctagttagaaatccatgtggaggtatacgaaaagtctcgtgtagaggtacaaatctggggatcattaggctatagacagtattcaagtcatgagactagatgaattccccaaggagtgcgtacagacagaagaggaccaagtactccaacattaagacaaagcagaaaaggagactgagaaggaaccacagtaaaatagaagaaaaatgaacagtatgatgtcttggaagccaggtgatgaaaatgtatcaaggaaagaaagtgacttgtgtcaagctctatcattagatcatggaggaaaagaactaagaattgatcatttgcaatttagatgtcattgagatttcattggagacagtaaaaatatgatcgccatgggtttaagaggaaaggatttggagacaataattatagacaacttttgagcaagcttgctccaaaggggtggctaacaaagggggaagtgcagtgaagtccagagttgtggttttgtttgttcatttgttgtaagattgaaataacagcatgtgtgtctgttaatgggattgatatagtagggaaggggaaaatcagtaatatgatttggctgtgtccccacccaaatctcatcttgaattatagctcccataattcctacatgtcatgggagggacctgatgggaggtaactgaatcatggaggtggtctttcccatgctgttctcatgatagtgaataagtctcacaagatctgatggttttataaatgggagttcccctgcacaagcactcttgtctgccaccatgtaagacatgcctttgcttctcttttgccttccgccatgattgtgaggcctcccctgccatgtggaagtctgagtccagtaaacctctttcctttataaattacccagtcttgggtatgtctttattagtagcatgagagcagactaataacatcagattgtcccttcctgatcagaatctttcagtaggcaactaacaataatgtctgctacatgtattctttgagaatgatgagtatgtgcagattactgttttcattacctcattggttgagtgaataccttatggtggttcagtgttaccatcttaaagagatatccttgaagtatcaggataaaagggaaatgaaaattactttaataagtagagtccttgatgtttaacattaaaccttaagcagaagaaatatataattttataatttgaatttctaaaattattctttaagaatatcaattctctgtttaataatttatatggttacacatttaataattagtatggaattgtcatttcatatttaactgattaatatgagtaaataagtatttagctggagtaagtaaataatactgtcaggtttctgatttcctaactttatgttgatataaataggaaactgtgagaaaattagatctcaaatacttttttaaagcctgccataaattctcttctaatgtagcaaatatcaagaattaatgaaacaagaaatggaaaccattttgttgagacagaaacaactagaagagacaaatcttcagctaagagaaaaagctggagatgttcgtcgaaacctgcgtgactttgagttgacagaagagcaatatattaaattaaaagcttttcctgaagatcagctttctattcctgaatatgtatctgtaagtatcttatatctatttttaactatgacatatattttcagactaaaatttaccatttatatagtagcaattacttttgaagtacccaattgatacattattttatggctatggatggtgaatggtgttgagatccaaattttaaaggatcatgaccattgatctccaaagtcaagcaataaataggtttctgaagttaatgactgcatagtccatagaaatgaattatcgtaaactggtggtttcttacattctcaaaatgaaaaattataaacaacagagtagttgttgccaggggttggttggggatagtgggagagaggagtcagcgtggttataaagggataggatgagaaagaactttgtggtgagagattggcgcaagatcttgattgcagtgctggttacacaaatctagaacacctaggattaatctatggcagtggtctcaaatattttggtgtcagcattcatttacattctaaaagttattgaggaccccaatgagtgtttgtttatatgggctgtatctattaatatttaccatactagaattttaaactaacaacttttttaaacacaagaataagcacacaattccattggccttaagagtgataatgtcatatgtcatgtagccactggcaaactccactgaacagtcatgagagaatgagaatgaaacggggaaaaaaaatcttaataattactaggaaagtcgttttgatcttgtgaattccctgaaaggatctcagagtggcgagtggggcagagtccaggagtcccaaaaccatatgttgagaactgctgctttttaatatgtagatgtcattttaccctgagaggcttgaattttttaatccctaaaaagggttaatagtaacggtgcgtttctattggggataattgtaaagactataactatgtatgtaaaatgcttgtgagcatagtgcttagaagatagtaaacacataaaaatgttgtctattgtttttgctggagtggtggttgctattcttggttctcattgggaaaagatttgcagattagtgatgtctgataaaatgaagttacttttttgttcagctgttttttttttttttttaaaaggctcaaatacagcttttctgtccaaagtatactgtccaaaacaaattaaatatctcaaattctgtttttgaggcttcatttacagtagatataaagtatcacactggtggcagttacacatatttttgctgtttgttttcttaatattccttcttacatcttttgttttcacagacaatattatccttaactaattaattatatgcagattctttttgttgagggctagtattaagatttgcctcttaccaaataatggtattcttgtaataccgtcatatgttaaggagtttcagattgcatgcctatatgatagcccctaattactctctcctaatttgctgtgatgatttcttagttttatgggaccttgtcagatggaacactttactgagctagggtaggaaaatttctctgagacaagtatgagtggaaagagagacctgaactaaatggaagtaatgacgtgaaagatacctcttgattcattctgattagacttccactgtagggacagcagtaaataaagctttgccaagagcctgggatgaaaataaagaatacactttacctcttcatcaagtatttattgagtgcttatcatatatttaggcattggaaatacagcggtgtataaaccagacaaaaatccctgccctcaggttgtgaaagtggagcaacacaggcaataacttaaaaattaaatatgtagaatatctgtttgtcaaaggtgctacagagaaaagagcaggggtgaaaaatagggagtgctacttaaaattaggtaaagaaatcagggagggctttactaacaaggtaatatttggtcagagacctatagggagacaaggcatgagccatgcatttatatgggggaagaacttctctagcagaagaaacagcaagagcaagactcctgaacatttgtgatatgttccagaagtttacaagcacctagtgtggagtgagcagtagtagatgagtagtaatggagtgtcagtagaagggaggaaatactgtcaaaggtaagaggttataaatcatctggcccttgagggaagttaattgaacattaaggcttgatagaaagtattagtggctagggtccattaatgactgtcttgttgtagttttgtaaatatttatctttattactgataagtgagagcactacaaattacaaattttaattgtaatttggatttaagactgcttattaatttaatttttttcaaggttcgcttctatgagctagtgaatccattaagaaaggaaatctgtgaactacaagtgaaaaagaatatcctagcagaagaattaagtacaaacaaaaaccaactgaagcagctgacagaggtttgtatggttttgattgctggtgggaagaagcttcggctttttctgtagagtccctcaggatttgtgataaggcatataaaagtcagtgattgaaaaatgggactatgggatggtgactgctacagttcaataatgggaaggaggttaaattggaagtagtcatcttaaacattgacaagacaagtctgtgttattgacgtatcctatagttgagcttttattgttgcaagtcaattttataatcaactgcttttgaaatcctaatatgggctatatctgaaaattgctgtgtatccttagatgacgcatatgcatgtatttatttagtaatttgtctctatttttaacatcactttgtcaggaaatttaagcaagaaacaagaaatgtaggccaagctatgcaggggatctcttgcaggtgccataagaaagaagaaaaggagaatatttttactttgaactaagttgactcgtaggttctggtttgcctaagactgttgccattattcctgtgaataaatattaatagcacccctttattttcaaaattatctcagcctagacgatgaatatagtaatcataaatcaacatttatatagaagggtggactaatcattaacttggttgtattattgaccagatatcctagaatactatcttgtagttatagtctactaacaaaaaaataatggtagattgattcattctaccatgtaacagttggaaatgggtggctgtttttcttcaaatatttcgttattctaaaaggaaaacacttctagtttacaaatgggggctgctgcagttcttcattacaagttagccttgttcgtgatatgagatggagctactgtccatttattacttacgtggcttctttgtgaagtgcagttaactctcataatatttattctgagcatgtgtactgatactagcattaaccccagtggtgtgcatggtgctgtgctaggtgctggcagtgaacccaagagaggcaatgcctgcccttctagagtttactttctagcaggttaggattagaacattaggtgatattttgacactctcatttactgtgtgaccatgaccaggtcatttaatgtttcctgttctgtcaaatggagaaaataatactgtttgttcatttatttaattgcattgcctatatttctgtttcagagtaaaaacatgattttagcaaagttgcatacaaacatttatgtcctattttaagggcagtttttgtcaatgatattatccagaaataaataattataatttaatttgtatttttaatgctctactttgctgtactattagtcttagagataatttacttaagtcttgccatagaaccaatatttcagacaaaataagaaggcttagcttcctctcctctgaggagcagtgacatcagcaggagcaattagaggggcagatgtgcccccactccaaacttcagttgttttcttttcttctcctagcatgtcatattgtgcaggtaaactgttttgcacatttagaaagatagttcaattaaaaaaaaaattcaactgtagtcaaaatagtagagaacagagaaggccactgtttggccactttctaattttgcagccttgggcaaatcatttatactctattgtttctgtaaaatgcccaggatggttttggtggtacaggggttattggggaagaggcagttagacaaggtcttagcgttggttctatacaccttatggtacctcagcatccctcaaggacttcttactgtgtagtaggagggctggaggagctccctatccttgtttttatcaagccaccctttttaaaataaccttaatatttgggacttctcagcatgatttctcttgaacacagattcctcaggccattcttagagtttgtggtttttctgccctgtcaaggacctggtacaggtcaacttgccaaacactaggaaaaaagtaaatatttttaaataaaaagcaaaaccaatatcattaaacagctttatttatttatttaaacagagccttgctcagtcgccccagctggagtgcagtggtgccatgtctgctcattgcaacctccacctcctgcgttcaagtgattctcgtgctttagcctccccagtagctgggcttacaggcatgcgctaccacacctggctaatttatgtatttttagtagagatagaatttcgccattttggccagactggtctggaactcctggcctcaagagatccacctgccttggcctcccaaagtgctgggattacaggcgtgagccactgcacctggccaaacaggatgtagtaaacaataaatagtactactcaatattcaaataaatgtcacatattctggagtttattttttgaaatggttcattaaattatttactgctatttatttgaggaattaaaagacatagtttctcatctctgcgacttgataacaatgtgatgatcttggataaaaaacagtctgtctcctatcttaacagcttctccgtccgtaaaatagggacgataacatgtaacacctaccacacgtggtcatattataaagaatgaaattcattcaataaatgtgtatcctgcatttactatatacggcatgcattattcttggtacttgggataccttgttaaacaaaacagtaatccctgccatcatggagtttatatttttaaaggatatctgtgagatgtatattgtattttaaaagggaaaacaatagcaaatcatgtagtgtgacaaaagttgataattgtaatagaaaaaagaaaaaaatagttcaagataaggtgaattgagtgctatatggagagcagggaagagagcattgtcagaattctgtaaggttggctagtaggtctcattaaacagcttagaagtttacaaagccttgaggaagtgagagagagaacaaggctgtcttccttgagacagctcagggaagagcttctaggtagcaagaacagccaatgcaaaggcaggggggtactttggtatttgtggaacagtgaggagggcaatatgactggtatgcttgaagggtggaggaggatagttgtagttaagatcagagaggtaatgagtctgttgaggtcatcatacagactttgattttaaccttaagtgaaatgaaaagttgcaggattttggaaagaggtctgacatgatctgacatgtacagttgactgttgaacaacatgggtttgaactgtgtaggtttatttacacatagattttttttttcagtagatatactggaaaattttttggaggtttgtgacactcgcagatgaactatgtagcctagaaatatagaaaaaatcaagaaaaagttatgtaatgaatgcataaaatatatgtaggtactatattttatcatttactaccataaaatgtacacaaatctattatcaaaagttaaaatttatcaaagcatgcatacacagaccttacatggtgctattttcagtagagagaaatgtaaacaaacgtaaagatgcagtattaaatcataactgcataaaattagctgtagtacatactttactactgtaataatttcttagcctcctcctggctattctggtaaactcaagtgtttgggatatctgcttaaaacgctgtatgatgctaatcatccccacatgagcagttctccagtaaaatgtgaatcacaataaaaagtgatttctcgcagttctggcatattatttttcatcatgtttagtgcagaactgtaagccttgaataacaccatgggaaccatatgaagtgtcaccagtgatgctggaagagctctcaagcagcagagaaaatttatgacattgtaagaaaaagttaatgggttgcctaccattttggacagaccattaattttgtaaacaaattatgtaaaacttagagcatccataatacagtacagttatgtaaatgtattttcttaggatttttaaaaaatgttttctctagcttttattgtaagaatacagtatataatacatataacatacaaaatatgtactaatagactatgttatactaaggcttccagtcaacagtaggctatctgtagttaagttttcagtgagtcaaaagttacacatggattttttttttgactgtatgggagttggtaccccaacccctgtatcgtccaagggtcaagtctatttaaggtatcattctggctggtacatagtagaccgtcaacaaatgttttctttattgaatttctttttaatgagtattttaaaaccttcctgttgtcctggataatgttttttaaagaaagttctctcctgagaacagactgtagagctataaggatggaaacaaagagacttgttaagaggctgttgtaatctaggggagagattattgtgtttcagatctagatggtagcaggggaagtggtagattctggatttattttaaagtagagccaatagaaaaaaggtagagtcatgaattggatggaggatgttaaagaaagataggagtcaaattaactctaaaaaatgttagtttgaataactggaaggatagatttctgttcagctgagataggtaggttgtgaatgaggccgacttgagtgcaaaagagtgtggatcttagacatgttgagtttgagagatctgttagatgtacagtcaaaggtatgtggatatacaggtgtgaactttagaagataagcattcaagagtcatcagcataaagacgatatttaaagccaggatgagattaccaaaggagagtgagtgtagggaagagaaggaagaccacagcttgagctccagggcacttcaacattgaaatgtgggagagagaaggaggagttaccagtgaaatagggaaattaagagaattttatgtccaggaaatcaaagggcaaaagtttgtcaaggaaaagagagtgatcagctgtttcaaatgctgttgataggtacagttagatgaagactaagaattgacattgtatttaacaaggtcattgaaaaccttgtcaagagtagttctggaggagggatagggtcagcagtttgattacagtgtttgagagtgaatggaggaaataaactggacatagagtatagacaactctttctgagtaatactactgtatagaggaacaaagagagttggcaattacaggaaacatggagccagggaaggcttgttttttttttgtttttttgttttgttttttgttttttgtttttttccttaagagagatgacagctgttgtatttaaaatcacattgtaaccataaaaattttctcattgtcgacaacggtagaaggacattcatgtaattgttaaccaacagtgtaggtagtactgttggatacccagttatagttatgtttaaggctccccactttagtgctatccgtgtaataaaaagagtcatgtatatttggggtattgccaatagtatgtgtttctgtgattatgatatttggggaaactactagaacagaggggtgtttgttgattgaattactcctgattagttctgtgggactttcttaatatctaaatagtggtttaaagaataataatttagtaaagtgagataatttatctcttaatagctagagttttaattatgtcacaaaaagttgagtttcgatttaaaaaacaactgaagaatatatttataagtgagtaaggaagatagagaatgttatgaccactagaggagggtttacaaaaagatctgggttatttaaatgaggctgggggaggttgaagaggtgattggacactgtcaggttactgaggttcaattgtcatcagtgagaaccattgtctctagacttttaaaactaatcacaaacccctaatttatgaaagtgctaaatgaaattgtcagtttttcatttgaagttttctgttttttcttctgttacttggaatgttcttatctgagtgttttttgcccagtggtatttcatgtttctttcctcttcagtctgtgggctgcatatatatacttattgttggcctgaagcagacaataaaaacagagaaatgcccatcatatccaaaggaagtagcaagaaaatttcgacttttccaatggtgtcattaattttaagtttcttgacccaaaagagtaaattttcctcttaactatagtgggagaaaaaataatatattttcctcacccattgcaaggtttatggctgagactccaataataaaagagtaataagagaaaagcataacaaatttatgtataatttatatgtataatttaatataaattttatgtgacatgggaaccttcagaaatgaagactaaaagacccagggaaaatgtatttttgtggattgtcatgcataagtatgattggaagacaaaagtgtatgatctgatggtaatcaactgggagaatttagcaaggcttgtttgttcacattcttcttgggctgtctgtgacattccttcccattaggtatagggcaggacgcctgtcaccttaggggagaggggagggagaaagagagtggccttcctaggtttgatgacctgcttcaagggagaaagaggcaaggggaattttcatttatgtggcccacttcaagagagatgggttgggagaaggtcagggagacccccctgtttctgcagttttcttaatttccttcaggttaaaatactcagtatgccagggtgccatgtttcgaggtgtctgttctaagtcctaacagaggaattaatattttattttgtagtgaacaaattgaaaatatatccagtaaaagtgtgtacactgattctgttttcctaaatttgacaaataaaaggaagtgttactttgttcaataagtgttcaataagtaagatacactgccatagtaagtttcaggacaaggtccatgatatatagctgcaaccaccataaagttactaaattttttcttttttgagccagagtcacactcttgtcacctaggctgcagtgcagtggtacagtctcggctcactggaacctttgcctcccgggttcaagcgattctcctgcctcagcctcccaagtagctgggattacaggcacccaccaccacactcagctaatttttgtttgtttgttttttgagatggagtctcgctttgtcgcccaggctggcatgcagtggcacgatctcggttcactgcaagctccgccttctgggtttacgccattctcctgcctcaacctcccgagtagctgggactacaggcacacgccacgacgcctggctaattttttgtatttttagtagagacggggtttcaccatgttagccaggatggtctcgatctcctgacctcgtcatccgcccgccttggcctcccaaagtgttgggattacaggtatgagccaccacacctggcctgaagttactaacttttaataagacatgatccaaatttttcatatgacattattcgaaagatcttcataaagtgattcaacaaatattttattcttcaactcatacttatttaaggttggatattttaagataaacaacattagtcttattaatgactttatgtaattttaaagttggatacaatataagctttggggaaaaaaacatgactagatggtattcacccaagaattttaagggacttaaaggatgaacctgaaactgcagcacatgtataatattgctatcaaacagagcacttgaagtaggtgtaattgcttgaaagctggtaaattgcctgcctgagtctagaaactaaagacctccacacttaaaactgataaagcactcttttatgcttactgagcttgtgtaatgcatgaagattaggatcagtgaatacttaggcaagttaaatacttccccttatgggggaaggtcaacagagtggtacaaatggacaaattatatttcacatatatataaagagaaaatagagaacaaattatatagactttcaaaaagccattgacaggttttaaattctagcttttaaaaattggcaggcttttaaaaaattacagtgaataacataacattaaatttaagactttattttcatgtatacaattcagtaaagaatactcacattgtgcaacagatctctagtacttttgtatgttgcaacactgaaaactacccactagacactgattctccctctcccctcccccagtcattggtaaccattttttaactttgtttctatgattttgattagtttagattcgtcatatgagtagagtcctacagtatttgcccctttgtgattggtttcaattagcataatgccctcagggtttatccatgttgtagcatgtgacagaattttcttttttttttttattgtactttaagttctggggtacataggcacaacgtgcaggtagtgttacgtaggtatactcctgccatggtggtttgctgcacccatcaacccgtatctacattaggtatttcacctaatgctatccctcccctagtcccccaccccctgataggccccagtgtgtgatgttcctctccctggtccaagtgttctcattgttcacctcccacttatgagtgaaaacatgtggtgtttggttttctgtccttgtgatggtttgcggagaatgatggtttccagtttcatccatgtccctgcaaaggacattaactcttccttttttatggctgcatagtattccatggtgtatatgtgccacagtatctagtctatcattgatgggcatttgggttggttccaagtctttgctattgtgaacagtgccacaataaacatgtgtgcatgtttttatagtagcatgatttataatcctttgggtatatacccagtaatggaattgctgggtcagatggtatttctagttctagatccttgaggaatcaccacactgtcttccacaattgtctttcacagtcaggttgaactaatttacgcttttttttttttctattttaaggttacataatattccattgtgtgtatataccacatttgctttatccattcatctataaatagatacctgaattgcttctacctcttgggagaaatgggcagactttgtaagaagtgttatcatgaattctcaggaaattgttttctctttagtaggtgaaggataagagccaaaaaaaaaaaaggaataaaaagaactaaatgaaaaacaaaaatagaagtattcttcagatacaactgttaaatccaatcttattcattatttaacattttaatacatttattgggctgggcacagtggctctcgcctgtaatctcagcactttgagaggtcgaggtgggcagatcacctgatgtcaagagtttgagaccagcctggttaatatggcaaaactccgtctctattaaaaatacataaattagtcaggtgtggtggcaaacacatgtagtcccagctactcaggaggctgaggcaggagaatcgcttgaacctgagaggtggaggttgtagtgagccaagattgtgccactgcactccaacctgggcaacagagcaagagtttgtctcaaaaaaaaaaatttaatacatttattgatgaggaagcacaaagtataatctcaagtttgtagacagtaaagtttttctgagcagtggaacaccaaactagtagggcagattggaggaaggtctcaaaaggtaagtggactgattataaatgaatgtgttttctttttaataactatcaatcagcttatattcccaaaattagcatgttcaaaattgatcacctgccccagagtgtaattttttgccattttattatagaaattttcaaacgtaacttgaatttcacaatgacaccagtatatttatcagtaaatttctgccattaacatttttattgtatttgtcttatcaaatacctctccatctatccatctgccagtcacatttaattttatgggaaaatgctgaacttttttttccatttgtcagtaatttcttccttttcattactgagtggtattacattgaatggctctagttatttaccatttaatgggcatttgagttatttccgattcagagactttacaaacaaagctctgagaacatttgagtatggttttttgtgtggacatgttttttctcttgagtaagtacttaagtgtggaattttttacttctagaatttcagtttggttatttattatagcttttatttctctatttgtttacttattatgaacatattttcctttacaccactgagaattgttaaaataggagctttaaaattcttgtctgctaattccaaacactgggtcaccttggagttgatctctgttgattgtcttttcttttagaaatgggtcacatgttcctctttcttcagatgtcaagtaacttaaaattgtttagaccatcgagtaagtgtagatgagaacattgtgagtattatgttgttgagactctgcattttatgtacctctaaacggtggtgatgttcttgttttagcaggaaattacttggttgtactcaaacagcatactctgtctattgggcaggtgttcaaatttcagttcaattttttttggtattattggggctgctcagagtctgtcctacacatatgttgtttagagggtagccagatacttaagcagaaattacccagagaattcagtttcccctctctggctatctctgaaatttcctcctcatttagagcagctgcagttcccataaataccaaagattttctcatgcaccttgatccatccaacctggcacagaatgggactggcctcaggctaagggctactaaacaaaaacaaaaaataccaggaaactcacctaaatgctgaaaatgatagcaataatgacaactccatagtggtttactaagagaaactaaggtatttgttaggcatatctctgagttttgagaccagcaattaagaaaacaaattttccattttacttaaaaagtttattctctacagagagttcatgaatctggagaaaataaaattactctcagtctttccgttttactttatggatctttcttatccaaaatggtcttaatttttttcaccacttgggggcagtatatgtcccttttttttttttttttttttttaattaaacctgttgggggctatttggaaaatgtgattatttttgagctagagacccaaagctttacatttagttaccttattttcatttatattcattatttcatataaaatgcctgcaatcaatcacatagtatctttttctagtaaaatttaatatatttagaacttggagaatggagtatcaaaacaaaaatttgtgttccataatatgtattcagagatgtctcagttattgcactaatttcataattatgcctaccagaaatattgagaatttttaattctgttaaaaccaaaaacattcagggttttaaattctgttaaagccacatgaaatcattaaagccacacaattacacagttaatttgactctgcttttgtttgtatgagattaaaactgtttaagaaatttaatagaaggtttttttttggtttttttttttttttttttggagatggagttttgctcttgcccaggctggagtgcaatggcatgattttggctcactgcaacctctgcctcctgggttcaagcaattctcctgcctcagcctcccgagtagccgggagtacaggcatgcgccaccatgcctggctaatttttgtatttttagtagagaggggtttcaccatgttgatcaggctggtctcgaactcctgacctcaagcgatctgcctgccctggcctctctaagtgctggaattacaggcatgagccactgcgcttggccagaatgtgattcttgacctttaaaaggaaattactctttctgaagtggcagttttagtggatttctgggatttccttttgtaattttttccagatctttagttatttgcaaataacatctagatactattataacactggaaaatagggctcatcttttacttcaagtccggagtttatttaaaagtgtcagtaatgtagtctaattctggcttattttgagttacattatgtatatgatcttgtgtatggtactttatgtttataaaagtgcttatagataactttatttcctatttatgaattttctctattagcaggtcaaaattttggttgatcacatgcaactcagctatatgttgctgttttgctattatagagttagttcagcatgctttttcatatcaaaaggatgtgatgttagagatacagtgtaaggcattagtgaatctgcacttaataaaactattaaatttcatgaggaaatggtgaaatatttttctcttatgagaactttggtaactaggaagcaagaagaattttgtcaagagtacttccttgtttagaaacatagttacattctttaaaaaattctgcaagattatcttgaggttcatcttaagtattcatatgtaagtaattcagttaattttatttgtatgaaaatgagttatttcattgatgaaacatatttgtttattaaagtttttatattttagggagtgttaactgttttctgagatttctttttatcttatccaagtgatgagcttaaagtttctttgtaaggtacatatttatgatgatacccatcagttataattatcctagaatgcttaacaaattagtaaacagtgatagatttgcctctttatattaaatttaaaatgtataagcattgcttaaaatttagattcatagccacctgcatgggttctattttggtctgaggtggaactaagaacctcaatttttttttttttttttgagacggagtctcgttctgttgcccaggctggagtgccttggcacaatataggcttactgcaagctccgccccccaggttcacaccattctcctgcctcagcctcccgagtagctgggactacaggtgcacgctgccactcccggctaattttttgtatatctttttagtagagacagggtttcactgtgttagccaggatggtcttgatctcctgacctcgtgatctgcccaccttggcttcccaaagtgctgggattataggcgtgagccaccgcacccagccagaacctcaatttttaataaacaacccaagattctaatgtggcgggttcatggacactgaccacaaatcattttttaagctatttttgttaacttattaattgagatttaaaaataactttgaatttttaattacatttcctgatttgaaatttatatattggctgggcaccatgactcactgctataataccagcactctgggagcccaatgtggatggatcacctgaggtcaggagttcaagacctgaacatcgggaaaccccatctctactaaaaatacaaaaatcagctgggtgtggtggtaggcacctgtaatcccagctacttgggaggctgaggcaggagaatcacttgaacccaggaggtggaggttgcagtgagcggagatcgcgccgttgctctctagcctgggtgacagaacaaaactccgtctcaaaaaaaaaaaaaaagagagagagaaatgtatatattaatgccatttcttgccgccaatataaagttaatatgttttaatatatttaacatattcaagaatataattgaagtcatacactattacgttacaacttggacttactaaaatccctctcttgcctatacctctaaaacctctaaaaaattgctccttcacaaacctgttaagtttttacaaataatacaaatggcttacgataaaagtgcatgagggaaaaaaaattcatgggaaagctaaaatgaatgcaattttaagtacgacataattgggaagaagtttcatttagctgattgttttatacatgctgtatgaagagacataatcttttaaagagtcataagacttttttttccctttgctactgtgtgtataatctttagtaaatctaggaacttgtaaattttaggggcaagttttgaggggcttattgggttttgagatgaaattttgaacccagtggccaaaaggatgtatcactacatgatggcacgggaaaactcaggagggaccttaccaaatactttggtttaaatccagagataccatgataacttcgttctcttgatctgcatagtgtttctaagccagattccacagatatgttttggagtatctaagagttctttttgataatttttaactttatgatttaatttttttaatgacctcagaaattaacagatgcatatgatggttcatctgaatgaataatttataatagagtactatcactatgatgtcattgcccatgtttgcatttaattttgtcatggcattagcaccacagatcacagtttaaaaaaacagtagtcaactgtccaggcacagtggctcacggctgtaatcccagcactttgggaggccaaggcaggaggattgcttgagctcaggagttcgagaccaccctggccaacctggtgaaaccctgtctctaccaaaaatacaaaaactccagcctggccaacatggtgaaaccctatctctaccaaaaaatacaaaaattagctgggtgtggtggtgcaggcctgtagtcccagctactcgggaggctgagatgagagaattgcttgaacctgggagccagaggttgcagtgagccaagattgtgtccagcctggaagacagaatgagaccctgtctcaaaaaactacaaaaaaaaaaccccaaaacaaaaacttagccaggtgtcgtggcacacatctgtggtcccaggtaggaggattgcttgagcccggggtaggggtaggggagcagagtttgcagtgagccaagatcgcaccactgtattccagcctgtgtaagagtgagactccgcctcaaaaaaaagaaagaaaaaagaaaagaaagaaatagccatcaacttaatttgtaagataggtatttcagccaaataaaggccaggtgctatcatgcatcactgtatgaataaaagtttcacagttcaaatagagaaaaatgatgacaatatagagttgtcacactactgagcatagtcatgccaaactcaaagctaaatgaactcctacttattttactattttaaggttaaattatatagtcaacattaactactgaatagaataagcattgctgtttaggcttagttgaaaggaggaagtaaagggattctaggagatgaaaatgtgaatgcatgtcatttttcctttcttttccagttcaaagtatccctctctcagctgtcttctggcaggcagctggatctgagtggaagtcttgagctttgggaaagctagtgttccagttacgtattgctgcataacaaatcaccctaaaacttgctgtctcacaataatttattatttgtcacagctctgaaggttgataggttcagctgagtttttcttacctcactgaggctggggtcatctgaagtcttctttagtcaccagtttggagccaggatgatatgaccaaaacattactcccttttgcacttggcctcttcatgtgattagtttaggcatccttcaacatggcagtctcacagcatggcagctggccacctccaaagcaaatattcaagaaactcaggcgaaacttaaagacttcttaggatgtaacttcaaaatcccagaaaattgcttctcccacatgcttttggttaagcagatcattaagaggaatggacccacttcttaatcagaaaatagcttcctgcatacaagggaagaaattgatagagaccgtcttggagataagctaccaaaatttgagatttctctcccctgacttgagtgaaagcctagaaatagtgtgagagaaccctgagcaagagcagaacagattgtcggcagagctcggcctataaaaatctatggattactcccttcactcctcaccccaaataaggtggataaagtctcctttgcctccactaggtgagggaatcgatgtacagtgttctgttaaaagaaagactcttattatgaccttcaaaccaagcccagctctatttgtttataggaaatatgcttaatgaaaattgataaagattgaaaaatgggccgggtgcagtggctcacgcctgtaatcccagcgctctaggaggctgaggcgggtggatcacctgaggtcagaagttcaagaccagcatggccaacatggtgaacctgtctctactaaaaatacaaaaattagccgggcatagtggcaggcatctgtaatcccagctactcaggaggctgaggcagtagaattgcttgaacccaggaggcggaggttgcagtgagccgagattgcgccattgcactccagcctaggtgacaaagcaagacttcgtctcaaaaaaaaaaaaaaaaagattgaaaaataattacttaaataatttttaagtaaaaaattatataataaattttaagtacagattatatagtttctattttttatcataatttagtgaaaccagagattaaagatgaggaggaataaacttacttggcaattagaaacgtatcttttggattaaagagcaaagaaaaactgaaataaaacaatgaaaatgagaacatttttatatcaaaattcttagacacatttaaagctatgccaaaggaaaatctgtagccggaaatgcctttattatttaaaaaaaaagatgaaaaataaatacatgtagtactcatcttgagaaagctggaaaaagatgagtagaaataaggtgtttggaattaactgacatgaagtaagggaaaatacatacagttctatggcagtaagcttgaaaacaaaaaggaaagtgaactgtgccaacaaaatatagattactaaaattgacagaagtgagaacttgatttagaacagttaccatagaggtattacaaaaataagtaaaagtgtacaactgataaaattaccaacaggttcacagatagattactgcaaatgggttcacagttgatttagaaaaagacagctagttccacttacttatactatacccactattgaaaaagaaagttctgagaaagagactacaaaagcaaaataaaacatttaggccaattttgcttattactacagatgtaaaaatttgaaataaaatgttaaatgaattttaccattgtatcaaaagaataatactttatgattaaacagagtatattccagcacagaaagaataatccattgcatcagcaaattcatggagaatagcttcatgaacacattaacgtatcagatgcaacagcaattagtgttgaacacttaagattttatcgctttcttcatatgagtttgttaccttgtgaatgaaatatgttcccccaccgttcatctctagcaagaaaagaaattgattcatttgaagaaaactataaaatcttggaacatggaagcatcataccttaagtaagacaagctcattaaaatagcaatttttatgattaacatattaatcaaatgtagttcagttatagtctcctttttttcctgataatttgcaggggttgttggagggaggaagtgtggtacaggactttatcctttccatcacctgtgttaatactttttaattgttattgatctatatttccagacaaggtctcagtctgtcattcaggctggagtgcagtggcatgatcacacctcactgcagccttgaagtcctaggcttaagccattctcccacatcagccgcttgagtagctgggagtacaggcatgcaccatcacactgttaatactgttaaggcttatctcaattattcaaaaggcatgagaatccatacttttcttgcattgataaatttgggggttaatatgtgatacttttaagataatttagcaacttggtctctttaacattaagattcaaatttgtttggttcaatcatatttgggtcaatgcctgttgagaagccagtatttcaaatttgttacagtagtttgctgaataaaatgttgggtataaaaattgcctcctaatacatcagtgtagcattttgcaatggtggggtctgctagacccattagctagtgggtgatgtcttaatactagtaatagagtgttatactacaataataaccacataaaaataaatgagccaatgaatcagttagtatacacactctgcagaagcatcaggtaagtccagaaaagttgacttgctagagcaaaaagtaggagagacagaatctgaacccatgtttgttattccaatctagggtccaccacatgtgatgaaagttacctttcctcattcttgagttttgctgggcatagtggctcacgcctgtaatcccactttgggaggctataatcgcagcacttttggggctgaggcgggtggattccttgagtccaggagttcaagactgctctggacaccatggcaaaaccctttctctactaaaatacaaaaaactaactgagcatggtggcatgcctgtagacccagctacttgggaggctgaggtgggaggatcatctgaggtcgggaggttgaggctgcagtgagccaagattgcaccactgcactccagcctgggcaacagagtgagaccctgtctcaaaaaaaaaaaaaattactgagttatttttttctttaaaaaaaaaaaagccttaagtttttatttgaattcacatgtattcaaatagatataattgaaaatttagcatgtaatagaaattattaagatttttgttttaatgcatagcagactttaccacttcagattttgtctgtctttagaatcaattttttttttgaaaaatttcttgaagatcttaacaatgacaagagttgtctctggcagcaaaacagacttcattgtggcttataaagggacagcctatagcagtcaaagcttaattaggtttcttgttcttttcagtatttagttgcctggattagattattgataatgtgaaacttgtgggaattctgacaagtgaattcttagttttccagaatagctaaccaactatttcttaccattcactgaactgctgtccaatgtaaactgcttcagatttgaaccttaaggtaaatgtcattatattctatttccaatttccttagttgtcctccacacagacaggagttgttcatttattaaagatttattttgaaacataggttgctgcttttttctcagtttacatcatgggagagacaaaagacttaaatggagtttagaaattcattacatccatagtaattgccttttattgagaacagaaattgaggcttggctattattatcccatttactgtgatgtagaaattttctgttagtaagggctgatgactggaaattttatgtgtccatttctttatgtttgaaaagtttactttttttgcttcttttgttttagtctatttaatgtcctcttttgttcctcctcttccacagacattaattgcaaaccttctatataataggcagagtattagttactaggattacagaaaacttccttagagttttccttatgatgtgggagacaagtaatggctgcccacagcacatgtgatacattttctgacagataagaatcaggtgttgtgaaaaaataggataaactctaggttattgctggagcttagtcttcccacaaaggttgatgctaagctcaagacatggaaggatgcagaggagaatacaaaatagtcttttctactctctatagctttaacaatggttctacatagtcatggggtttattttgagggaagatgctatttttcctgtttccaatgctatggcttactctattttaattgctaacaataaatgcaggagatttttaaattcaaaatacgaaagtaataatttcgtttaaggggaaattgtccaattgaaaaattgtaaataaagtgctggtcgaatatgtgcattcttatactgcacttagacttgcttctgtttatacttgcatatggtgtttatatttaaaggaaatttataaatatatacatatatatacactatgtatataacattaataatatactctgtatatttattcttccatggaactactctctgaatatcctaaaatactctgcatatttcagagtcagatgatctttacctttttagatctttgcagttgcactcacagaaaacactgcttctttggaactcatcatctggataccccaacttacagtattcttcatttgcagaccactgggacattcctctttgtttaatgaaagccttgctctagatttagtcttcctttccacttcagctgctacctaggttacttatgtgattaattcatctatagccttggccttgaattttattgatctcatctctagtgattgccttttctccattttaacactcagtcttatagcccacatttggttccttgccatccagaactgatttacttctgaagttaccaattcactttcatccactaaacatcttatttcctatattttttatgttttaccattgtctgctttcaacttgtctttaacagaatttccaatccatataatttgtttctttatcaatcctttcctaaatttattttcttcccttgccaccatgttatcagtcttaaacttttttttttttttttttttttgccagtatcatctaattcctctcccagctttctttttatcaaaccagactgaaaaactctcaactctttatttttctagctgagcactactggcaaaaatcacacaagcagtaacaagcactgtcagtttattgttatcagcctcaaatggacccacacaattggtcgtaattctattatttctagttctctcatttttcgcagagattacttaaggcaaccagccactcttcttacatctccagttttccacgtttcttgtcgcattcagcagatgacttggtatttcatttcacagagaaaatggaaatcttcagatgagaactcccacagtgtccttccaacaaatctactcacatctgcactcattctggtttgtttgttcttagtgtttataatggaaagagtctcgccctcaagggatgggaaaatcatatgcctctagaaaccaggtggataatataaatttgtgaagccgtagggtaagattaggctgtggcctgtagcaaattgataagagctatctaaattattcaagttgttaatactctgtatcagctggaaaaaagcctgccttgatgaacatggcctctgatctaagactaatctgcacatctaagctgtggatcccatctcctaaagcccttttcaggagtatatgcttcattcccctgagtatgcccccttttctccaacagtaattcatcttttgctgttgtttctcaccaatatttgaatattgtcaagcttgtttcattttttaaaaccttcattggccctgttttcttctctagctactatactttctccacttttactattaaactgtagaaagagttgccgactgatttggatttgacaaacttagattggagtcctcactctactacttacgagctctgagactttccaagcctcagtttttttcatctgtgaaactggggataatttttagatcccatcataagtgttaagtcgacaatgtatataaaatagccaaaaaagaggacatactgagtatttagatatatttgttttagtccctaacactctaccttctgcccctaccgctaaatactttaaaggctttttgttggttctcggtaatatttcttagtaccaatcagtagtgtttctcaatattattgactgcttcaaagcactgtcttccactgtttttcctgacacacacccctggtttacccattgtttctgcgaatactcctttgggttttttgggatccctgttttttgcccatcctttaatgtttatattccttgtatttatgttcctccaaattctgtcatggcgtttgcacagttattaagctgttaatttggctatgatctctttggaagccaaagcaaagaggaagcattataacaatattaatttatagttaatcagcatttactacgttagacatttttataagcactttacatgtattacttgatatatgcttcacaagaactctgaggtaggacaccagaatagagaggtaaactaacgtgcacagagtcttactgcaggaattcagttttagacagttgaattctggagcttgccttcctagccataacactatactctcttccaaaacagtgacatgattaatgatgtttagaaggataaagcattcttcagaagaactaaagattcttgtaggacttaggtccgaaatgatatatgtgatgatctttcgggaggtgatagcgtatcctcagctgtaatcccataataagtaccatagtaacattccattctcatggaaaacttcagcgtagaacaagaacataataccataccaaagcaaaacacactgaatgtagtttttccataattacttctctcaaatagccctttgatagaaatttggggactaaaataatcaaagttacatttagtagtttaaaaaggacaaaatcgtcttactcatctttgtatctgtagtgcctaatccgtgaccagtcacacagaaatgatccagtcagtatgtgtggagtgaatatgacctcatttagctggccagctacttaagcagtaatgacttaacacaggatgcatttaacatgccagcttctgaaggtggagttgatgattggttgcaagatttgatgagttcaaagaaggaaaataagtaggaatttagtcccgtctgcttcccctcccagcttcccatatttaatcatttcttttttagcttttatttaattcttattatatacctggcagtgtttaaagtggtggaggtccagcgttgagcaagacaaaatccccacccttaagatgtttacactctggtgagataaagagaaaactaatgtgatggtaatgatacagtgagatcagtgctctgaaggagacaagcatttagattatatgcaggtattcaggcagtgggaacaggttagaagcagcattagtgggttcagacaatttcagatctccattagggttggagggtgaagtgtgaatattaggaatggtgagaaatggggcttgtaggaagcagcaccagattgtaaagaaccttgtgaccaactttaaggtttttacttccattgctcttcccatatcagcaatgcctttcttaacatgctactgacatggggagagtagagggaagaacaatgtaaagatgtgtttcgagggtcacacgattcctttttttctgagtaacacaattggaactgcatgtttaatctcttcattaattatttttcattgtagatactgatatccatatgacttttcatctctaaactgtaaaatcctcaagaacaggaagtgtgttttattcacttctgtatcttcagcatctgatagtaactcagtaaatgtttttaaaaagtcatttaacatttgtagtcattttatgttttagcctagtaactaaaacatagttgttgtgttatttatttgaaaaacagtttaagttttaaacaactgagtttacagaccactctgtgaacttaagattacttgcctttgaatagggaaaaattactaaatttaaaaattgaggaattttttttactgtttaattacaaggacaatcacagcttaacagaagacttcaatacagaatttgggcaactatgttaagtgtttagtctgaaatgtgttattattcctttggtttatagacatatgaggaagatcgaaaaaactactctgaagttcaaattagatgtcaacgtttggccttagaattagcagacacaaaacagttaattcagcaaggtgactaccgtcaagagaactatgataaagtcaagaggtaagtagttaaaatggctgcagtagtagttctctatttttagggtgcatcaaagtcacctgagtttttaccaacaatcagttgttaattttacttttaccttattcttctttgcacaaatgcatgcagttttggcagtttgttgggtttatattgtatttttatattggttgtttttgttttatttagatgtcactgctgtcttaaaatgtaaacagagatagaaacccagtaaaatcacacgtgtgtaaatattttttcagtgttatttgatgattatttttatgtagtggaatcaatttaaatacttaacagttttccctgaagtttttttcagctgtttcttcctgacaaaagacacacactctttcaaaaaaaaaatgacactttctgaaaatatgtttcctaatatttgctacttatagcaaatacctttttttaactggaatattcttttctgttgtttgttcagtaatttaatgagctgctacttagctgtatgtccctcagtacatctcttttcattctgagcctaagtttcatcatttatgagatgttgctaatacggataactgcactatataaactaagatcaaataaatatgaaagcctttaaatatatatgtactgcatatgtaatataaatggaatgaccttatcttaattgttcactccacttgaaataattcttaaaatgtagtagtcagtgaatatttgttaaatgaatgaatgatttaaattgtgtaatttaaattacaaattgcataataccgtatgtgaatttgcaaagatttgtggatagaagattgtcatttctactcccattatgactgacacatggtatttcttatgtatatggcattatgccaaaatatgataattattggagctttaaatccatgagagctgtgctcagtgggctctggaataaagctggagttcaaaagaagcatttaaaaatgaagtagagggcatagtggcacatgcctttagtcccagctacttgggaggttgaggtgggaggactgcttaagcccaggaattcgaggctgcagtgaactatgatcatgccactgcactccagcctggtggcagagtgaaacttcatctcttaaaaatataaaataaaaaagaataaaaatgaaatagattatgatgctaagatgataccagttggtattttcatgtcccctctgccactatcagtctatagcaatgacagatacaatataaaaagagaaaactaaaaagcacagtcatcagaataatccatcggggccacggatgatcattgaaacaagatgagtcatgagttgataattactgaatttgggtgatgggagcatgggtgttcattatatcacctctatttttacatatgttttcatttactataataaaaacctaggaaagaaaaatataacgttgatcaaaaagcatgataagcatctttatggtagaaatggaatagtaaaacaagaaaggactcaaactatgaccctttttagttcactcagcagaatgaatgagtttaaaaacatcggtcataaaatataagataaactggggaagaaaaaaaagcccttttatgccccgggtaaattctcacaaatgtacaaaaggaaacaggtgtatggatgttaattgtgtcattattaaaagaaattcaaatgcttttcagtagcagaatggaaaataaattgagatttactctgcaatataattttatgtagcagttaaaatcattaaattagatctgaatgtatcacttttttttactaaaagttccttattttctggcataacataatgttcctagttttggttttcgtttgttggttttgtaatttcattgcctcagctctttgtctaagaagtcttgatctcttagtggggaatgctatttagaaatttaggatttgggtgctgtggtcatggctacattggtcattatttctaggccctttgagtaggcagagaaagtagagggagaatgaggaggaggcttaacacactatggatgagatcatactgatacttcttttttttgagacagagtctcactttgtcacccaggctggagtgcaatggcacgatctcggctcactgcaacctctgcctcccaggttcaaacaattctcctgcctcagcctcccaagtagctgggactacaggtgtgcgccaccatgcccagctaattttttttttttttttttaagtagagacatggttccatggttgaccagactggccttgaactcctgacctcaggtgatctgcccaccttggcctcccaaagtgctgagatgacaggtgtgagcctctgcacccagcccacgttgatacttctaattccaattcaacactgcaacagccacttggatgaggtgccaactggctaaatatagcaaacttgaatatcacaataaatattggcaataatgaattacagtccattgaatagaataagagtttataagtgcaggctaataataaatacagaaagaggatcttaaaatttttttaatacatcatctttaccatttttaagtgtacagttcagtggtaataaatatatcctttttgggaaagaggatctttatggttgaaatccaagcaataaatgtatatgcatgtaagaatgaccattttgtagccgcataataatattgattcagaatcatcattggaatataaaaccatgaagtataagtatgttagggaataggatatttacacaaagcatctcttcacaattacttactaattttaaagggcaaaaggatacctttatagttaaactctggcagatgctaccttaacctggtgatcaaagttactatcaccaataatgggataaactgacgtcacatacctcagtacatcttcacataacatactgagaatgcgtttctgtatcagagaatcatttctgagaatcatttctgtagtattcctgcccaagtgcctaacctgaatctaataatgaagaaacttcagacaagtgaaaattgaggagcattctatgatgcagctagcctctgctctataaaaagtcataaaacacaaggaaaactaagaaatcttcaaggttaaaggagactaaaaccccatgacatctagatgcatggtaatagattataatatgatgataatagatccttggattaccattatggtaatagagccttggctcagggaaaaaaaaattcacaaagggtgttttgggagacagttgacaaaatttgaaaatggattgtatgttagataatattatattagggctaagtctcctgaatatgataattatactgtgattatataagagactatctttaatcttagtaaattcacactaattatttagggataaagggacctaatgtctcagttgaggaaacaaatgcacatgtatgagtatgtgtgtgtaggtgtgtatacacatatagatacatgacccttgaccaacatggggtccacttatattcaggtttttatcaacctaacaccaatcgaaaatacaattttcacgggatgtgaaacctgagtatacagaggactgactgtttggtgggatctgcaacaactgcaggacttcagcatgtacagatttgcatattcaggttgtgggggtgggtctggaacccattctccacatataccgttaagacacctgcatatattcacatatattaacaagagagagggtttgaataaatatgacaaagtaatatttatttaatattacaaaacaaatacaacagtgttaatgattggtaagtaaaagcattaaaaagaaccaagctggttacagcgtgtcatgtctgtaatcctagtgctttcagaagcacaggcaggaggatcacttgagcccaggactttaagactagccagggcaatatagcaagaccgtctttacaaaaaaaaaaaaaaaattaaattaggcacatggtggcatgcacctgtagtcctaactctctggcaggctgaggctggaggatcacttgagtgcagtagttcaagtccagtctgggtgacatagcaagacccccatctcataaaaaaaaaaaaaaatttaaaaaaaagattttttaaaaaattgcatgtgaaagcacaaaataaaatttaaaaatttttttaattaaaaataatctaaacattctaaaaataaaaaagcacaaaatacgtatagtaatatgtatcagaatagtaatactgatagtcatctttacttattgggtttgtaggtgattgttattttgtgctttgctcagtttttcttcaataaacataatattttgttaactagaagaaaaaaggctttctaaacgtttttgaaaaactgatgcaaaggaaaacaattcctaacagccctctctgtggaaataccaggtgggtcagtgaaataaagtgcaaaggcactgcttctgactgcagggaagtagttaagagttagtaaatctgtttctctgctcattttaaaaaatgtgtgttgtaggttttagtccaattcttggtataacttttttggggaacttgtcttaaaatggaaattaaaatctgggtaatcataaacaatttgtgaatgaaatagtcacaagaatgcctgcctacgtatctactatgcaatctaaatgataagttgtatttttttttttaccttaactgaactgaaagcctagagccatgtatacattctttaaaagttttaacctcaagataagattgaagatgactaatgaaaaaataccaaatgtatgttagtaagttttattatttactgtactggcttatgtagtttgtatattccttaaaggtaataaattgatatgtatgtatttgaacaaggtctgaaacagagtcccttctaaatctgaaaagtaggtactttatagttcatggaattacactgaagccccattgctagtgtctctattcagcgtcctaatacatagtcaacccttttaaagtgtacgctgtacaaggggatgtaaaatttacatgtctctttgaattttattttaacagtgaacgtgatgcacttgaacaggaagtaattgagcttaggagaaaacatgaaatacttgaagcctctcacatgattcaaacaaaagaacgaagtgaattatcaaaagaggtaagcttataattagagtcacttatattatatagcatagtattagtgaaaaaaatagcccagagtagatttgaaggagagacattttttttgttatgtagttcctcccaaaaagataaattttttttttttttttttttttttgagacaggagtctttccctgttgaccaggctatagtgcagtggtgcgatcttggctcactgcaacttccgcctcccaggttcaaacgattctcctgcctcagcctcctgaatagctgggattacaggcgtgtgccaccatgccctactaatttttacatttttagtagaaacagggtttcaccatgttggccaggctggtcgcaaactcctgacctcaaatgatccacctgccttggcctcccaaagtgctgggattacaggtgtgagcaaccatgcccagccccaaaaagagacttttagtagctatttttagattttaaaaaagttgcatgctaagaattagccctttttaaaaggaaaattttcatgtggtgaatgaaaacatgaaggaaagaaattaatacagtcaagcttgaaaagtaagatggcatcactgtggatactttttgtttctacatgtatgtaggtagtcaccttagagcaaactgttactttactgcaaaaggataaagaatatcttaatcgccaaaacatggagcttagtgttcgctgtgctcatgaagaggatcgccttgaaagacttcaagctcaactggaagaaagcaaaaaggctagagaagagatgtatgaaaaatatgtagcatccaggcaagatttgcattatttcccacgtaaatagataccaattaacagattttctttgagggaactcttggctttggggaagatttagtgatttttttaaggtctattctatatgataatactaagataataccttattttattttattttattttattttattttattttttgattttgacatttctgctttctgtttgcatacatttaagtggtgtaattttcccatgtgcctttattttaaaactttgtcatttggttttaggtacgtttcttgaatacagtaatgagctgatgtatccattaggataatttgggttgcaaataatgcagaagggtttaaaaaatgaagtgagatatgtttgcttttttttttttttttttataaattatactttacgttctggggtacatgtgcagaatatgcagttttgttacataggtatacacatgccatggtggtttgctgcacccatcaacccgtcacctacattagatatttctcctaatgttatccctcccctagccccccactccccgacaggcgccggtgtgtgatgttcccctccctgtgtccacgtgttctcattgttcaactcccgcttatgagtgagaacatacggtgtttggttttctgttcttgtgatagtttgctgagaatgatggtttccagcttcatccatgtccctgcaaaggacatgaactcatcctttttaatggctgcatagcatatatattccatggtacatatgtgccacattttctctatccagtctgttattgaaggacatttgggtcggttccaagtctttgctattgtgaacagtgctgcagtaaacatacgtgtgcatgtgtcttttatgttagaatgatttataatcctttggatatatacccagtaatgggattgctgggtcaaatggtatttctagttctagatccttgaggaattgccacactgtcttccacaatggttgaactaatttacactcccaccaacactgtaaaagcattcctatttctccacatcctctccagcttgttgtttcctgactttttaatgattgccagtctaactggcgtgagatggtatctcattgtggttttgatttgcatttctttaatgaccagtgatgatgagcatttgttcatatatctgttggctgcataaatgtcttcttttgagaagtgtctatatcctttgcccactttttgatggggttgtttggttttttcttgtaaatttgtttaagttctttgtagattctggatattagccctttgtcagatggatagattgcaaaaattttctcctgttctggagtttgcctatccaccctaatgatagtttcttttgctgtgcagaagctctttagtttaattagattccatttgtcaattttggcttttgctgccattgcttttggtgttttagacatgaagtctttgcccatgcctacatcctgaatgatattgcccaggttttcttgtaggatttttatgatcctaggtcttacatttaagtctttgattcatcttgagttgatttttgtataaggtataaggaaggggtccagtttcagttttctgcatatggctacctagttttccaaacaacatttattaaatagggaatcttttccccattgcttgtttgtgtcaggtttgtcaaagatcagatggttgtagatgtgtggtgttatttctgaggcctctgttctgttccattggtctatgtatctgttttggtaccagtactgtgctgtttttattactgtagccttgtagtatagtttgaagtcaggtagcatgatgcctccagctttcttcttcttgcccagaattgtcttggctatgtgggctcttttttggttccatatgaagtttaaagtagttttttccaattccgtgaagaaggtcagtggtagcttgatgggggtagcattgaatgtataaattactttgggcagtatggccattttcacgatattgaatcttcctatccgtgagcatggaatgtttttccatttgtttatgtcctcgcttatttctttgagcagtggtttgtagttctccttgaagaggtccttcacatcccttgtaagttatattcctagatattttattctcttagtagcagttgtgaatgggagttcactcatgatttggctctttgtctgtcattggtgtgcaggaatgcttgtgatttttgcacatcaattttgtatcctgagactttgctgaagttgcttatcagcttaaggagattttgggctgagacaatggggttttctaaatatacaatcatgtcatcaacgaactgagacaatttgactttctctcttcctagttgaatactctttatttctttctctttcctgattgccctggccagaacttccaataccatgttgaataggaggggtgagagagggcatccttgtcttgtgccagttttcaaagggaacgcttccagtttttgcctgtttagtatgatattggctgtgggtttgtcataactagctcttattattttgagatacgttccatcaatacccagtttattgagagtttttagcatgaaggggtgttgaattttgtcaaaggccttttcttcatctattgagataatcgtggtttttgtgattggttctgtttatgtgatggattacgtttattgatttgtatgtgttgaaccagccttgcctccctggtatgaagccaacttgatcatggtggataagctttttcatgtgctgctggatttggtttgccagtattttattgaggatttttacattgatgttcatcagggatattggcctgaaattttgtttttttgttgtgtgtctgccaggttttggtattaggatgatgctggcctcataaaatgagttagggaggacctctttttctgttgtttggaatagtttcagaaggaatggtaccagctcctctttgtacctctggtagaattcagctgggaatccatctcatcctggatttttttttggttggtaggctattactgcctcaatttcagaacttgttattggtttattcagggattcgacttcttcctggtttagacttgggagggtgtatgtccaggaatttatccatttcttttagattttctagcttatttgcatagaggtgtttatagtattctctgatggtagtttttatttctgtgggatcgttggtgagctcccctttatcattttttattgtgtctgtttggttcttcctctcttctttattagtctggctagcagtctatctattttgttgatctttacaaaaaaaaacagctcctggattcattgattttttgaagggttttttgtgtttctgtctccttcagttctgctctgatcttaattatttcttgtcttctgctagattttgaatttgtttgctgttgcttctctagttcttttaattttgatgttagggtgtcagttttagatctttcctgacttctcttgtgggcatttagtgctataaatttccctctacacactgctttaaatgtggcccagagattctggtatgttgtgtcttcattctcattggtttcaaagaacatctttatttctgccttcatttcgttgtttacccagtagtcattcaggagcaggttgttcattttccatgtagttgtacgcttctgagtgagtttattaatcctgagttctagtttgattgcactgtgttctgagagacagtttgttatgatttctgttcttttgcatttgctgaggggtgttttacttcctattatgtggtcagttttagagtgagtgtgatgaggtgctgttgatttgggtggagagttctgtaatgtctattaggtctgcttggtccagatctgagttcaagtcctgaatatccttgttaattttctgtctcattgatctatctaatattgacagcggggtgttaaagtttcccaccattattgtatgagagtctaagtctgtttgtaggtctctaagaacttcctttatgaatctgggtgttcctgtaatgggtgcatatatatttaggatagttagctcttcctgccgcattgatccctttactattatgtaatgccctttattctcctttgatctttgttggtttaaagtctgttttatcagagattagaattgcaattccggccttttttttttttttttttttttttttttttgctttccatttggttggtaaatattcctccatccctttattttgagcctatatgtgtctttgcaaatgagatgtgtctcctgaatacagcacactcatgggtcttgactcttcatccgatttgccagtctgtcttttaattggggcatttagcctgtttacatttaaggttaatattgttatgtgtgaatttgatccggtcattatgatgctagctggttgtattgcccgttagttgatgcagtttcttcatagtgtcgatggtctttacaatttggttatgtttttgcagtggctggtaccagttgttccttcccatgtttagtgcttccttcaggagctcttttagggcaggcctgttggtgacaaaatctctcaggatttgcttgtctgtaaaggattttatttctcctttgcttacaaagcttagtttggctggatatgaaattctgggttgaaaattcttttctttaagaatgttgaatattggcccccactctttctgccttgtagggtttctgcagagagatccgctgttagtctgatgggcgtccttccctttgtgcataacctgacctttttctctggctgcccttaagattttttccttcatttcaaccttggcgaatctgacaattatgtgtgttagtgttgctcttctcaacaagtatctttgtcgtgttctctgtatttcctagatttgaatgttggcctgtcttgctaggttggggaagttctcctggataatatcctgaagtgttttccaacttggttccattctccccatcactttcaggtacaccaatcaaacgtatttttgtcttttcacgtagtcccgtatttcttggaggctttattcattcctttttattcttttgtctctaatcttgtcttctctccttatttcattaagttgatcttcagtcattgttatcttttcttccacttgatcgatttggcttttgaaacttgtgtatgcttcttgaagttctcatgctgtgtttttcagctccatcaggttatttatattcttctctacactggttattctagttagcaatttgtctaaccttttttcaaggttcttagcttccttgcattgggttagaacatgctcctttagcttggaggagtttgttattacccaccttctgaagcctacttctgtcaattcatgaaactcattcaccgtccagttttgttctcttgttggcgaggagttgtgatcctttggaggaaaagaggcgttctgagttttggaactttcagcctttttgcactggtgtctcctcatctttgtggatttatctacctttggtctttgatgttggtgaccttcagatggggtctttgagtggacgtgctattcctttgtgtttgttaattttccatctgacaggcccctttgctgctggcctgctggagtttgctggaggtcccctcccgaccctgtttgcctggatatcaccagcggaggctgcagaacagcaaagattgctgcctgatctttgctctggaagcttcttcccagaggggcacctgccagatgccaaccagagctctcctgtatgaggtgtctgtcggtccctactgggaggtgtctcccagtcaggatacacgggggtcagggacccacttgaggaggcagtctgacccttagcagagttcaaacgctgtgctgggagacccactgctctcttcagagctgttaggcagggacgtttaagtctgctgaagctgcacccacaggcacccctttccccaggtgctctgtcccagggagataggagttttatctatcaattttattttcttacacaatattactttctagttggtttttaaaaagacactgtggtttttttcagcaatatcaaaagcctatttcttttagatagatagatatatgctatgacagttttttcatttgtggcataattttttaaattcctatgactaatatctctatagaagtatttttttaaagaaagtatgaaagtatctctatagaagtatattttggaagaaaatctcagtatgctaacgatttcctgtgtgaaatgtaaaagaattatgaggagatggtatcgcattgtgttttaacttatatgcccttcaatcagactccctatgttttggtcctgccttctttcttctactggatgtgtagaagttactgaagtaccttaatatcaatcgcttttataacccttgaattatatcgacataccaaaacaaacatgctgggtgcagtggctcacacctgtaatcccagcattttgggaggccaaggcaggaggattgcttgaggccagaagtttgagaccagcctgggcaacatcgaaaaccctgtctctataaaaaaaagtttttaaattagcaaggcacaatgtcaagcacatgtagtcctgcctactcaggaggctggggcaggaagatggcttgagcccaggagttcggggttacgtgattgtgccactgtacttcatcctgggtgagagagcaaggcattatctctttaagaaaaaaagaaaaaaatactaaaacaaaacaaattttaccttaaaggtaaaggtaaaggtaaattttactcttaaagagttcacacattcataatttttcctagcctgtagtagtttttcataccctatataatacttcgacttggctaaaagatcacggtgtggctgtggttgtcatgcttggaagcaaaggattcatagactccgagtcatttcatttttatatttttgttaatattattcatctctcaacatcatcctaccacattattatttttaaatgaaggacattctcaattttgaagcctcaaccatatgcattaaaactactagaaaagtgttttggaagatgaataattatcccacatgaattactaagattttatatagtaattaagtcttttggaaaataatgtttaacaggttgaaatcttagatcatactagttaggaacagtatttttaggaattataaaactttatactattaatagttaagtttttcaggtaacacagtttatagagcatacttgataaaaggtattaaaatcttacgtacagtgcaaaagcctatttgtttcaaaagaaaatttatggttgttccttttcactccttgcagagaccattataaaacagaatatgaaaataaactacatgatgaactagaacaaatcagattgaaaaccaaccaagaaattgatcaacttcgaaatgcctctagggaaatgtatgaacgagaaaacaggtaaaaaaaaaaaaatgcttgtatggtattttatttatctttggaggttttagaagctttattgaaattaaatgctatttattatataatgtcttttttaatacattagagaaaagttgtcataaatcgaaatctaagtataatgagaacatgaaagttctaaagtcttagaacaagatttactagactttaacctttttgctctgttattcctgttatgtctttttttttaccctagtgacttctctttttgcatttgcttcagttcagattgaggacagataaaaagtaaagagtgctgagatatcagttcttcctgtattatagcaacgatttctcctggaaacttgttaaaactagaatagtaatttcaaatatacatatgcctcatttagctgctggctccgaaagatgtcgtattaggtaatcctgaagaaatatcatttttggctgggcgtggtggctcacgcctgtaatcccagcactttgggaggccgaggtgggcagatcacgaggtcaggagatcgagactatcctggctaacatggtgaaaccccatctctactaaaaatacaaaaaattagccaggcatggtggcgggcgcctgtaatcccagctactcgggaggctgaggcaggagaatggcatgaaccggggacacagagcttgcagtgagccgagatcgcaccactacactccagccttggcgaaagtgcgagacaccatctcaaaaaaaaaaaagaaaaaagaaatatcatttttattcatgcagttacttttagatcagtaaatattaggctcacctagttagtgattggcagaattcagggaaaataaatactatttatttcaatggcagatatttttataccgttattatagtcagtgtggtttttgaaagtttatattttaatgagaaaattattttgaaattgacttgtgatactagtttatcagcactgatttgcttatatgatattttgattgttgtcagcaaggctttaaatcagacttaatctataatagcattgtaccatgtcatttctactaggaatatagtagcagaaaatttggtatgtccacccctcaattccaggaaaaaaaagctgctgtattatagttgcttatttataagttgctgtatttataagttagccactgctataaaaactatatatgtagaattatcctttggtagtaaattaacaaagatatttttaaattactgttaaattgttatttaatatagcaggttggtagagatttttatgctaatgcctctgaggggtatgattttattctcaggtttctttgttcttgggtaaaaatatttgtggtaataagagagtagatatacaatttatgatagaacttttttaggatttttgctaaatatgacttagtagaaagtcataaaatgactctcatgaaaatcagattattattttcctcataaatttggcttgcatagatctttatctacctgtttgatcttttttgaaagtctgcattagaagtatacgccaaaggaaattaatatgaacttcaaacactgaacacaaaagaaatcattcatttgtgtattcaacagatactttgtgattatactcttctgcctattttttcttgttcttctcttatttgagctttaaaataattatgtcatatttataatctagtattatattttcaatgaaaatggcaaagaatttcaaaatataaaaattctaagtgatcattcagtactatcttagcagtagacaaactaaaaatatgctttaggcaccagcaaatacgtgtgcatgccagaagaaattatacgtattcttaaaaaatgttttgacatattaatttttaaaataacattttttatcttgggaaaaataaaaacacctctgcatttgtttacacttagtttatattttaatatttgagtatcgaattactagtaggagcaccataatcttttatgtgaataaggcttttgaagtcctaagctagccttcatatgttgaatcctgagaaaattttgttccaagtagctcaaagaaatattggaccactctttaaatagcattattttttattttaattactatgttatgattgttctcttttttgaccatatatgtttgcatgtatgtgtataaaataacagatgttaagagaaaatttcctagttttcattaaataaataattataaagaagtagaataatgcagcactacagaaatgtccttgagactctttctgcttaactcctgtcttccataactgctattctgttatgctaataacttccttgcttctccttagacttttattatctatgtttccagtatataaacatctctgcacaatatagtttagtttttcatattatattagtatcatataaatggaattatgctgtatacacatatatttttgtggcttcttcacataaccttatgattttaagattcatttgcttttgcacttagttgtcccttcatgttcattacaaaagtataacagttttatgaatgtacatgcttagggcagcagagttattaagagattggagagagaattccaaagacattctctatctttggcaaaattttacttcgtcccagccctacattagaaaggaggatcctgtaccttgtgattacttgctctgaaagttcaaaatgcagactaaaagaagaggtatacacctattaaatgctaagctttatgttggaaagttttacatttgcaccctcatgtaattttcagagcaataaattaatgaatttagcaaatatttattgaaatgtaccatttgccagctaaatgctagacatcataggtagtggtgacctttgtcttcacaaagctggtagtctaatggagggtaaagacaaatagagaaacaattatcataagtatgatgatgatggacaaaatgataggataaaagatgagaccacctgtgtatctaacctagccttgggaggaattggggaagacttcataaatgaagaactgccccttttgactaaaactactattaaaagtaaaacttcagacacattaaatttaaagtttaattgagcaatgaacaattcgcaaatcaggcagcttccagaatcacagcagattcagagagactccaggggtccctcatggtcagaacaaatttatagacaaaaaaagtaaagtggcatacagaaatcagaagtgagatacagaaacagctggatttgttataggttggtgtttaacttatttgaacactcagcagtgtatgaatggttgaagtatggctgctggggttggcccagactcagctgttgttacaggcacatacccccaagttaggttttctatcttgtctgcctattaagttaggttgcagtttgtcaatacggactcaaatatagaagtacggagtccttcttaaggccatatttagtttgcattaacactatgaactaaggaaggaaaggaaattgggggaatgaatatatagcatatataaaagcctgaaagtaggacaaaaaggacaaaatgaagctttttgaacaaactaattcggtatggctgaaggatagactgagaggcagggagttaaaagagatgaaacagaagcaggaaatgggcccaaagaatgcatttggaccattatgtaagacctgtggggaacaattgaaagattttaagaagaggcatgaattgatctgattttatatcaaaagatcactgtaatgtagagaatagattggaatggcataagcctgttagacagagagggtctacttttagaggttatttccattatccagatgagaggtgataatggaactggattagtatcagtaaagatgagagaaatgggccaggttggaaaagtatttaggagacagagccgacaggactcagtgactagattggattggttggatgagaactcgttaaggatgtcagcaaggtttctgaattaaacagctgcataaatagtgatatagtttttaaaacattagaaaatacaaagctttaataggaaaacatgataaatttagttgtttcacttgaagtgtctgtggcatctacaaataaaagagttgactgtagaagaatctgaacctcaagagaaagatctgggaattagagaggcctgtggtatagatagtattattactattttacaaataagtactgttggttctgtggttcaattctgttgtggatttaataggcttttgttgactgatataataactttaaaatatatgggaacttcctatggttattcctaagcaatccacatagccatataaactttggtatgtaatcatcttgaaaatttcctcattttttaggtttttgctgttttttaaaaaaaaatctttaaagtttatcccattgtaacataaatgtggttggtaggggtaggttggtaggtaaggctgtgtggggaaacaaccaacagagccgtttctggaagtaggaaaactgaaagcagatgtccttgtctccttgtctccagtgttcttctgaccccctatccacatcaaaatggacactacctaaccaggggattcctgggattggggctgccctgtggatgccccagccagccacagggctcagaattgattggatgtatactgaggctagagtggacaattgccaccaggtggtgccaaattgcagcctgagcccagatgaatttgaatttcacaggacacctaactagctaggtgtacaggcttgcctttatcattttaatgtcacagtaatccaactctatgttttatgtaatctttggggatcatagtttcttcattatggcagatttaactgtagttagagcttgtatcatactaatcttccacacagtaaaaagtaaattataaattacttcttttgaaatcttagaacttaaaatggctaaagaaagaattttaatatttcctgttataaaacatgaaattcataataagtttacacatttaaggttgtgtgtgtgtgtttaggtaaattaatcttttgctttggcctgagatgtgtaattatgttaattactagtattttatcaaagtgtgctgttacaataagttgaaatggatgaagtacttacacttgcatatttatatttggtctccttatctctcctccaataaactttttttttttttttttttgacggagtcttgctctgtcacccagactggagtgcagtggcgtgatctcagctcactgcaacctccacctcccgagtccaagcgattctcctgtctcagccttctgagtagctgggattacaggttcgcgccaccacgcccggctaattttcatatttttagtacggatggggtttcaccatctgttggccaggctgttctcaaactcctgacctcaggtagtctgcctgcctcggcctcccaaagtgctgggattacaggcgtgagccaccatgcccggccccaataaacattttctaaagaaactgaaatgatgattaatgaaatatattttgcctttaatttgttgtctatacattggaggatattaaaaggatactttttcttttctcttctttaatatggaaaaggcacatggaacttactctgtccaatcttggtatctgacctgcagtcattccactagttcttgaagttaaagtattgagagaaaagaaagagagtagaagatataaagacttaagaaaagggcaattataaatgaagagagaacttggatatttagatacatcaaacatactgtagttgaaattataatatgtatgtatgctttggtccagtttgtgaattaagcttttttgtcttttctgtattttctagttacttaaaattccactttggagctgtaggaaatgagtgaaaggtactacagtgctgagatgtattatataaataacttcttgcttagtaggtattatgtgacagaaatgttatggaccctcttatgcatttggaaataagacattctgtgagtgggagtatattatgaaagagatttggatcaaaagactgaacttgatcctggttctaccacttactagctcagcagataagtcacttaatatccctgaagtttaatttcttcttttataaaatgggctaataggctaggtgtggtggctaacacctgtaataccaacactttgggagactgaggcagatggattgcttaagtctaggagttcgagaccagcctgggcaacatggcagaaccccgtctctagtgaaaatacaaaaaaaattagccaggcgtggtggcacaggcctgtagtcctattaaggaggctgaggtgggaggatcacctgagcctgggaggtcaaggctgcactgagccaagatcatgccatttgcactccaccctgggcaaatggagtgagaccctgtctcaaaaaataataataactaactaataatactttttagggtggcccgtgaggtctaaatgaaataatatatgcaaaaagtacattataaattatagatgtagatgagttattttggtaccttgtgcctatgtagaatacttgaagaaaatattttcatctgttatgttgacagtttaaggaaaatcaccattatataaaagtcatctgataatattatgggattatttatcattagaagatactaatacaaaatatatattcttaagtgtttatctccatagcatttaaccagttttcttaaatgacgtaatacagacgtagagggtctacatgccattcttttctgtctaaatttctgcataagatggctagcttatgtttcctaattaggttatgagataataaggtaaagggagataaattcagctgattaagtttttccataaagtaaaactacctttatttaaggtggtcttgttaactgtaaacacagagctattctgagtggtgctctacaaaagataatagaggtattcatgatgctcttgatgcagtacagaatctggaaattgaaatagctttacaattgtttgaaagggggtaggcagtagagaaaaagagattgaaaagatgcttttaagtgcaacaattagtattgctttagtgattttattttcctgccgaatcaataaaaaccatcttgaccacaatttatcttccaaaagtactcaagaagaaactttaatgatataaacttgaaatttatgtagaatcttagagtgatattaaacaactttgaatcttgaatctatttacaaaggttagttgagtatatgtattgtattacaatggtgaatttaactagtgtacagaggttccagtcatcattttaaaagtgtatgtcctcattagtgcttaagcaaacaaacaaacttcttttgttcatatcttaccaggtatctgtataatgttttaagttcttccatggaaaaatttaatagtaattactttgtcttttcagttagataattcttgaagtatatggctctgcagataactctctcagcatcttctcaaatattttaaattaatttttattatcagttatcttttattgttaactatattctttactccttagatgtttacaacgtgtgttcactgcttcattaataatacttaaaaatttcaagctctgtagggtgttccagatatgaagcaaggtaagttcaggttgcataggaatttagatttacctttgtggtgtaattcgttgtgtgttaggagaggctggtaaagtaagattgggccagattttaaaggttctgttgtcagtggggaatttccagaggttttatagtaggaaagaaacatgacttactcattttttataactacggttgcaatgcggggtggattatagttgaagaaagcctagaagcagggagatcacgtaggaggctgttgcacagcttaggtgatgaaaataagtagaaagagaaaatgatggatgaatttaaagaatacgtaggagaattggcaagatctggtgattgacaggaagtgaacctcaggaacgaccccaacttttctacctcagtagtgtcagagtgattggtgataaggcatggccattagctccagaatgcagactttttgagacagagttttgctcttgtcgtccaggctggagtgcagtggcacagtcttggctcactgcaacctctgcctcccgggtttaagtgattatcctgcctcagcctcccaggtagctgggattataggcatgtgccactatgcccagctaatttttgtacttttagtagagacggggtttcgccatgttggtcaggctggtctggaactcctgacctcaggtgatctacccacctcggcctcccaaagtgctggggttacaggcatgagccaccgcgcctggcctaatttctgatcttttacagatgtggcagccctgaccaagctcaaaagtgcttatctgagatcacacagctttttactagagatgtttctctgctgtgccccagatttcactccacttagccctcagattagtagaaggaaccctaagctgctaaagcccctccaacagtcttctctgttttccctaggatgccattaaaaatagtatcactttcattttatacaataaaaactttgaggaaacattgctgtaattatcaacctttaaattaacatcacgttttaatttacattttcatatttaggtagcatagtaagcatagttactatttattgagtacctattatgcgtcaagcattgtactcaacactttacatacgttgtagaaaaagaaacacattttatgaagtttaggtattaataaccgtattttacaagtaaggtaattgagacatcaactgtgacttgcctgtgattattataaacatttgttggtaaaaactagatacatctgactctgcaatgcagtgcacactcccatttaactggtcagtgctatgtaaactgatcaaagatttcctatcaaaactacaattttgaagttaatttacttaaaatagaaattctgtctttttttattattatactttaggttctgggatacatgtgcagaacgtgcaggtttgttacataggtatacacatgccatggtggtttgctgcacccatcaacccgtcatctacattaggtatttctcctaatgctctccgtcccctagcccttcaccctaacaggccccagtgtatgatgtttccctccctgtttccatgtgttctcattgttcaactcccacttatgagtgagaacattcagtgtttcggttttctgttcctgtgttagtttgctgagaatgatggagaaactctgtcttttaagagaatttgcaaacgacattccatgcttgagggctgagtatggatcattagagctttataaaagcatctgtaattttatttacacacacacacacacacacacacacacacacacacacacacacacacacacacacacacacacacacacacggatgaagtcttactgttttgcccaggctgggtcttgaactcctgagctcaagtgatcctccccgccgacctcagcctcccaaagtgctaggattacaggtgtgagccaccattcccagacaagcatttataatttttgaagttagcaaagaggactttttcttttcttttttattttattttattttattttaagttctatgatacaaatgcagaacatgtaggtttgttgcataggtatacatgtgccatggtggtttgctgcacctatcaacgggtccatctaggttttaagccccacatgcattagctgtttgtcctaatgctctccctccccttgccccccacccccaagttggctccagtgtgtgttgttcccctccctgtttccgtgtgttctcattgttcagctcccacttatgagtgagaatatgtggtgtttggttttctgttcctgtgtttgctgaggatgatggtttctagcttcgtatccatgtccctgcaaaggacatgatctcattcctttttatggctgtgtagtattccatggtgtatatgtaccacattttctttatccagtctatcattgatgggcatttgggttggttccatgcctttgctactataaatagtgctgcaataaatatatgtgtccatgtgtctttttatagtagagtgatttatattccttttatagtagagtgatttatagtccttttggtatatacctagtaatgggattgctgggtcaaatgttatttcttcttgtagatccttgaggaatcgctacactgtcttccacaactgttgaagtaatttacactcccactaacagtgtagaagcattcctgcttctcaccagcatctgttgtttcttggcttttaataattgccattttgactggcatgagatggtatcattgtggttttgatttgcatttctctaattatcagtgatgatgagctttttttcatgtttcttggccacataaatgtcttcttttgagaagtgtgtgttcatatccactatcaagcctttggcacccccatactactccaacaaagatgtttttataccaaagcccctaagaccttcatgttgcccaaatccagtagtcattttctcagttcttaccatgcttcaccttactagcagtatgtaacacagttgatcactccctactcctgggaacacaatctttagcttccatagtgtcacacactattaaatttttctcttcctcattagctgcacctactcattctctttgttggttcctcctcatcttcttgacaacttttgcagctgcctccatggcatttccacttggttatctattaataatatttatcctaatgtgttcagaagcaaatttctgttccattctacctcccaattctgctccaccttcagtcttacccagttcgattaaagacaactctattcttccacttgcccagaccaaaaacctgaagtcatcttttttcacattccatattctattcattagcaaatccttttggatttatgatctctatctcacgtatattaccttgcttcaagtcaccattatctcttgcctaaaaattactgcagtagcctcttaagtggtccccagctttcttcctcgccctctccagtctcttagcacagttcttgttaaatgttaagttggatcactcctctactcaaataaaaaggctccccatcattaaacttagtaaaactttaaatgattacagtggcctatgatcctacctgatcagtattcagttatcctatcctcatttaggattttcttctggtcactcgcatagtcatgctggcctcctgttcttttacctgtaggtgtgctcctacctcaggtcctttgtattcagtttccactgcataaccatctactcctgatgatacacctgttcttgtggtcttttctgactttgttctatgttgtctttgtttttaatctatcaacatactacatatttatttactttgggtttttttcctactagaatgtgatctccatgagagtaggagttttcatgtatcgttcagtcctggactcccaggtaccagtgcctggtacgcagtaaacactcaatatacgtaatatttattgaatgaaagaatgaattggtactactttttagaaattaggtggctgttggtttagatgaaaacctactcaaaggtttataatggatttgatcaggactgagtgtcgtttgaagatatatagtagttactcagttaaccatctaccagattcattctgtttcattttgatatgttaccttttatcctgtcagctactttgtaaatcttaacacattaatggatttaagcaaatattttgcattttggtacttcaattttttataatttttcaaccataatttgggttcaatgtttatctactttgtgcttaagttttcatatctagaaacaaacaaaaatctgcttgagcaccaattgtcttcagtccattttatgctgctataacaggatacctgagactggataatttataatgaacagaagtttattggctcacaggtctggaggctgggaagtccaatatctacgtactggcatctggcaagagccttctcactacattatcatatggcataaggcaagaaggtaggagacagagcaagggggagccaaactcacccttttataatggcaccattcccactctcatggcctaatcaccattatcaggtcccacttcttaatactgttagaatggaagttaaatttcaacatgagttttggaggacaaaaacttttaaaccaaggcaccaactataataaaaggttaggaaagtgtagcattttcagtcaacaatgatctcaaaaagtttctactcttaaaatgtatagcttctcccaagaaatttattaaataagatttccactttgcttatttcgtttttatgtcctgctcattaacttttcagtcatctatgataaaggtaaaactacagtcattgaatagaaacaagataatctacatgcaacccttctattttatgccatcttaaaaacaaaggcatcagatatggaaatgagcagttttatgttgtgtccaggaagacgctggaggtagagatgataaattcaaacacttttcctataaataagcctgtcatataaaacagcctattttaatcctttgttgttctaactagaaaaatatatttacttctattagccaaaaatatttttacatgaagacagagggaagagtttggattgcttagttgcgcctgctgagctcttctgatagccatggttatttttgtttgtttttgtttttgttttttcactatttatgcttggtaaattttaagttctgaggcattagggatgtttattcaggctcagacgtattccttgcattgccaaactctgatttgatactgtttgaatttcgaagggtcctaaagtttttctcattcttctgacatttttcttaccacttttcagatataaatgtagattcagcctattggtactgtgaaatttatcatctagtagtaggcaaatacattctaccctgtacgttagtctattgttacgaatgttttataatgaggttttcaagtttcagttgtgagctactgttgaataaacttctgtgtattaaattatctgctgcacaaatggcactatattgcatatgaattatgtctattttgttataatattaaaacccttttatttaagtaaatgattaagaacttaactcttggccgggcgcggtggctcacgcctgtagtcccagcactttgggaggccgaggcgggcggatcacgaggtcaggagatcgagaccacagtgaaaccccgtctctactaaaaatacaaaaaattagccggcatggtggcgggtgcctgtagtcccagctactcaggaggctgagccaggagaatggcatgaacccgggaagcggagcttgcagtgagctgagatcgcgccactgcactccagcttgggtgacagagtgagactccatctcaaaaaaaaaaaaaaagaacttaactctttaagtttctcatttgaatgttataatttaagtaaccatacctcttggtttgtctaagaaagtagtggtttgtgtgtgtttctttggcataatttttaatagcaccctcttttattctaaaaagtgcaccaggttgaaaaatacattatttgaatactctagttataaaagtaggatactcacttaccctttgcatttcacatagtatttatttaagatttattttcttcaatctttcctctcaatatgtctccatcccacaacatagggtgaatgggaaaaatacatatgtgtatatgggagatacatagaattgctaggaaacaacatgaaagaatcatgaaaaacacagtgttggaatctaacgttaactttatacaagtattttaaggatgacatattcagatttttgtattttaaaacacttatctttctttgttataattacatttgattatacgcttggtttggacttctaaaacttgagcttcgttagcttgtacatgctacggatagcttctatcaatttttgaagtttctcttttgaagaacatttgaattcctgtaatttgttttgtaattgtatttctgttatattttctaatgcatttaacatttgaaatggattacttattatatgaaagttattgtcttatctgtggaaggaatacatctagcattttatcaaacagtttatttttgaaagagcatgttatatactgtgggccataaaagctaatgtatagtatattcacaattctttcaaggcttattttgatttcccatctattggtgccttgaggtggtcatgtaatataaatctcataatgtcagaatttctcaaggagaaaacatctgtgaagcaaaggaaattttaagaggcagcatagtatgattcacagcacagactctggagccaaattgtttgggtgcacatttggactctgtagcatacttcctgtgtgactttaagctaatacttaacctctttgtgttttagtcttatcatttgtaaaatggaggtaatgatacaactgctttgtgggattgttgtgacaattaaatgagttgtgatatgtaaagtgcttagaacggcttctggcacatggtaaacagtatgctattgctatttattgtcagtagaagaatacattgagtttttctctctcagacttcatatgaaacctgtgaattggtaatattaaataaagtatctatttcttataaggaattatgctgcgttttgctaaagaatgcaggttgtggactggatatggaaggtgtggtacttgataaggagattgggtttacacagaaatgttacccacaaacacctgtgagaggacctcttggtagaagccttagcttcttctggtccattccccagttcatttctgttttctctttctgaattgctttacctatttgtccttcaagacccaacttacatgtcacttttaaaaaatgtttcactttattcacctacctctcttactccagtaaagaataatcaactccttctctttgtggccatagaattttgtttatgccttaacatagtacttaacatagtacccgctaatcatacctcctttcacaagccctgatgttagcttgttctaggttttatttcattccctttgtcttgttttcatttctcatgtccattgttgcaagaaaggaaatgttattagggactgaagcttctccatctaccaattgagcattcgtgattcattagtcctgtaaatgtgctctacttgtaattgtgctgccgaaataacatatagaataatgaagctgtatttgagaaatgaacattgaaaccaatttgtggtgatttactgactaaaatatttacatcatttcgaaatgaaaaatatataaatgtttaatatagtttgagaactttatctataacattaattttttatgtttcagtttgtttgagaatagaatatttttgaaggttgttgcaatcaggatgacatctgaaaataataatatgccattttttgatagctactttagaatgcacttccacttagtaacccacaaaagtagtttcttttcttttcaataagagttatctatactccagcatttctgaagaaactattttatttctggcttatcaactattttactgacaaatctctaatggttgacatttttaaaattttaaatttgttgttaatattgatggcagcagcggcccatctggagcagctgttgtaaagatgccagctgcagtgggggaggcgcgtccagggctgcatgctccactgagccagcaggagccggaaacaggcagaaacccagaccccttccgagttggaggggcgggagccctcccaggcgcagctgcagtggcccagtcgcagctgcggacccaggcattccctcactatcttcggcctagggagcccccttcccccacgggttcagaaatgcctgttcccgctgcctgacctctccctactcccagcacccactctgatttcagagcaaagttgaggccaagcctgggcactgttgcaggtgtgcccgctcttggggcattgctgacaccccagccccctgccacctcggcctcctctggactttggacactgacaagcacggaagggaggctggccaaagtgggggatgagggtgtcttggtgcaggcctgcaggtgccctttggcactccaggctgggcgccaggttacagctggttgatggcggcaggaggcaggctggcttctgggcggaaaggggtgggtccctggtgaagccccaccctcaagccagggatagcctggagcatgggagctgcgccaccagtttcacagaacggagtgagaacttacagtacttttttcctctggcccacccattgccacctatggaccaatcagcatatacttcctccccactgaagcccacaaaaaccccagactctggcagacctctggacgatctgcctgcagagaggagctaccaactgtgggtctcctctcagctgagagctgagcagatgtagagacaacctgcctgcagagagaatctacccactgtgggtctcctctcagccaagagctgagcagacagtgggatggcctgcctgcagttaggagctacccattccagatctcttgagagctgtactgctgctcagggaagcacctctttgccttattcatgctccggttgtctgtgtacttcattcttcctggacacaggatgagaacttgggacctgcttaatggtgggactgaaagagctgtaacacaaaaagagctgaaacatgcccctcactcgccacattgcaacaaggagagaattgctgcagccctttggggagcccagacctaggagctccctgagcaagggctctgacacctgtttggggctctgcagttcctggcatctccaagcttccggacaccactgcattccccggtgccagcagtggaagctgctttcagtatgcctgtccagtcgcagcctcacaggaagcctggagccgcctaccccacggcagccggtgtgccctgctgtgtgcagtggttgaaccctgtactcactgacttgctcacgcaccccttgctcacacaccccttgctgctctgcacttggcttgccctcagcaggtgtgagatcccggccagtatagcttgagccgagtacagcctgtgaggccgagtgggtggaacaagcccagtgggcctgagcataactcgggcaaaggcgccactggccacaaaggtttccagctgacaaagtgacgccccaaggatcctgtgacagcaccaccatgcaaaagactagattgagtactggtacagcaaatatgactactaagcatttctatccaatattcaatagataggtttattcaaactttatggctttcatgactccctactcatattctgtatgaataataaaaaataataatttccaacccagtttttcatgagagatagtgtggcatgatgtaaaaagccctggctttggagtaagaaataactggattcaacttatggtcctcttaggctgtgtgacttgaggctaggtatatgagctctctaaacttcagtttactcagctaaaaagtaggttataacataaagggctttgtagggattaagtgagcaaaatcatttatattacattctttttatttatgttgtaactgctagagaaggagatttaaaaaaaaaaataggtgactatctgaaagaaacttactgttggtattttttttttattcaaagtttcatcttgattaaaaggcaaaagttttgatctttggaagctcatggctagttgtgtaatctcccagttagtcattgttgttatcttccagctccccttaactgacactaaatgtattctttctatcaatttcagttccttcctactgtcctcacaactgttaagtagatgacttttccagtaccctaacttcatacttctttgagccctacatgaatattgaccttcatctcagatctacttaatttagtcatactaattttcatacccgatcttgttagccaccaaaattctgccactgaaaagtgctgttctacctccaaatcaccattctccagtcttccatcttgcttgtacaactattacactttgacttaatctgtcatatcttatcaggacctctaattctttgtcccttctactttctcctgtctgtcaacctgtgtttccttcccattccttcctatataactgagacttcaaggttcttcatttcaatgattctcttgctcgtatcccaaaccgcacttttattttgattctccacaatatatctttcacttaaaatattttatgggacatttattaacctccccaaacctcagttttctagtggataatatatgaataattacacctatctcattggattctcgtaaggaatacataaattactatatatacaaactggttagccaaccctttgacccatgcggagaagggtggtgtgacatagagatagaccatactggcacctacactggtgtatcctgctcttagatactcaaccaagccaagcaggtttatatagtgtacactttgggtccccaacttctcagatgggtccttaagattgtcagatagtccatctttaagaaagaacatagataaatcacgcatttgaaataactgaaatccatgtttaaaatttagaaatctccgagaagcaagggataatgctgtggctgaaaaggaacgagcagtgatggctgaaaaggatgctttagaaaaacacgatcagctcttagacaggtaagcatcataaaaatagaaatgttaaaactcttccattattgtttctgttacatattcttttagaaaatgtattttaaggagagaataattttcatttcaattgaggagagactaattttcatttcaataattttcatttcaattttcatttcatttcaatttcatttcaataattttcattgcaattgctttatttttacaatatacaattattgtggatattgaaaatgtggtatagaacagttcagttactccagagagtttccttatggcccttcagtccttcttaactgctactactcaagaggcaccactttctgatttctgtcacaatagattagttttgcttctcttagactaaaaatactcttgtgtccaggttctttcattccactttgttgttgtatcagtagttcattccttgttgttgctgagtatgaatatattttattcacctgtcaatggtcattttggtggtttccagtttgttactatcgtgaataaagctgccatataattttttgaaagtgtgtgtttttatttatcttggctaaatacctaggagtggcattgttcatcattgggtagataaatgttttacttttaaaaaacctgccaatggtaacaccaaagtgattctaccattgtatactccctagttttttttttttcaaaatctatatgttctaaagtatgtgttttggaaggaggatatcagagagaatgatatatctttaatttaccaatagaaaatgatatttattttaatagccttgttaaaaggaaaataactgatgggcattatggtaaatatcattacttcattaaacattctacactttcaattgtttgactgcatagagagtaaacagtggctaccttatttttttaacttttcattttaaaattatttcagaaaagttgctaaaatggtaaaatttctgcgtaccgttcacatactaataaacttttgaaattaagttcaatgggtcttttaattgttaaatgaagaccagattaatttgaggtataagcaatacataaaactaaaatttgaggcaagtcttcatataattaacctattgtaaaaatcttttagaatggctcaaattgtcatacttctgaattcacatcaactttataaacttggcctatggaagaattttaataaatgttatattgaagaagtcattcctataatgtggaagtatgtcttattctaaatatcatgctatcgggctaggcactggaaggctgaggcaggtggataacttgaggctaggagtttgagaccaggttgggcaacatggtaaaaccccgtctctactaaaaatgcaaaaattagtagtgtgtggtgatgcatgcctgtgatcccagctactcagaaggctgaggcacgagagtcacttgaacccaggaggcagagattgcagtgagcagagatcatgccacagcactccagcctgggcgacagagtgagactctgtctcaaaaaaaatttttttagtttatctaaaaaaaataaagatcatggtgtaaaagatcatggtatgtaaatcagctcctttcattagagttcctataaagcgtttgttttatattttattacgtgtaacgcttccacttacaaaactatatgatgtcccctaaagattcatttgactttgtgttgatgtcagtttttaatgtgtagttttagggatgtatatttttagggatggctctagaataagatttatgggcaaactaataaggtttaaaagaaaacgtaagatattacctagtaaatcagaacttacattcatcacttgatagctactgtgtggttttgtaaagttggagagaataatatatctgatcataaaactgaccaatttatatttatcgtaagctacactcttaacctaaatccttcttatcctacttgtatgtacatttgcaactgatgttcatccgaaggccatgcgatactctaatacctaaaagtatctattaaacaatagaggattcaattatttaatgtttgtatagcacttagaacagtgccttcctatgataactactattatcatagaataatttgtccaatttagtgttgttgtgaaactttactaactgaattttgttcttcacaagttgatatctttccaacgaatttttcactaaaattttagataaactggaaaacctcattttcaaactgccagataggaggaggcttatttttaataattctttgaagtcatagtaaagccttgcttattcagagcccaattttcagccaaccttaaatatttgtgatagttttaaaatcaagacaaggaaaaaaaggtgtttctagacaccactaaaaataacccttgagcagcaaatagagctaatgctcaggactgtaaaggacattacagaaccagagacttatgaataaatgagtgaatgaatgagaataatatctgggaatgtaaaactcaaaataagcttaggctttaacaaaatgcttaaaatagctaaagttacttatctgttttttaagatataatatcaataaatgaagggaaaagtatccctggttaggactgtaatgttgataaatgacatttttaaaagtagaattctagatgtaccatcagtttaattctttcttaattaatatataaattcagtgcagttcatgtcaaaattttcaaatgactttgaaacttgacaaaccaacactaaaaattctttttcacaattattatgcccattcttgtacatttactcttccatataaatttttatagttacagtttttacgttatgccttcatgtgaagttcaattttggggtagtgtacatagagaactaattttatttttcatgaaaatgtcagtttccttaagttaaactatgcatttaatgtaagccaaatagaataccaaaaatatttttttgaaaccagacaaataagttctgtggcttatatggaaaaattaagtaagtgcatttctaaataagaacaatgaattgtgacaggtcactagggtagccagctaaggggaaaagaaaattgagatccatacctcataacttacaccaagataaatttcatatggatcagagatttaaatgtaaaaccattaaaaacctaagaagccataggagaatgtttttataatcttgaattacaaaaggcctttgcaacttaggagttatagaagtaataaattgataaacttgattccctacaaatgaaaaatgttggtgtggcattactgccataaggaaagtcaaaaaacaaatgcaaatgtaatcttggaaaaaatatttgcaacgtctgtcacagtcatgtgactgattttcccttctccaaatcaataagtcaacattaaattcatattaaaattatacctattttcagctggacatggtggctcatgcctgtaatcccaacattttgggaggccgagttggttggatcacctgaggtcaggagttcaaaaccagcctggccaatatggcaaaaccctgtctctactaaaaatgcaaaatattagcctggcatagtggcacgtgcctgtaatcccagctacttgggaggtggaggcaggagaatcgcttgaacctgggaggcagaggttgcagtgagccgagattgcaccattgcactccagcctgggctacaagagtgaaactctgtctcaaaacaaaaacaaaaacaaaaacaaactatgcctgttttccactaaaaaccaaaaggttgataatacattgtgtttgcgtgggtatggaaaaacaggcaatcttaacattagtgggagtttaaattggtacaactaatatgaagagtaattcgataatacctatcagaagtacaaatgtacattgtgtgtgtgtgtgtgtgtgtgtgtgtgtgtgtgtatgtattatgtgagatggagtctcactctgttgcccagtctggagtgcagtggcacaatctctgctcgctgcagcctctgcctcccgggttcaagtgattctcgtgcttcagccccctgagtagctgggattacaggcacgtgccaccacacccggctaatttatgtatttttagtaaagatggggttttgccatgttgcccagtctggtctcgaattcgtgacctcaagtaatctgcccgccacagcctcccaaagtgctgggattacaggcgtgagccactacgcccagccatacattgctcttgatcaaggaattttatttctagtacgttatcctgcaggtatacttgctaggttcaaaatgctatatataccaccttatttactgtagcatagttgacatttaagcagtagttaaaagaattgtaattcatgaatactcttacagaatacaacaatgtagttgtacaaaaggaagtaagtggctctttatatcaggaccaggaaaaatctattaacatttattgcttctggagaaggaaattaggtgttgcatggttggtggacagatagagattttgtacctcataaatatgtaccctcttttgtacctcatacatattgaaacttacaatgtgtttttttcttttttgtgtgtttttaattaaatttaaacaaagagtggttattaagaatacttatatacaagtttcaaatcatagttactgagaaacttcagaaattatgtttttaatactcctggtgaacaatgggagtgaataaagggagtcaacaaataccatcttgttttcataaaagggaagaaggtagtagattcttgcaactattaaggaacatattagtagattacattacataacatattttgataaattatactctaataatttgatgcaatcttacataaactttaagcaaattacttgactttttttaactataatggatgtaagtactttgataaacctttgcttttttcattgtcagacgtgatgtttctaaccatttaggattgctttgagccttagatataatatattttaagtgtatggcatagattatgctcagtaagcagccatgcttgcaatggtttttaagattgctgctgaaagaagcaagtatcaccaagagttaggatgggttctctaaaaataaagaagactacatttcaatttttaagagatatattgcaggggtaaagcatggaaatgagttagatagggaacaagggatttgataagactttccatgacatccttttaaacaatatggggaaaatatgggagcaattcaaggccaggtaaatggattagtaactactgaagggctttatccaaatgttgttagagaattattaattaaaaaatgggtatatggtactcatctataatatcctgcagtactatatttctgcatttttgtcagtgatttcaggaaaaattaaaaccatatttaacaaatttgatataaaacaataacaacaaattaattgaataatgaagtaaggatctaatagatcttttcaggcagaagtaattaactgaatgaattttaataggaataaatgtaagatcatgcagttgggtccagaaaacctatggtttataggtttataggcttagatgtgaaatgtgaaaatgacctgcatggtttcaatatggagatattatcctacagtaatagaagttatatgtagaatgtgatctgtaattaccttacctatagaattatgctgataactgggcacccaagctttaaactaaaaggtcttcagaggaatatggccataactgcaaaaagattcaaaagtgccctattagtgctaggctgtaactacctacaagtattttaagcgttcacatatgaaaaagctggatttcttacttggcaagacataaagtagtagaattgggaccactgggtaatcactacaagaaagcgtaaagatagtaggacttttcacaatgccttagcatctgatacattctctatcagtagaagtattcaggcataagccaaattcagtagaaatgtgcttgtaaaggttgaagcatcaagtgggtagcttgatgagtttaaagccccctttcatcctgatgtgacaaccgtgtaaaagagttgacgcactcattaaattaccatgcaaaagaaatggtgaacacaagctaattttgaggatattatttaaaagatttctgtagttcgctttccctgtgtttttttaggggtgtgtgtgtgtgtgtgtgtgtgtgtgtgtgtgtgtgtgtgtgacagtagagagacagagaatctactgaagttattttgagtatagagtgcctatgttgcctatgtgtttaaactcatatattttgggaatatcgtatatattttgtatatagtgaagcttaaggaaaaatattttattcttcagaggttaaatttttaatattcaaatatgtgattctggcttcctttgtcacttcctatgttttaatctttatgcggaatgtgatttccctgaatcatgcttaagtaaagcctctggcatgcctatacataattttctagtcaggtataatttgtctcatctttttcatttatgttagaagtttttatttatcaaatgccacatttttatgattaaacaacctgtgttataaagagaaatgtatggaaacggtgtgccatttttcaaacgagtgaaaatggctttttactcaaagacttttcttttctacaaaggaaaggacttttctcaggcaaataaaagactcatgtatgtcccaattcaagctcaacaatttgataagtaacaaatacccagttttcatgaacatgaacagttattatgtcgtattctgttgctttgaatccctgcatgtactcctaagattctttcttccaaaaagtagaaattttaaaattcagtgtttgtagtagaataaattgaatacactgttacattcgtgggctactacatagaatactatattgggatctaaaatgtaaggttgcaattcaaaattaattttaatagtgaacttttttcagttatggtttgttttatttaaaaaaatatattctatgcaaggtacagtggctcacacttgtaatccaggcactttgggaggccaaggtgagaggattacttgagcccaggagtttcagaccagcctgggcaacatagtgaaacctcatctctacaaaaaatgtaataattattacatataagaatatatattatgtacatatattatgtattttaaaagaattttcattgcaagtatttttaaattaatattgtttgaaattatgttttcaatcccaacttctctggtaatggtaggatttttgtcctcattttgtattagtacaaggccaaaataagaaggcatgggaaatcagataagcagagtaagtgatttttatgtcatattgggctagtttaaagcttgataaagaaatcagctgtcctaaatttcctttcagtgctttttttcatatttctatatacttttatctttatattttaatctgctactaggccagagtgcagtggcatgatctcggctcactgcagcctccacctcccagagttcaagcagttctcatgcttcagcctactgagtcgctgggactacaggtgtgtgccaccacacctggctaatttttgtatttttagtaggtatggggtttcgccatgttggccaggctggcctcaaactcctgacctcaagtgatcagaaaaaacacagcaatctttgaagcgaaaaatatggcaacagaataagatggtagaaactaatgagagaaactatatatgaaaatgatagtatagaaataaaaaggaatggaagagaaatagtatttagggtcaggggagttccagaaaaccatgttggtaatttgaggctggaggtttctagagcagaaaaaagaataaagtgatgaaaacagttagagaaaaagtaattgacagggaggacagacagtatatattcatcttcagtgtgccaagggaagaaaacaaaatggaccaggaaaaaaaacatttagagattcaatagaagaaaacattttctgaaataaggaatctgcaatttagaagaactcatcacattctgggtagtgggaagaggatgggaaacagcaatgttgtaaatctaagtgaagttacagaacatgaatgttaaaggaatagaattagaagtatctgcgcaaaataagtaagtcatttactaaggaaaaaataaatctaagctgcatgcagtggcatgcctatagacccaggtacttgggaggctgaggcaagagaatcgctaaagtccaggagttgaggaccagcctaggtgacatagtgggatgcccatctcaaataaataaattaattaatttggttgagctcaaggttttcttccataataatactttatttatttagcaatatttattaaccaccaagcaccattttcaggcactgtgattaagggtttgacaagatgaaaggctctctgtcttaatggaacttgtatttctgtgatgtaaatcagaaaatatacaaataacaataatttttagagagtagcagttatttgaaatatatgaaattgagtatgattcagggaggtttgcagtctgaaagatgagaaggaatcagtcatgtgaggtcccatgaaacatattacctataaggccttcctgaaaaacctactggaaattgtaacttcaccaaagaaggaaagaatcaaagaactcatggactgagatgtcagggtaaagaagaactggaagtgaacgtttagtgtaaaatgtaatcttaatgacctttgtcattttggttacaaaagattgtaatcataattgttaacaagaaattataacataaaaataatagaagtagaggcgaaatagcagaaacttgcaactaaaattagggaattgatggtaagagaaatagtgtttgtacatatataatgttctcagatttcatgaaagaatcaatagttttatgaagaaatacatgttttaatatataatttaaaactataaatggaacagactatatattttgcatactaccagagggaggaaaaagatcaatcacaggctatataacaaaggacagacagcaaagcaaacaccaaagaagtaaaaaaacagagaccataaattaagatggaagaaggctacacccatcttttctaatagcaattgtaaatgtgacaaacacaccatgtatataggaaaagaaatacagtttggattaaaaaataaaattttttccacattaataagtgactcagggccagggcgcggtggctcacgcctgtaatcccagcactttgggaggccaaggtgggcggatcacgaggtcaggagattgagaccatcctggctaacacggtgaaaccccatctctactaaaaatgaaaaaaaaaaaaaattatccaggcgtggtggtgggcacctgtagtcctagctgctgaggaggctgaggcaggagaatggcgtgaacccaggaagcggagcttgcaatgagcagagatctcgccaatgcactccagcctgggcgacagagtgagactccgtctcaaaaaaaaaaaaaaaaaagggactgaggatttttaaagatggaaaaaagacaaagtaatacagaattaaaactattctgcaataatttattaaggattgtcttaaaataattcagaaccttgagaatccctctgtaatgacactatgtacacaataaagatatactcaaaaatctttacgtgtgagatttccaagagggaaagtgcttattttcccattctgggttccatgcccagcctaggcagctcaactgttgccagaggcaatgatcacattttaaaaacatggtttaggggtatgtatactgtctagataaagttctaaataaaaagcatgctgaacagataattcagttaattgcttattatggttcctgcttcaaaacacatttgatgaagcaaggaaactaaactcagaaaatataaacaagttggaatcatgttgttaattcataagcacttattaactaaatcctgcttaaggccacattaaagttacaattacggatatatatttaagtgtgtgactcataaattagcttaaaaatcaggttcattcatcttacagaccttgcttgagagtgaggaggatggggtgttccatggtcttttctaagtctagccagctgcctcccaaatgtgtaattcggggttacacgttgagagagtagactgaatcaatacaaatatgtaagtgttactagaaaaagaactcaagtacatgttcttccgattattcatcaatagcatcaaaaggaaatgatgtggatgaaggaaacattatatgtgtgcacattttttaggatgtttcttagaaatctagcgtcatagttggtcattatgcttgtgaactgaaaaccagagaaagtaagagtgagttgtgtgtgtgcgcatgtgcgtgcatgtgtgtgtgttcatacagctttctttataggctgctgctctgttgccatagggggaactttttatagatttacatttggtaaatatacccacatccaaaaaaagacgtatgaaaaattgggatgccagctaactaaatcaactcataaaaactaaagttaagggtaagattattttccacgattattttaaaatatgatgtttactggaaggaaagtccagagaattaccacagatgaagtgtgagtgtatttctcccacttgtaaatgagctcttatttcctacagtgtatattctggtccacaatgagtcattttcaacatgtttcagtttaacttctaatacatttttaaacttggcaggcaaatttagatgaacattacttccagttttagagactgcttctaaattatacttcagtggtgtagtcatcatgaaaagttctttcagtaaaaggaaacaggattgattggaaatgtatgttttggaggagcaaaaaaatggttaccatttttaaattttgttactacataaaccctgttaacattatcttaaaaagttgtagatgtgaggtccttttatggatagaagatactttagagaagagaatatatgatgtatcctagataataataaagttaatatttattaaacttttactatgcctagcattgtttaactgttctatacgtattagctattttaatgcctgcataataggcagtagtatgttttctgtaagccattcaggccgtgtttctattagaaaacatgaagcccggcacagttctggccgtttgactaaaactttatgtttgtaaaaactagcaatttatatagagaattttacatagttgccagctctgaataagtatttaataattaccttgtataaatttatgcaatcctgtgaatcttctggcaaatttcagtggccaatctatctactgttatcttttaaatatgcttgatttttgttactataatttttacactgtgtcttattatttttaacactttaaaagttcataaaaatttagtttgaaaaatgcttcaagatgattgcaagcattgcattcattttgcaaatgaggaaacaagtctaaagaagtaatatggcttgtcctcagttacactgttactagaaacggagccataattacacatctgttctctttgttcccatcccagttgttctttctgccacaccagtatgttatacttagtaaacagtatatgaagcataatatgtgtgaagttgaacatcagtaggtatatttttgttctcaaatatacacatcaaaaacaacacaatttaaaactatactgtattaatttcatagggttgcaatgataaattgccaaaacttggtggcaaaacaacagaaatttattctccattctagaggccagaactctgaaactaagatgttgacatggctttactgtctcctaaggctctaggggtaatcctttgcttgcttcttccagcttctgggggcctccaggcattccttggcttccttggcttgtaaccgtatcactctagtctctgcctctgtcttcatgtggctttctcctttgtgtgcctcttatatggatatatctgattgcatgtacggcacactcagataattcaggacaggtctctcatctcaagatgcttaacttaatcacatctacaaagactctttttccaaataaggtaatagtcacagcttttgggagttaggacatggacttctcttttttggcagggttgggggcaccattcaacctaccacatataccttttaattcatgtgaattatatttacttgagttcttcaataaaggtaacattttattttgaaatgatttaactaaaattttctaattttaggagttactgaaattctatgatatttctatggactatctttcaacctactagctgttgaacaaaatcataccttagagattctagaatctgccatttgatctatgacatacatttattatgacttaaaagtcttcctgtgtgacttttaataacattctttaagaacatcatgacagtgacattaagattaaagaaacagtagttatacatttttaacagatacagtataaaaacctagctttagacaagctatgttagcttcatttaggccatttaattgctagcaattaaattttgctctactgtgtttgagatcctttagatttgggatgctcttataatgactatttaatgttttattttcgttccttatttttttcattcaagtgattcctgattttaataaatgtttatgcataatgtgtatctttgtattatatatcccagatgtatgatcacttagtttctgcttctgtagaaattattgctagatgtgaagatatgctgaattcattttagccattgaaagtatattactgtaaatgaaaggaaaaacaaccaatatataagtctgtgcttcatacagttattgatatggtttgggtctgtgtccccacccaaatctcaccttgtagctcccataattcttatgtgttgtgggagggaccaggtggaagataattgaatcacgggggcagatctttcccatgctgttcttgtgatagtaaataagtctaacaagatctggtggttttaaaaatgggagcttccctgcacaagctctctctctttgtctgccaccatccacaaaagatgtgacttgctcctccttgccttcacaaggaggcctcctcagccatgtggaactgtaagtccattaaacctctttttttgtaaattatccagtctcaggtatgtctttatcagccacatgaaaatggactaatacagttattaatagaattaaatgaaattctttatttaaagtactcaaaaaatattaactattattattaccatcatctagttagttgatttttaaagtaagatgtgtctatgttctcttttcagcaccataaaggtagagcagtctctgactagatctggtaaaaaaatattttatgcagatgagtaaacttcactattacaatgagctctctaaagaaagagtcccctttcctcaacttactgtatattctaattgttagcaactcattcaattgggatttttcttgcatctttttgtaaattataaagaagatccatgtgttttaaaattgatgtgctttttaaaactccaaggtagtgtgttttcattttacaaatggaaagtgtcggtattttttgtaaaaagtagaaaattagtttatgcgtcttcaaatagcaaagcttaattagacagtcgcatatctatcattaaaattcaaatgttttaattcacttggaccccaaatgtgaatttctcttggctagattattcatagattctctgcatgtaatgatgcctatggtttctaaaattctttttgtctaaaatcatgaagatggcagatgcacaaaataatacatctctgggctgtgtgtggtggttcacacctgtaatcccaacactttaggaggctgaggcaggaggattactggaggccaggagttcaggaacagcctggcaacaaagtgagaccccatctctgcacacatacaaaaaaattaaccacgcagagtgggcatgtgcctataatctcagctcctcaggaggctgaggttgaaggatcccttgagccttggactttaaggctgcactgagctaagatggtgccactatgcccctgcctgagcaacagaataaaaccctgtctctttattaaaaaagaaaaaaaaaaaaaagactatttctccttgccttcaggcaagaatgcacccagatcatcctagtctgataggctatccatatgcaaacctgtaaaggaactcacatacctgtaaaggtactcacgtacctgtaaatgacaatgaaatgttagcttcaaaatagtttatataagtagtttacaggaaagtcaaggtatgataaataacctgtcatttataagaatggaatgttctgtatgttggtgtaacaaaacatgtctattcttttgtgtcatgttttgccattggttaagccatacatttgattaagaagtaagtcagcagatacttcaacttggtatccattataaccaatatcacctcttcattatagaaacaacctcttccatggctgggtgcagtgattcattcctgtaatccctacactttgggaggccatggtgggaggatcactagaggctacgagtttgaaaccaggctgggcaacatagtgagaccccagctctcccaaaaagtaaaaaaaaaaaaaaaaaaaaagatgaaactacttcttccccattattgtctgtaccctaactaaatattaagcattccacttgagataccatctcacaccagttagaatggcaatcattaaaaagtcaggaaacaacaggtgctggagaggatgtggagaaataggaacacttttacactgttggtgggactgtaaactagttcaaccattgtggaagtcagtgtggcgattcctcagggatctagaagtagaaataccatttgacccagccatcccattactgggtatatacccaaaggactataattcatgctgctataaagacacatgcacacgtatgtttatcacggcattattcacaatagcaaagacttggaaccaacccaaatgtccaacaatggtagactggattgagaaagtgtggcacgtgtacaccatgggatactatgcagccataaaaaatgatgagttcatgtcctttgtagggacatggatgaaattggaaatcatcattctcagtaaactattgcaaggacaaaaaaccaagcactgcatgttctcactcatggatgggaattgaacaatgagagcacatggacacaggaaggggaacatcacactctggggactgttgtggggtggggggagggggaagggatagcattaggagatatacgtaatgctaaatgacgagttaatgggtgcagcacaccagcatggcacatatatacatgtgtaactaacctgcacattgtgcacatgtaccctaaaacttaaagtataataataataaaaaaataaataataaaaaaataaaaaataaagcattccacttataagaaagttattagctctgatcgcctctctttattcttatgtatgagttttcattccacaagttttagacactgtttataaagtataaggtataccaaggcatagctaaaggttgtggctacttaaccccccacctccacacacacacacatatatatatatctttaatgatagagaccactagagcagtattgacttaaatggctcaaatatttcatgagttttcaataaaaaagactagcaatagtaattcttttgagtttatttaggtagaattatgaaaaagttatcttttttctttttattaattttgtttgtaaaaattataatttaattgtataagcacttttatgaatttttaattgcagataccatctgataaatgttataaatttgttcccacataattgtacatgacatacaattccatatagctaaactcattttccattaccattttataatagaacctaatggaaattaattaccatgactgcctttttcctgtgagaattaagtctccatagcccattctatgaactgttctctgccttccttaattctttaatgtatagatgaacctaacattcccttcctgtcgatttcaaatgtttaatgttgcttgccttgtttccttttattttaaatgagagccgacattatgaactcagcactttactgagtacatcaaaaggcaaaagagaaacgtatctctccccatggtttcagatgagaatctggagaaaaatatgtacgtgtgctcagatttctctttgttggagtatggactatggaaagagaaataaaatgccaaagtatctctctaaactttcctatggtgggctagaaattgttcaagtcaatatttattgaacctttgtgcatgacacactgtagagaattttaaaaattaaaacaatttcagttttgaaagagctgaaatacatatatacatatttatattttaaagcaaaattttatatatgttaagaagtctgttgtaggctgtgaatgtccctatctgttttggaaatggccttttagaagaggtggtacatgaaacaagcatttgaagtgtgaaatttgacatgcagatataagagaagactattccaaaaattttgtaaacctaaatatagaagaaacaaaagaattttcaaaaaaaaaaaaaacagataattcattcacctgattcagagtgtacaagtagataggagataaggatagacagtttcattttttggtagaatgtcagaataaagagcttttatttacttcagtgtgcagtgagggctgacatgatgagatttacattttagagaattagcttggcagtaatatatgcatatatatttatggtaattcaagatgccctgaataggagttcctgaagtccagatgattggtaactatggcctgaattggatggtggcatagataataaagatgggaaaattggttttagaaatacaacttggacgtgatgggtagtagagatttttccacctgttctctattgccatcctccatccctcacaaagaaaaaaatttttaatgcatttagatcatattccaaaatatagtttgggccatgtttctagtcaagtggtgtctgtctgtctgtctctctgtctctctttctctctctcttttgagatggagtcttgctctgtcgcccaggctggagtgcaatggcgcaatcttggctcactgcaacctccacctcccgggttcgagcaattctcctgcctcagcctcctgagtagctgggattacaggtgcccaccacctcacttggctaatttttgtatttttagtagagatagggtttccccatgttggccaggctggtctcgaactcctgaccttgtgatccacctgcctcggcctcctaaagtgctgagattacagacgtgagcctccgcgaccagcctcaagtgatctttctctaaaagattgcagtcatgattagagcttccccttccacatcatcttttcctagctctggaaaaataggttggagctcacttgcaccacttgtcagtcttctgccatatatacatgctaatatcctctcttaaaccttatcagagttctacgcaagaactcttagttggagtttttactgcaagcccaactaataacatagtcataattttatttcctgttagctactagcccctttttcagaagcctcatggtaagggaatgcttattttaataaagcatttagacattttttgaattcaccctaatatcatttaatagcacccagtccctgtatcaccactaacagatggatcctcttacaatagaggcaatataagttacgtttaagagtacagtttctggagggtaaatagcctaggaggttatgatactggctctattgttcctgggtgcatgacttcagggaagttacttaacctctatgtctcagtttcctcatgtataaaatataataatagtaacttatagaattgtgaggattaaatgagtgttagagatagtgtttgttacataatgtgttaaatattagctattgtgattattacgggattcagtaactgacaataattgaaagtatcttggagagttatcaatgattcctgcagaattttctgggtagtttgagatgatagtgatttcattatcagaaataggactttgagaaaacagaagtgattcatgtgttaatgaaggctataattttgatttaggaattgtacttgaaatgctaaagcaccatttaggtatagaaatagagttgacatataagaataaggatctcgaacctgggagaaagaacaagcctatacataaagatttgggatatatcaagaatgctgaaacctgtagtaagtgccctgaaatttgggaagagatttaataattgctgtggagtaatattgtgctaaatgttttaggagttttgtttaattaattttattctcagtttttatttctcataattgctttgtatgaggaaattaaggctccaggaggttttctgaaaatgccatggctagaatttacaaataaattacaaaaactttaagtaactttagcaagattacaggatacaagttactatgaaaaaatttaattgtatttctgtatgttagcgctatacatttaaaacttggaaattttctaaaataaacctttacaacagcagaaaaacatcaaatacttagggataaaattaacaaaatatgaagcaagtacaggacctgtacactgaaaactagtaaatattgctgaggaaaaacaaaaacctaaataagtggagtaagatatcatgttcatagatttgaacacttaattttgctgtagtgtcaaattttcccaaaccgacttacagagtcagtgcaattctgatcaaaaactcagcagactttttttgtagtctaatcagctaacctaaaatttacatggaaatcgaaaggaccagaacatccaaaacaattttgaaaaagggagatgaaggtgcctagatagttcagtgaggaaatgataatcttttcaacaaatcttgctaaaccatttagataccatatacaaaaaagtgcacctccacccctacttcatacatacaaaaattaatttgtaattcatacatctaaatgtaagatcaaaaactagaaaaaaagggaaaaccttagaaaccttgagttatcaaaggttgcataaataggacataaagaacgtgaaccattaagaaaaacttgttttctttttttttgagctggagttttgctcttgttgcccaggctggagtgctgcagtgggcacgatctctgctcactgcaacctccacctccccagttcaagtgattctcctgcctcagcctcccaagtagctgggatttcaggcatgcgtcgccacgcccggctaattttgtatttttagtagaggcgaggtttcaccatgttggtcaggctggtctgacctcaggcactccacccaccttagcctcccaaagtgctgggattacaggcatgagccaccacacctggcctaagaaaaacttgatattccaacttggctggtagttgggggacaaaaagaaaaactcgttaaattggactttactcaaaataaaaaaaaaaattgctcttctgttaataaaggagaaagacaagccatagtcttgaggaaaatatttgaaaaccacatatctaataaagggcttacatccagaactcttgcaacttaagaagacaagctactcaatttaacattttttaaaatggccaaaggatttgaacagccacttcatgaaagtagaaatacagatgaccaataagcacaagaaaagatgctaaacattattaatcaccaggaaaatggaaattataccaaaattcattaccactacaaccactagaatggctagattttaaaacacggatattaccaagtgttggtaaggttgtcagttaactcaaatgtccacacagtgcttatgtgaatgcagaatcacagtcactttgtgtgactgtgtcaaacagtttgacagtttttaagaaggttaaacataaacttagtataagacccagcattcctatttctagttatttactcaagagaaatgaaaaacctatatacatataaagacttctgtgtaaatgtttatagctgctatatttctaatgtccccaagctgaaacaactagtgcatcaaactaaatttgagtttacacatgccatggaatactacatagcaataaaaaaggaggaaactacttatatgtggaaaatatttttattataaaagttctatgttgaaagaagacaaacacaaaagactacatagtgtttgattccatttatgtgacataatagaaaaggcaaaactaatgacacaaatccaatcaatagttgccaagagccaggggtggaatgagagaactgactgaaaagcagcagcacagagagtttttgggagtgatgggaatgatgttatgatcatagtcacagttgcatggccaaaacagttgttgaaacttatgaacttgcacacttaaaattagttaattttgtatgtaaattatgctccaataaaactggttttttaaatggcttaagtggctgtttattttttagagcagttttgggttcactgcaaaattgaaaggaggtacagattgctcatataacccctacccctacacatgtatagcctaccccattatgaacatccccaccagagtgctacatttgttacaattgatgaatctacactgacaaatcattatcacccaaactctatagttttcattagggttcactcttggtccggctactttttaatactttcatttctggtccaagttcactcttaagggttgtacattctgtatgtttggacaaatctgtaatgtatatatctatcaatgtagtatcattcagaatagtttcattactatattattttactgtctccatggttttatctttttcaaaatgtcataatcatacagtttgtagtcttttcatactgtctttttttacttagtagtgtgcatttaaggtttctccctgtcttttcatgacttcatagctcatatctttcagtgctgaatagtattctattgctgaggtgtatcacagttcatctgttcacctactgaaggacatcttgtttgcttccaggttatggcagttatgaataaatctgctataaacatccttgtgcagttgtttgggtagataagtgtttaattcctttgggcaaatatgcaaagagtgtgatcttatggtaagagtgcttagttttgtaagaaaccacgaaatgtgtcagtgtagtgtgggggaaaaaaaaaagaagaaaccaccaaactgttttccaaagtggctatatcggtatgcatctccaccagcagtgaatgagaattcctgttactccatatctttgccagcatttggcattgccagtgttctggatttgggcctttctaatacatgtatagtggtatctcattgttgttttaacttacattttcctgatgacatatgatgcagagcatcttttcacgtgtttattggccatcactgtatcttctttggtgatgtggctattaaggtctttagcccattttttaatagggttgtttgttatcttgttgagttttaaaagttctttgtatattttggataacaacccttcgtgagataagtattttgcaagtatcttctcccagtctggggtttttattttccttctcttgatggtgtctttcacagtgcagaaacttttaactttaatgaagtccagtttattctttttttcatggattatgtgtttgttgttttgtctaaaaagtcatggcccagaccaaggttatctagattgtcttatgtgttatccttaggagttttataattttgcattttacatttaggtatatgatttattttgagttaatttttgcaaaggtgtaagtctgtgttcagattctttttttttttttttttttgcatgtgaatgtcctattgctctagcaacatatcttgaaaagactatctttccaccagtattccctttgtctttttgtcaaacatcagttgactgtgcgggtctatttcagggctctctattctgttccactgatctatttgtcccttcttttgccaataccacactgtcctgttcctgtaactttatagtaagtctcaaagttggatagtgtcagtctgctagttttattcttctctttccatataatattggctattctgggtcttttgcctgtctatattaactttagaatccgtttgtctatatccacaaaatagattgttgggattttgattgggattacgttgaatctataaatcaatcttgcaagaactgacatcttcacaatattgcgtcttcttacccatatatgtagagtatttttacattattctttgattgtcttatcggagtttttagttttcctcatatagatcttgtacatattattttagacttatacctaaatatttcattttaaggggtgttaatataaatgttactgtgtttttaactggaaattccacttgttccatgcagatatacaggaaagtgattggcctttgtatattgcccttgtatcctgcaacattgctataatcacttactagttccagtagttttcagccaattctttcagattttctacataaacagtcatatcatctgcatacacagttttatttcttccttcccaatctatatactttttcttttcttttcttattgcaattagcatcaacttcgaatatgatgttgaaaagttcctgatcttagtaggacaacttcaggtttcttaccattaagatgttacttgtaggatttttgtgttattttttatcaagttgaggaacttcccgctattcctagtttactaagagtttgtatcatcagtagatgttagattttgtgaaatgctttctctacatctattgacaggatcatgtggtttttttcttcctcagcttgttgatgtgatggatcacattaattgattttcaaattttgaaccagccttgcataactgggataaatcccacttggttgtggtgtatagttctttttatgcatgaatggtttcgatttgttaataatttgttgagggtttttgcatctatattaatgagagatgttggtctcttggtttcttttcttgtaatgtcgttgtctggttttggtatttgagtgatgctggcctcatataataaattagaaagtattccttctgcttctagcctctggtggatactgtagagaactggtatactttcttccttaagtaattggtagaatttaccagtgaacccatctgggcctgtccttctgctttggaaggtttaaattattgattaaatattttaaaacacatgtaggcctcttcagattctctgtttcttcttgtgtcagttttagcagattgtgtctttcaaggaattggtccattttgtctaatttatgaagtttgagagcacagagttgttcatagtattcttttgtttagtgtccatgggatctgtaataatgaccactgtttcatttcttttttttcttttcttttctttttttttttttgagacagagttttgctcttgttgtgcaggctggagtacagtggcacaatctcagctcacctcaacctccgcctctctggttcaagcaattctcctgcctcagcctcccgagtagctgggattacaggcatgcaccaccacgcctggttaattttgtatttttagtagagatggggtttctccatgttggtcaggctggtcttgaactcccaacctcaggtgatccgcccacctcggcctcccaaagtgctgggattacaggtgtaagtcaccatgcccggccttcatttctgctattagtaatttaggtcctctctttttcttagtgtagctaaagttttactggttttattgattttttttttcaaagaaccactttagatttcattggtttttatcttgatttttgtggtaattattttcttagtgcttactttggatttaatttactcttttttttctagtttcctaagatagaagtttagatgattgattttagatctttcttcttttctaatatacgtatttaatgctgtgaattttccaagcacttctgcgttccacaagttgtatttttatttagtttaaaatattttctaatttctcttgcattttcttctttgatgtatgtgtcatttagaagtgtattgtttaatatccacatattttagaatcttccagttatctttttattgttgatttctagtttaattacattatggtttgagagtagagagcatatgatttttattcttttaactttgttcatgtgtgtttatagcctgggatgcagtctgtcttctgcatatctgtatttcgtgtgagctttaaaagaatatgtattctgctattgttgataaattgtgattataacctgttgattggtggtgttgaattctactatgtctttaatgattttctgcctactggatatgtccatttctaatactagcgtgttgaagtcttcaactatagtagtagattcatgtatttcttcttgcagttctatcgtgtattttgacatctgttcttggacatataaatgttaaggattattatatctacttggaaaatggacccctttatcatgtagtgcccctctttatccttgataacttttcttgctctgaagtctgttctgtctgaaattaatgcaagctactcccagtttcttttgagtagtgttataatggtatatttttctctatctacttttaatctgtatgtatctttatatttaaagtgcatttcttgtaggcagtatatagttgggtgtgtttttaatctattaattggtgaatttagagcatttacatacaatgtgattattgatacactgtaggtagatttgcagctaccatatttattactgttttctattttttccctcattctttgtttctatttttcactctttttcttttttggttttaattggcattatgttgttgggcacataaatgttaggaattatatattttctgggaggaagaacttcaaaaaggaaagtttgcaaatgtaagctaaatgtgagatttcaggaggttaaagtgtttttagtatcaggaagtcaaggagatctacaatcctcccaaccagagaaggaatgttctgagttaggagtgtagggaaagaaagaaaattagaatataagcaattttaaggtagagaggaggggattgaaataaacccttgttggatagatcttgaccttagtaaaaggaagtcatcaaatgacaatggagagggctccaaatgacctgagagtcttaataaaagaaggcagtttttagaatgacaactatagagaatacaataatgtaataccttgggaataaaagaattccaagcagcaataagagctaggtcatggacttggtcagtatggcatccctaattttccacagcttctcttaattcaagtcagaggtcgacaaactatggccgataggccaaatccagcctaccatctgtttttggacagcctgcaagctaagattggtttgtgtggttttttttaattatgagggggaaataaaaataaaaataaatatttaatgacacatgaaaattatatgaaatgtagatgttagtgtatataaagttttattggaacacaaactcatttgtttacatattgtctatggctgcttttatgctacaaccgcacatttgagttgttgcaacagaaactttttggcccacaaagcctaaaatacttactctttggtcctttacaaaacatgtctgcatgccagctttcagcagcatcagttaagcagcagtgataattgtctgtctgtttcttggagatcattcacaagcctgaatagatgggtcaccatttatcaatgctttcgagatatcagcatgcatatctttcccatgcatctctttagcagggtaggaaaattatgactttgaacgggtaactctgtttcttggtaaggataagatgttacattccactgaatggaagaaaaatcaaattctgtgcttccaaaattccaatattttaaagtattagaacatctcatggtttatagaaaaacatggaacatgacaagacatcttggccagactaaaaattggaactctgcagccaggaaacatacaaagtcacctgttatttttcttatgacaagctttaaaacaaagtgctttggcaaacttgaatgtttaacacatagtgcttactgtaccaatacagttttaagcattttaccaatattaactcatttaattatcctaattacctaatgagattatcactgttatgctcattttataattatgaaagctgagacacaggtagtaaagagtggtatggagtttgaactgatgcagtctggcttcagaacccttgcttaatatagttacttgtgaatatttaaccctctgaatctaaaataaaatttgaaactataaaaataaatacttaaagtcacattacattgaaaaatacttcaatctcatgaagcttcaagattatttgagaccttttttgttctagatcccttattatatatgtatgtattcaacttttaggttcaggggatatatgtgcagatttgttacttagcccagaaatttgaggcagacttgaatgcagatttcagctttgctacttacttgggcaagttgttaacttctctgagtctcagaatctttatctctaaaaagagaataactgcttgcccactttcaccactgttattcaacattgtactagaattcccagctaaagcaactagacaaggaaaagaaataaagggcagtcaaattgttaagggagtagtcaaattatccttgttattagatgataggattttttttttttttgaaaacaaaatgcttcatgattttgtatgtcatccgtgtgcaggaaccatgctaattttctctgtatcattccaatttgaatatatgtgctgctgaaatgagcacaatgataggatcttctatttggaaaacctaaagactccaccaaaaaactattagaattgatgggcaaattcagtaaagttgcaggatacaaaatcagtgtaccaaaatcagtagcacttctatatgccaacaatgaacaatccgaaaaataaattaagaaagtattcccatttacaatagctacaaataaaattaaatacctaggaattaaacaaagaagtggccgggtgcagtggctcatgcctgtaatcccagcactttgggaggccaaggcgggtggatcacgaggtcaggagtttgagaccagcctggccaacatggtgaaaccccgtttctactaaaaatacaaaaattagccaggcgtggtggtgtgcacctgtaatcctagctacttgggaggctgaggcaggagagtcacttgaacccatgaggtggaggttgcagtgagccgagctaatgccatttcactccagcgtcagtgacagagcaagactccatcttgaaaaaaaaaaaaaaaagtaaaagatctctacaatgaaaactataaaacactgatgcaagaaattgaggagaacatacaaaagatggaaagatatattccatgttcatggattggaagaatcaatgttgttaaaatgtccatacttacccagagcagtctacagattcaatgcaatccctcttagtataccaatgacattcttcacaagagtagaaaaaaaaatcctaaaatgtatatggaaccacaatagacccagaatagccaaagctatcctacgcaaaaagagcaaaactgaggaatcacattgcctgacttcaaaatatactacagtgctatagtaaccaaaacagcatggtaccagcataaaaacagacacacagaccaatggaaaaaaaaaatagagaaatcagaaacaaatccatacatctccagcaaacttatttttgagaaagctgccaacaacatacattggggaaaggacagtctcttctatagattatactgggaaactgcatgtccatatgcagaagaataaaattagacccctatctcttgccatatacaagggtaaaatcaaaatgggttaaagacttaaatctaagacctcaaactataaaactactaaaacattggagaaacgctctaggacattgttctgagcaaagatttcttgagtgataccgcacaagcacaggcagccaaagcaaaaatggacaaatgggatatcatcaagtagaaaacctcctgcatagcaaaggaaacagtcaacaaagtgaagagacaacccacaaaatgggagaaaagatttgcgaacaatccatctgacaaggaattaataaccagaatatataaagagttcaaacaactcagtaggaaaaaaatctaataatccaatttttaaatgggcaaaagatctgaatagacatttctcagaagaaggcatacgtatggtaaacagggttatgaaaaggtgctcaatatcactgatcatcagagaaatgcaaatcaaaactacaatgagacatcgtctcaccccagttaaaagggcatttatccaaaagacaagcaataacaaatgctgatgaggatgtggagtaaagagaaccctcctacactgttggtgggaatgtaacttagtacaaccactatggagaacagtttggaggttcctcaaaaaactaaaagtagatttatgctggatcatatggtagctttatgcttgatcaatgattgctggatcatatggtagctctatttttagtttttgtgtatatcccaaaagaaaggaaatcagtatatcaaagaaatatctgcacttccatacttattgcagcactgtttacagtagccaagacttgggagcaacccaagtgtccatcaacagataccggataaagaaaatgtggtacatatacataatggagtattcttcggccataaaaaagaatgaaattctgtcatttgcaacaacatgaatggaactggaggtcattatattaagtaaaataagcgaggcacaataagacaaactttgcatgttctcacttgtttgtgggagctaaaaattaaaacagctgaactcatagagatagaaagtagaatgatggtaaccagagactgggaagggtagttgggagaatggggcatgggtaatgggtacaaaaataatagggaggttgaataagatttatttggaagcacaacatggtgactatagtcagtaagaatttaattgtacattttttttagacagagtctctctctggctttatactggatcagtgattgctggatcagatggtagctctagccctggctggagtgtagtgacatgatctctgcccactgcaaacctccgcctcccaggttcaagtgattgtcctgcctcagcctcctgagtagctgggatcacaggcatgtgccaccacaccagctaattttttctattcttagtagagaggggctttcaccattttgaccaggctggcctcaaactcctgacctcaaataatccgcccacctcagcctcccaaacttctggaattacaagcgtgagtcaccacgcctggcctaattgtacattttaaaataactagaccaggtgtggtggatcacatctgtaatcccagcactttgggaggccggggcgggaggatcacttgaggtcagcctggccaacattgcaaaaccccgtctctattaaatatacagatatatacgtacatacatacatacatacatgcataaaataactaaaagagtataattggattgtttgtaacacaaaagataaatccttgaagtaatggatacctcatttaccctgatggaattattacacattgtatgcctgtatcaaaatatcccatatacgtactacgtacctataaaaattaaagattttttaaaaagaataatcctaaattttgtattagcagtttggagatgattaaatgaaaaaactgtttatacctgtatatgacagtaaataaaagcactcaaatgttagactcctttccttcgtattggtctctacacaccctgataggcatcatgccaattcaagtttcctcttagtataataaatgcctttaaagttcatcactggctttttattaatatcgcaagcctctcacaacccacttagtcatggttacaatggaaagtgagataaaaggaataagtgacagagcaataataaaagcaccaaatttcagccaacctagagaggaaaagcaacactttctgcaaggggaggacataagaaaagtgtagggagaaaagcaaggcccaggaaaatgtttgagagaagacatttcttcaaaataataatgtaagatgttaaaaattagagtttgtttaattaaattaatactgagttgctttgattatattaggctctttattatttcatttttatcctgaagtgttggagatggttaaataaataccaaggtatgtagacattttctggaacttttaaactttctcattttataaacagctgtagaaaataaaaatataattataacataatatgtgtttactgagtgcctaacataagattatatttactatctatttgtttgaacatcccaagatagaatttaacagaaatactaacaagtaattatttggtccattaagtctaatgagagaaataagaggtggggaaatagtgatttagttcttattatgtgatttagttcttattatgtcttctatttatgtcttctttacttctgttttgtatgccctcatgataaactttattacattcttgtaggtaggctagtgagtcacgcatagattcctaaaattgtgtataaaatttgtaataattttaacttgttacagaactcagatagagcctgtcatatcacactacttttgctcccttttttgcatttcttttttgtaagtatttttagaatgttgtcatgtctccttctaccaccttagccattatccacactgtatattttttggaagtttaatcttttttgtagtttggacatacctaacctataatcattttggcttctcttttcttcactctctgtaatttgttttcatcttttacggacacctaaacctggaaacaataatcttaattcactggttttttcatacttcagaagagactgcccctcatcaaattagtatttaatattttaatgttttctatcctggcttgaacctatttagcattctaattttataacacctaaaaacctcatggttactatgactccattcattcactcagtaagcattaagagttagtaatattctggatataccattatctcattaagagcttataatatgccagaatatttactagatcctaggaatccaaagatggattagacaagattcctgcactgaagtaacttgtattttaattgtacagtgtgttgttgtgagcattttacttttgttagctcacattatcatccagaactcaacatgcccaagttttcccccaagaattttgattcagaaagtctcaggcagaaccgtggcatctagagttcttagaagttccacaagtgattctgatggtcctccctggttaggctaggtaaagtcaacctcaggagtcatccgcatccttagaaaagaaaaaagtgttgctaatgatccatctttactaccagaccatctaggcttaaagacccatgactctggttgctgtattcaggagttttttggagtattccttagcccatttcagaacactaatttggataaattaacatttatagggcttccctattgttaggaagcagatctaaataaatgacttttacatccctttttgccttttacaatatgtatgttaaccatagtaaattcatttcttttcttgagctatatattactgaaaaataggacaaaagcatgattagcctccatcgtgctactattaatactttacactattcttcataaaagcatccccctaaaagtgctttttctaatgactttttaagattcagtttatatgttctgaatttttttctttagtgtagatcaacactgagatatacgttaaaagctgcatgaaatagagttttgagtgctatgaagcactaatataataaatactcttggttcggaggataattcaagctgaattttaagggtttgttgtcatgttgacacaaaagggaaaacagacccaatcagacctagtgttataaagtttttataacactgttataaaaattttataacagtgttataaaatgtttcactctaattttatctcatacatgcttttattttatggcaacattcctttccttacatttgtttcagttaagtactcttcacatacctgtagtacctatttttttgactttataagatggccagatattactacatgttgtttattttattaatggcattacatattttatttgatcatgatatgatagatgcattgaattactccaaatacatgcttgaaattcttataaatccatggtacagttgtcaaacatactcagcatttttaactcagcaaaaaaagacctctcacattcatttaagaattagcttgtaagccaaaaatgacagatgtagtattgcagctgagaagtgaactggttgaagaaatcatctaaatggcagaaacgtttggagaaatacccaaacttcttttaaattcctttctcacgttctttagtcatcattgttgcgacattaatgttggctttaaaagttttccctagtttgtttctttacaatttggaaaatttcacattgaaaacacctgagttaatagaactgtgttactctatagtttttctttttttttttttttccaactcactggaaatctgtgggctctataattttatatgtacattttgaactaatgtaattgctcccctaattttcatcaaaaataattttgattcagtatccaggtatatatttaaaatttttaaatatacagataactaaaaagcaaaagaaaacagttggtagaacaataggtagcagtaatgcacaaaagtaaaatctctaagataacattttgtattttaataacatgaaaggaaagtaatttcagatatgttctctgtaagttatgatatggatatatatgtgtgtgaatatagtttacataaaacttgtatactttttgttttcttaaagtaaaaaaattagaagttatagattgggtataatagggtaagtgtgcttatttttgtattctgagatctttcaaatattttcagggtataaaaaataactaaccaaagacctataccatatactagccactgatgtagtaatacttcatctctgtttagctaataacactttgttttgagaagtaaaggatatatctaagccaaaattatttaaatggaaagtacttaattttttatttttaaatttctcatataaaaattttttgagttgccttcagtaaaattaatttttaagttgaaccatgtaatgtaaaaatgtaattttctcctctcacctctcttttcccagatatctttacctgtatgggatattatttcttatttcttcaggatgtacacttcctttctttttatataactcagtgtccttgtgtgattttagatatatccatgattcacgtctaaatatgtatataatgagtcaagtttttatttttaaaagaaacacatcagaatatatggacacaaataagaataccctccaccaaggtcaatacagtagaagcccgtatgctttttccgaccgtgttggtattgctcaattcagttattttacagcacagttcttggaataacttttcattttaacagtcttcttccttcaaagagaagtttttgtttttggaaattcaaccattcagagtaaagcccattgaatttggtgggtgaataaactaggtatactgtttgttgtgaacaatgggtgagaaattggggagaggttaactatttaacaatgaaagaattgttgagaatggaaaattatgaggccaattgaaaatcttatttttgaaggaggtttaataacataagaagatttttaagataatattgggggaaggagagcaaattttatatgaaagcataattcatatgtaatatgcatagcaaacatttatagagaataatatcaaatattggtgaggagatggagaaaccatatttcatacacttagagttgcattttaaattgatgtagccatttgagaggaaaaatggcagtatcaaaatttaaaatcttttgacccaacaatttcacttcatggtatctttcttaaatgtttgcttgtgcatgggaggcaattcttaggatgatctttgaagcactgtgtataatgctttgaagcattttgaaacaatctaaatgttaatccgtttagaattaaataaattggaattaattaaatgattatgtccacattgtggtctattatatagcaaatgaaaagaatgaggtatagacatggaaaaaacggatcccaagacagtctacatgaaaaaaggaagttacagagaagaatatgtgtgatatgccatttgtttaaaaaaaaaaaactgatatatcaattcatatgtgatatacatacatgtttaaaaaaaaacaaacctcttagatacacagaaaactagtcacagtgattatctctcaaaggagaaatggaattgagagtagtgatagaggtctgggctgggtgcagtgacccacacctgtaatcccagcactttggaaggctgagataggaggatggcttgagcccaggatttcgacaccagcctgggcgacatagtgagaccctgtatctacaaaaaatacaaaaaaaaaagaaaagaagtctgtaatatttatttgtaatgtttggagtttttagcctcacagtggatttgataaattatttatagaattgaaaataaatttgaaaatatttacttgtgcagagaagaaaatttatgaaaatataaacagcttatccttataagcaagattgaattctcagttgactagacacatcagcttctgtccttgtcaactccaatttcttatagctgaatctaccaaagactgaatgtatctggagatttaggcccatctttgtttcacagttctttcaagtgtagaaagtttgtcaacctctgccccacttgcttgtggagtttaaaactaaactttcctgcccacacaaaagacttagcagtctatctctgactacctacttctgtgtattcttctaagctccagtattctttctttattgacccatctccccatatttcaacataaagttgaaaatatctttcagtgctttgttattagttaatttgcctaataactgaatactaaaaatccttccctgaacccttactggtactggagatcttgtgactttgcttaacttctcttgccagtctaccttggggcagggtcttacttcccatactctttatctgtacacagttgtcctgccacatacagataaatgctttgcctcagctgctgcactatcttactttcaacctggatcagttgttaaatttcttaatgcaagtaccatattctggccctggtcattacatgaacctcaccactgagttttagtactttttaggtattctgccttagaaaacctgtttaccgaatgagatttgataactgggttcaaaatttttaatgtaatacaagccatgaacattttgtgtacagaattcaaaaatcagttgtttctcattgaaataaaaaagattaaataagcagttaaaatgggttaaatatgggtctttcactgtgttacccaatgatgaccttgttaataagagttgggaataaaccatatacatgcgtggcttaatacatcagagtctaacaagtaaaacttcccctgtagagtctacatgtaaagactgccaatgtaaattttgttatgaaaacctgttatttgatgttttatccagtacttttattaccaaatatgttttcctgtttctgagactccactgtcacattgatgtctctcctgtggttatttctcagcatcccagaacatgtcctgctactgggagtttaattcatcctagcctgagagcacttcttatggattactttctttgtagctccctgtgtaatagctgattttcaccctttaacattttttctccctgtacttccaaacccagaagtgctgttgcagtgaatattccttcagagcaaaccatcagttctagtcctttctgttatttttaaagtagtatttggtatatggttgggtcttatgaaaactaaaaacccggttacaaatgtagcataaggacaaatggagccaaattttaggcctggggatgagatggttgtgagaataggtggagattctctgtggaaaattttacctcttaaggttactatgctaataaattagaatatcaaacgtgaagttgttaatgtatgaataatactgacttacctcaaataagatgttcagattgagagtacgagatgagaagtctgagtcaacaaagtaaaatgtgatgggttatattagcaaaacaagttaagtgggagttacctgaaactagctcctgggcatcatcagttcctcactgttggagctacttttgtagctatgtttgttcaacattttcagagttcagtttaacaaaatacttacacaggcttaataatttgaggcagatcctttcacttacataaacaacatggaaatagactagtcctttagaattaccatttcattttacaaagcttcagtttatgaaacttagactatattcaaatttttaggagataattcttgttaccacctagatggtttattgtttaacttctgttaaattttctgtattctaaatgtctaaatattgtttactgtttaacttttcaatataaggaaataatattagtgccaaaagtaactttcaggtgccatgtaatgaataaaaacaggtgatgctaaaagctaagtctttaattacctatttggagttggcagtgatatccgaagcaacatcccgaatccataaaaaggcaaaatttgcagtttaatcttttaggataaattatcttaaagatcaatatcacattctaaattacttatccagaatttatttcataatatggtctctgtatgtcctagtctcacatacaaagaaagtattgatttcacacatttaattcatttatatttataaaacaacttgcctcaaagagtacagggacatttgtatgtcataaaatgttgaattaatacttttttttagtaaaaggtatttttttttaccacttcacgcacactagaatgcataatcaaaaggcagacaatgataagtgttgttaagaatgtggagaaattggcaccctcgttactgctgatgggaatgtaaaatggtgcaaccctgttggaaaaaagttgggcagtttctcaaaaagttaaaaatagagtgacatatgacatagcaattgtgttcctaggtatataaccaagagaaatgaattcatgtttacacaaaaacttgtacataaatgttcatggtagcattattcatcatagccgaaaatcagaaacaacccaaatgtccatcaactgatgatggataagcaaaatgtgatgtagttaaacatttgaatgttattcggttataaaaagtaatgaaatgttgattcattctacaacatgaatgaaccttgaaaacatcagaaggccacatattatatgattccattaatacgaaatgttcagagtaagcaaacttttagagacaaaaagtagatcagtggttgccaggcctggatgaagagaagaatagggagtgactaatgaacatggggactttgtagggtaattaaaatgcttttaattagataatgatgtgcaaatttgtaaataagctaaaaaccacagaactgtgtatgttaaaagagtgaattttatggtatatgaattatgtctcagtaaaaaatttatcagtgtttgtttttctatataaaaaggtattttttaataaaattgtaaaaagttttatataattaatgccaggattttccaaaaaagttagtcacaaaaactgacattcactttaaaactttactgtatattaatgtgtaatgtgcattgtatggaacttccaccgatctgagacttgaagtagcccatggtgtatatctaatgcctatcttctctgattatattttgaatggtattttcactcactgacaggagtgaaatagcctttaaaaagcattttaaagtttatcttacctcagaaatgtcagttatgaatattatgtaatagcagaaagactatcgctgtgaagtctaatataaaattgggcttcatcctgaaatttactagcagtgtgttcctattaaagaaattatttgacatctctgagcctcaggttcttcatctgcaaaatacctagtagatccgttataagaattaaatgagataccatagataaaacagactatgctctctgcttcactgccctgcatataactcacatttcttctccctagaatacttcccaccccttacctcctcctgccttacacacacacacacacacacacacacacacacacacacacgcacacacacccctctatacaaaccaagttaggtctccttcatatatgttcccactgaacctagggattaccctattgaagcacttaccattgaattttcgtgtttatttgcctgttttccccagaaaactataagttcttttaaaaaacaatattttatctaccaatgtatacaccttacctagcatactgactagcttaataaatatttgaataaatgaattttaatatcatacccagcattatacttggttcataataactccctgaaaagatacagtgtatgtgtattttgcttttctgttagaacacaatcaaccttaagtattttcaaatttatagtatgtggtgatttatatgttaagtggaaatgtttttattaccggttatacctatggaatgaagagaatgttccttatctgagttgtaatagcctacttgtaggtctatatttatcttcacagtttgtacatttttttcttgtaatatcaaaatatatgtatatgtactaagtttattttgcaagtgtttcaagaatttgtagtttaatatgcatatttcattgctttcttctccatctgacattatttagacttaggatgaaatagcaagctgggaaacaatgccatagatttaaaaaggcctatgagaagtatagaaattaaatcattctaagcaatgtaactgaaatttgctcttgccatttacaaaatgataggaaataattattttggctagaaagaatgaaaataagggtagaatggtgaaagttaattgatatgttcactgtaattacttattttcatacatatacctacctaaattatttataaaagctttgctgaataaatataaattattaactccacaaatatgggggagtagaaaacatagaagtaaggtttatgattacttaaatcattgagactgctttctttagagtgtcataaccattctgcttctttcaggtacagagaactacaacttagtacagaaagcaaagtaacagaatttctccatcaaagtaaattaaaatcttttgaaagtgagcgtgttcaacttctgcaagaggaaacagcaagaaatctcacacagtgtcaattggaatgtgaaaaatatcagaaaaaattggaggtacatgtacaagcttttctttcaacattagcatggcatgtaaactccctaagtacaagatttatattgagctttatttctcctataggatgtatcactatcctgcacaaaaaaaaaaaaaaaaaaaaacaaggaaatacgtatttcagaaagatgtatactgaaaaggactagaattgttgagaaacaaaaaaagcaagaaaagatgtcattcacaatagcaaccaaaaatatataatgacttggaatattttaaataagaacagtgcagaatgtatacgaagaaaactatagaacttcactgacatgtgaaatgaaacaccatgtttctgggagggaatgaagtatacattttttcagttttcatcaaataatatgatatgtttctatctaatcaaatgccagcatattttttaactgaaaataattctatagaacaactggaaggaaaaacatacagaatagtcaatatttttaaaagtactttttaaaaagaaataatggaaatatatatcacattttaaagtgtgttctgaggcaagaataattaaactgcacacaaaattagttcacaaatggtataaaatgtaaagccccaaaacatatttacataaatttaagaatttatacatggtaaaggtcatatttcaaatcagtagggaaagtatggattggacaataaatgatgctgtgataatcatttgaatatttagagaaaatagttgactcaatacctcataccatatagcaaaattaaactcagatggattactaggctgcatatatgtacaatatataatatatatattatatatatatatagtgtgtgtgtgtgtgtgtgtgtgtgtgtgtgtgtagctataaaggtattagaagtaaatacagatgatccaggggcagtgagtgactcacgcctgtaatcccagcacttttggaggctgaggtaggtggatcacctgaggtcaggagttctagaccagcctggccaacatggtgaaacctcgtctactactaaaaaaatgtaaaagttaggtgtggtggcatgcacctgtagtcccagctacttgggggttgagacagggaggattgcttaagcccaggaggtcgaggccacagtgagctgagatcacatcactgcactctggcctggcaacagagcaagactacatcaaaaaaattttttaaagtaaatacagatgaaattatatcttatgtttactttgggaattaatctgttaatctgatgaaagccaggaaagaaattatataggaaaaataaaacctgaatttgtttttaaaattcataaattttaaaattcataaattcataaaattcataaatttttaaatttatatttaaacttaaataatatttaaaataatatatataatattaaaggcaaaatagaaactgaaaaacagtatttgtgttatatatgacaaagggcttatgtccttaagtttaaaagatattttatcaagaggacatgccttcgccttctacataaataagtgggaaaaaaaaggaatggaccatttccaagaaatgaaatgcaaattgctaataaataaataaatgaaaatatgaattctcactgataagtaccaaaatataaatttataaatttaaacttttttttttacctttagataggtctgtgtgttgtttttaaaatgctggcaagagtacccttaagtgggaaatctcatgagttagaaaatgaaacagcccttctggacattatggtaatctgtgttaaaagccttagaaggttgatccagattgtgaattttagctccagatcgactgcaagaacaaaccagcaatcctgagaggacccacagaccctctgaaggaagcggactgctcctgcaggacccggaagacaccccaaatactctgggaggtggaaagcctcgggcaagttttcaagcccaactcactctgggcctggaaacagactcttgggctgttgtgttggggggagccagtgggagcgagaccagcccttcagttttcgtgggaactgggtgaggcctgtgactgttggctttcccccatttccctgacaacctgcatgactcagcagaggcagccataatcctcctaggccacctccaccagaataggtgctggtatccatgatggagagacccatagacagttcacatcacaagactgtgcagaaaaccccagtaccagcctggagctgggtagactcactgggtagctatacccagaagagcgacaacaatcactgcattttggctcacgggaagccacatccacaggaaaaggggtagggtactacatcaagggaacacttcgtgaggaacaaaagaacctgaacaacagccttcagcccttgacttgccctctgagagagcctacccaaatgagaaggaaccagaaaaccaaccctggtaatataacaaaacaaggctcttcatgaccctccaaaaatcacactagttcaccagcagtggatccaaaccaagaaatccctaatttacctgaaaaagaatttaggaggttagttattgagctagtaagggaggaaccagagaaaggtgaagcccagtgcaaggaaatccaaaaaatggtacaagaagtgaagggagaaatattcaaggaaatagctaaaagaaaaaaaatcaaaaattcagtgaactttggacatgcttttaaaaatgcgaaatgttctggaaagtctcagcaatagaattgaacaagtagaagaaagaaactcagagcttgaagacaaggtcttcgaattaacccaatccaaaaaagacaaagaaaaaagaatatgaaaatatgactaaagcctccaagaaatttgggattatgttaaacaaccaaacctaagagtaatcagtgttcctgaggaagaagacaattctaaaagcttggaaaacatatttgggggaataattgaggaaaacttccctggccttgctagagacctagacatccaaatacgagaagcaccaagaacacctggggaattcattgcaaaaagattttcgcctaggcacattgtcgtcaggttatccaaagttaagacgaaggaaagaatcttaagagctgtgagacagaagcaccaggttttcctatagaggaaaacctataagattaacagcagattcctcagcagaaagcctacaagctagaaaggattggggatcccatcttcagcatcctcaaacaaaacaattataagccaataactttgtatctagtgaaactaagcatcataaataaaggaaagatacagtcattttcagataaatacatgctgagagaattcaccattaccaagccaccactataagaacagctcaaaggagctctaaatcttgaaacaaatcctggaaacatcaaaacaaaatctcttcaaagcataaatcacacaggacctataaaacaaaaatacaagttaaaaatcaaaaacaacaacaaaaaaagtacacatgcaacagaaagcatgatgaatgcaatggtacctcacatttcagtactaacattagatgtaaatggcctaaatgctccacttaaaaaaggtgcagaactacagaatggatgagaacttgcaaactaaccatctgctgccttcaggagacacacctaacacataaggactcacataaacttaaaggggtggaaaaaggcatttcatgcaatgaacaccaaaagcgagcaggggtagctattcttacatcagacaaaaaaaactttaaagcaacagtggttaaaagagacaaagagggacattatataatggtaaaaggccttgtccaacaggaaaatatcacaatggacctaacactggagctcccaaatttataaaacaattactaatagacctaagaaatgagataatcagcaacacagtaatagtgggggacttcagtactccactgacagcactagagaggtctttaagacagaaagtcaacaaagaaacaatggatttaactggatttaaactgtaccttggaacaaatggacttaacagatgtaaacagaacatttcatcgaacaactgcagaatacacatcctattcaacagcacatggaactttctccaagatagaccatctgataggccataaaatgagcctgaataaatttaagaaaattgaaattatatcaagccctctgtcagactgcagtggaataaaactggaaatcaactccaaaaggaaccttcagaatcacacaaatacatggaagttaaataacctgctcctgaatgagcatcaggtcaaaaatgaaatcaagatggaaatttaaaaattgtttgaactgaatgacagtaatgacacaacctacccaaacctctggaatacagctaaggcagtgccaagaggaaagttgatggccctaaacacctacatcaaaaagtctgaaagagcacaaacagacaatctaaggtcacacctcaaggaactagagaaacaagaataaaccaaacccagcagaagaaaggaaataaccgagatcagagcagaactaaatgaaatttgaacaaaaagaaatacacaaggtaaatgaaacaaaaagctggttctttgaaaagataaataaaattgatagatcaggccaggcacggtggctcacgcctgtaatcccagcactttgggaggctgaggtgggcggatcacctgaggttgggagttcgagtccagcctgaccaacatggagaaaccctgtctatactaaaaatgcaaaaaaaaaaaaaaaataaagccaggcatgtggctcatgcctgtaatcccagctactcaggaggctgaggtaggagaattgttggagcttgggaggcagaggttgcagtaagcagagatcgtaccattgcattccagcctgagcaacaagagcgaaactccatctcagaaaaaaaaaaaaaaaattgatagaccattaacaagattaaccaagaaaagaagaaaatccaaataacctcactgagaaatgaaacaggagatattacaactgacaccactgaaatacaaaagattattcaagtctactgtgaatatcattacacacataaactagaaaacctaaaagagatggataaattccttgaaaaaatacaaccctcctagcttaaatcaagaagaattagataccctaaaaagaccaataacaagcagcgagattgaaacggtaatttaaaaattaccaaaaataaagtccaggaccagatggattcacagcagaattccaccagacattcaaagaagaattggtaccaatccttttgacactatttcacaagatagagaaagaaggaaccctccctaattcattctataaagccagcatcaccctaataccaaaccaggaaaggatacaaccaaaaaagaaaactacagactgatatctttgatgaacataaatgctaaaatccttaacaaaatactagctaaccaaatccaacaacatatcaaaaagataatccatcacgaccaagtaggtttcataccagggatgctggatggtttaacgtatgcaagtcaataaatgtgataaccacataaacagaattaaaaacaaaaattacacctcaatagatgcagaaacagcgttagacaaaatccagcatcgctttatgattgaaaccctcagcaaaatcggcataccttaacatcataaaagccatctataacagacctacagccaacataatactgaatggggaaaaattgaaagcatccctgctgagaactgaaacaaggcaaggatgcccattctcaccactcctcttcaatatagtactggaagtcctagccaaagcaatcaaacaagagaaagaaataaagggcatccaaatcagtaaagaggaagtcaaactgtccctgtttgctgaccatatgatcgtttaccttgaaaaccctaagtactactccagaaagctcctagaactgattaaacaattcagcaaagtttccggatacaagattgatgtacacaaatcagtagcacttctatacaccaacagcgaccaggcagagagtcaaatcaagaactcaaccccttttactatagctgcaaaaaattaaatacttaagaatattcctaacaaaggagttgaaagacctttacaaggaaaactacaaaacactgctgaaagaaatcatagatgacacaaacaaatggaaacacatcccatgctcacggatgtgtagaatcaatattatgaaaatgaccatactgccaaaagaatctacaaatttaatgcaacccccatcaaaataccaccatcattcttcccagagttagaaaaaaaaattctaaaattcatgtggaatcaaaaaagaacccgcatagccaaagcaagactaagcaaaaagaacaaatctggaggtatcacactacctgatgtcaaactatactataaggccatagtcaccaaaacagtgtggtactggtataaaaataggcacatagaccaatggaacagaatagagaaccagaaataaacccaaatacttacagccaactgacctttgacaaagcaaacaaaaacaaagtggggaaaggacacccttttcaataaatggtgctgggataattagctagccacatgtgggagaatgaaactggatcctcatctctcaccttatacaaaagtcaactcaagatggataaaggacttaaacctaagacccaaaactataaaaattctggaacctaacatcagaaaacccttctaggcattggcttaggcaaggattccatgaccagaaacccaaaagcaattgcaataaaaacaaagctggccaggtgcagtggctcatgcctgtaattccagcactttgggaggccaaggcaggcagattacatgaggttgggagttcaagaccagcctgaccaacatggtgaaacaccgtctctactaaaaagacaaaattagccaggtgtggtggtgcatgcctgtaatcccagctactggggaggctgaggcaggagaatctcttgaacccgggaggcgtacattgcagtgaaccgagattgcgccattccgctgcaccctgggcaaccagagcaaaactccgtctcaaaacaaaaagcaaaaaacaaacaaacaaacaaaagctaaatagctgggacctgattaaagagctttcgcacagcaaaaggaacagtcaacagagtaaacagacaacccacaaagtgggagaaaaatcttcacaatctatatatctgacaaaggatgaatatccggaatctacagtgaactcaaatcagtaaaaaaaacaatcccatcaaaaagtgggcttaggacatgaatagacaattctcaaaagaagatatacaaatggcaagtaaacatgaaaaaatgctcaacattgctaatgattggggaaatgcaaaacaaaaccacgatacagtacccccttactcctgcaagaatggccacaatcaaagaatcaaaaagcagtaggctgggcacggtggctcacgcctgtaatcccaacactttgggagaccgaggcaggcggatcacctgaggacaggagttcgagatcagcctggccaacatgtgaaaccctgtctactaaaaataaaaaattagccaggcatggtggcaggtgcctgtaatctaagctactcgagagactgaggcaggagaatcactggaacccgggaagaagaggttgcggtgagcaaagatcatgccactacactccagcctgggtgacaagagcgagactccttctcaagaaaaaaaaaaaaccaaccagtagatgttggcatggatgcggcgatcagggaacacttctacgtttctggtgggaaagtaatctagtacagctgctatggaaaacagtgtggaaattccttaaagaactaaaagtagaactaccatttgatccagcaatcccattactgggcatctacccaaaggaaaataagtcattatttgaaaaagatacttgcacacacatgtttatagcagcacaattcacaattgcaaaatcgtggaaccaacccaaatgcctatcaatcgaatggataaagaaactgtagtgtgtatgtatatgtgtgtgtgtgtgtgtatacacacacatgatggaatactgctcagccataaaaaggaatgaattaacagcatttgcagtgacctaaatgagattggagactattattctaagggaagtaactcaggaatggaaaaccaaatgtcacatgttctactgatatgtgggagctatgctatgaggacgcaaaggcatgagaatgatacaatggactttgggtacttggggggaagagtggaacagggaaagggtaaaagactacaaatatagtgcagtgtatactgccccggttgatgggtgcaccaggatctcacaaattaccgctaaagaacttaacttgtgtaaccaaataccacctgtaccccaataacttacggaaaaataattaataaataagggctgtgtggctttaaaaaaaaaaaaaagaattgattgttggcatctgagcctatagtctctgcatcagtaggcaatataccaagtgggtggtattaatctttcctcagcttttaaatattaagtaaacccccaaaataaaatggaaagaaaaaaagctgatccagtaattttacttaaaggaattttatctaaggaaatagagatacgtataaaggtttatataaatgatgcatgtcgcagcattatttattatgtaaaaattagaagtaacttaagtgtccaacagtagataaagttttcaattagcatattataaattgtgtattttgctgtgtccatgcactgcatgttcttgggtattttagatttggggaaaaggctaattaaaaacatggaatgaaggatgcagttaggaaattagtatggtcttgactatggtttacatgttcagtaaaaatcatcaatatacatagaaaaacatttgaaggaaataaatcttttttttttttttgagacagtctcactctgtctcccaggctggaatgcagtgtcacaatctcggctcactgcgacctctgcttccccagtttaagccatcctcccacctcagcctcccgagtagctaagattacaggcgtgcaccaccacgcccagctaatgtttttatgtttttcgtagagacaaggtttcaccatgttggccaggctcatctcaagctcctgacctcaagtgattccccctgcctcagcctcccaaagtgctaggattacaggcgtgagccaccgcgcccagccaaatatatccagatattaaagtttatctataaatggtataattatgggtgatttttatatcttcattctccccccctagactaagacctttttaaaaatatgcttctaggtctcagccagaacctggcacatagttaattgaattgatagtatgcagtactttgtaactgagtgtctattaggcagtaagcactgtgctgggcccagttacacaaattttaagaaatgattcctatcttcaggaaactaagaattttgaacagggctttgaatagagctttctgtaatgatgcaaatattctatatctgcaatatccagttcagtagccacttgccacgtgtgatcatttagcacttgaaatatggctacttcactgaggaaccaagcttctttagttaatcttaattaaattaaatctaaaattagctacatgtatttaatgactctggtattagactgcatgctctagacaattaaccagagcatacacatccttactattaggcagtggtaggatttgaaaacttttctccttagttttatcataaaagaaaaatggaaggtattttctgcccaaatagaatttcttctggcagtattgggtagggattggcctgtgggctttaggctcaacagacctaagatttgaacccagttactcaccactctctggataaaatactcattttctttgggaataataatagcaactgtttcataatgttgttatatctgtttggctcatataaaacaaccatttatgctcagtaccaattcatagaaatcctcaaaatattgttttgatgctatagaattttgttttagttaagttgggaaatgccgggaaaatggaagtatcctttcccaaaagataattatttgttgggtaaaagattttttttttttcacttttcagatcccataatagtgtgcccactaataaactcaagcattttaatcttccaattttcctttctgcatatgaaggtttattttacagttacaaaaatatgaaattataggtcattaaacagaaactacaatgcaaagaaactgaaagttattcaattagaagcctttctcaattgaaaatcagatattaaagtagtttcccccaaattataatgcaattcagttacaggataaatatcataaaatagaactggtttgtctttattttggaaatacatgtgttgcatacatttgtcatttatccaaaatatcaaaatatttcttttttttttttttttttttttttgaggaggagtcctgctctgtcaccctggctggagtgcagtggcaccgtctcggctcactacaacctccacctcccaggttcaagcgattcttgtgcctcagcctttgaagtaactgagactacaggcgcacgctaccacacccagctaatttttgtatttttagtagagacagggttttgccgtgttggccatgctgatctcaaactcctgacctcaggtgatccacttgccttgtcctcccaaagtgctgggattacaagtgtgagccaccatgcctggcaaaatatttcttttttaatggcattcatttgatattttaagaccacataatatagaaaatacacttataatactaggtgacaatattcctttacacagctgtatgcactggatttttttttaatgtctaaggtgagaataaaagattttgaagaaatacaccataaaggggggttgttaactaacaaatcagccttgactcattttaatgttttatttctacttttttgttctagagaggttatattatttaatatcgcacaactagtaagtgactgaactgtgattagaccttaacacctgaccaacctcactttaaatcccatacttttttttttttttgagacagagtctcactctatctgtcacccaagctgtagtgtgatggcatgatctcagctcaccgcaacctctgtctcccaggttgaagcaattctcctgcctcagtctcctgagtagctgggattacatgcacgcaccacaacacccggctaatttttgtatttttagtggagacagggtttcaccacgttggccagggtggtcttgaactcctgacctcgtgatccgcacatctcagcctcccaaagtgctgggattaccggcgtgagccaccacacccagcgtaaatcccatacttttaaccaccacaatatttaatatttattacagtaatctctccaagattacacttctggaaattactctgattagtgaaactaattaaagggcctcagaaaataaagccttagtgaaaaacataaaaatatattaaatatatatgtatgtttaaaaagacaagcaaaatttgtagatggtgtctacttataaagcaaatcaatgttcagtatttaaaacttttttcctatactttcttcaggaaaatgctgtagagtcataatctgttgcaggtgattctcccacacatcctttttttattgcctttagctggttacaaacaaaattgattttataacctccaaaaaattgcaacttgcagtttgcaaaggactctcatagacctgtcaacttggtctctggatgcaggtgactagtaattattatgctttgtttaaaggtcatatatggaaaaacacctttctaaaaaatgttgtggttctaaagattctggttgataaaactgaggcttgagggcatttcttaacgttgtgtgcccctattaaactgaagccttgagaaagcagagagattattcatttatcattgtgtcagcagtgcttaacacagtgcctctctcataatgaatcctcaataaatacttgatgaatgaatggtttgattaagaataatgtagtatcatagtttgaatcttttggtgggggggattctacaaagtatttttaagacaattcttatttataattaatttatagagaaataatttcatcatggtaaagataatggacttttctgggcttttacccagtattctcattgattgttaatttggagattatttatttttgcttaattattaattggcaaaggctcccagaagcgttggctttatatatttgtctctgtttaaggcaaaattataattttgtattatcattatttaatctttgtattattcagttaatacatgtattattcaaaggaaggaaaattttactgtgagaactttatatttaatggattcctaaaattaatgggcttattttatgtatccatatttaaactgaaatgttcatgtattgatttttattaaaacaaatccttaatattatagcctaccatgggtccaacagtcaagttctctttggcatttcagaagcagtaataggtttacttataacaaccactcagacaaatccacagaaacagaaaattctctaatatggggtactagaggtattgggagatagcccacatcagtagtttttcaggacctctctttcacattatgaagatattttttaaattacatctctcgtaatggtttttaaatctctccttaaaataatatcttataaaatatcccatcttcaacattttgattccttatctctaatcatttctcctgtttttcttcgtgtggtggttttgcagggggaggtggggtacaaatgaaaaagtatcagctctgctgtgggaatagtcatttaacactgcctttactgattctctcttttgacagtggaattagtttcatcagccaccagattcttaatgaattacatcccaatgtaatgaactccatgtaagccccagataatgtcactgagtaatgatttttttataatgaattaacaagtttctagaaaacacattcccaacaagcaagaataaagaagaaataatgctaaaacacacattttgttttttctgacccaaccagagccactggaaatcaccataaaaatgctgttcccattttattccttctccactctccaaaggaatgtatatggagagtgagggataatgttttgtttactttgggggaaagttttgctgaaaattgaaggaaatgatctgaaataagttaaggaaaattataatttctgctcattgagaactgtaaataggtcttccttctccctttttccacatcacagaaaacatataatcatacacattttgtattgtgaactttatgtcattagagaaaatagttgtctttaaaagtgtttaattgtagagaattcaagataattaaattagtggaactctatttgcatgaactatttcatgcagaattgtcatatagttatatttcttacagtagcaatagtacttttcaacactatgttctaggtactctgctaagcactgtaaatttatcatctcatttaatttctttcaacagtgttttaaggtaggcctataaagaataagtaattgcctaagatcacagctagtaagtgtcaaagccatattgaaatccaaatttttctggctccaaaccatattcttcactgtagtagtctgttgcctctcaggaaacagtatattatgttgtattagaaagcaggtgtaataccactccataatttagtctgtaaaaataagtaagcattctagataattggaatttaagcattaaaacatttccgtatcactagaggcatctctttttttagttaatttattgttgtcatcatggtgtttccttcaatgaattaccattggagtgtaggattttttgcttgtatacaaaatgactccaatttccatgccctttgcatctcatttttaatgtgttttagttgttcacaaaggcattttctgatactgcctcaagcagtacttcacatttaccttttgatttcctgctttgaatttatgactgttcagaaaaccaaaaatgttattaagatcatagtaagggtaattcaataagctctgatggaaaattgaaggatttattgtcagtatatcgtttttacaaacagctttgtaagcctctgtcaaatggctttgattgccagataaatgacctctatgtaaatatgacattgtatttttttaaattctaacaagcaaatgctaatattactcctataattattcctaattttaaattcattttttattcagcttataaaataaggataaggtacttcataattttcagttaaaaacaactgaattatttaccttagaaataaatatatttaatttcctcattagtcatcttaattgagctactttctcttaatatttaaataacaaaaaaagccctatgaatgtctttgcatcatgtttttgtcttaactgtgcacctgtttaattctgcctttgtaattcttctctttcactattaggttttaaccaaagaattttatagtctccaagcctcttctgaaaaacgcattactgaacttcaagcacagaactcagagcatcaagcaaggctagacatttatgagaaactggaaaaagagcttgatgaaataataatgcaaactgcagaaagtaagtcttcccccacacacacatgcacaacttttttttttctggcaacaaaagacgcctgaccttatttctaaaactactttgggatcaggcacggtggctcatgcctgtaatcttagcactttgggcggccaaggtgggcaaatcacttgaggtcaggagttcgagaccagcctggccaacgtgacaaaaccccatctctactaaaaatacaaaaaaaaattacccaggagtgatactggggaatcccagctactccagaggctgaggcaggagaattgcttgaacccggaaggcagaggtcgcgttgagccgaaatcatgccactgtactccagctcaggcaacagagtaatactgtctcaaaaaaaaaagaaaagaaaaaaataaaactacttcggtatattttcttaaaatataattggtgactatttctaaataaaattctgtatttcaaatatttgttcatcttcatcttagaaattgcagtcaaaaaagaaacaggttaaatatgatagcttttatctgttcaattttttatcaaattcacttactccagaattgttaagtatttacatctgtcaggaactggggattaggagttcatggaaataattcccgtctcaaggggtttctaatctactgagagaggtgaacataataacaaataattagagtagcaagataaatgctataagcaaaaaatatgcagttctcagtggaaatacaaaagagatcattaattaatcccacctttaaaggaggtgaggcatatctaagagaggagatgacactgcaattagtcttttcttttttcttttttttttttttgagacggagtttcactcttgttgcccaggctggattgcaacggtgtgatctcagctcacctcaacctctgcctcccggtttcaagcgattcttctgcctcagcctccgggtagctgggattacaggcatgcgccaccacacccagctcattttgtatttttagtagagacagggtttctccatgttggttaggcggtctcaaactcccgacctcaggtgatctgcccgcctcgacctcccaaaatgctgggattacagacgtgagccactgtgcccagccttggaatgagtcttgaagtacaaataaaaattcatttgagggtactgtgttataatctttgatctttaatttctgttttccttttttcttgttttcccctcttgttatcttcctgtcttatccctaacgttaataattattttaaattaacatttcaccgttggctgtgatgtttgctacagtacattatttgtgttcaaaagtcagataaccatggcattcttataaaaatgggtttaaacttcagttgaagttgaatttgaatctaggtagggttctaattattttaggcacatttttgcataaggactgtatttacttgtaggccaaatgtaagaaaaacttatttctttcctatcattgtcctatttcccatttccaaggtcaatgtctgataactgcaatagattttaaatttatcttcaatttcttcactggagtcaaagtaatctttgtaacattcaaattttcatatcatatgctggctttaatgacttttattgtcttcattaagacaataaagtcaaatttctttacatgacttcatgattagactcatgtttatctttctgctttcatatcttgccattcccctccatatcatattattgttttgaaagtttcatactctttcttacctccgtaactttgcatatttccctttgtctaaacaaattaggaatagaagggaacttcctcgatctgaaaaagggcatttataaaaaccaacagctaaaattgtacttaatggtgaaatattgaatactttccccattgagggggagagtaaaacagggtttcctattttcatgatttatatgacatattaagtgctgtatttgaattcctaacctgtgagataaggataagagaagatatatataaaaatcagaaaggaatagtaagaatctattttcagattaccaaacaactactaaacctgataagtgaatatagcagaatatatagtcattacccaaaaatatactagaagtaaacaattggagaagtaagtagcaacaaaaaacacaaaatacttaggaataaatttaagccaaaaaaccctacagatcattgctaagagaaattaaagaaccactccccccaaaatcacgaaatatattgtgaattctatcaattcagtgttcttctagtcacagtggcaggaggcttttttgtatttcattcatatggagtgcagaggactggaatatccaaagcaatcttgaaaaaagttgaagccctgtgtggtggtgcactcctgcagtcccagctacctaggaggctgaggcaggaggattgcttgagcttagaggttaaagcctgtagggtgcgatgatcatgcctgtgaatacccactgcactccagcctgggcaacatagcgtgacctcctctcctccacaaaaaaaagaacaaattggaagaattgcactacctgttttcaagatttactataaagcttcaatatcaggataatacagtactggcttaaggaaagacaaatacagcaatgaaacagactagaaaacccagaaacagatccatacttaaataataatttcatttttaacaaaggcagcaaagcaaacaaatggagaaaggaaagtttgttcaataaatggtgctaaaaaaaattggacatctttatggaagtaaacttccatacaccaatattaatctgagacgatacctaaatggaatagctaaaactataaatatgtaacagaaaacataggtgagttatctttacaacgtggagtacattaagactttttttgacatggcccttgaatgtaattatcataaaagaaaaactgataaagtagatgtcatcaaaatttaaaacttctgttcttcaaaagacaccattaagaaatgaatagccaagccacagactcaaagaaaataaccacaattttatatctgacaaaagaatgatacccaaaataagaaaatattgaggagaaaatattcacaaaacatagattaaacaaaagaaaatgatacccaaatgtggtgggctgaaaaacatccttctagagatgtccatgtcctgttgggcatagtgactcatgcctgtaattccaacactttgggaggctgaggcaggtggatcacttgagctcaggagttcaagattagcctgacatggtgagaccccatctctagaaaaaaagagaaagagagaaggaaagaaaggaagggaagaaggaaggaaggaaagaaagagaaaggaaaaggaaggaaggaaagaaaagagaaaagaaaagaaagatgtccatgtcctcatctttggaacctctgaaaaagctggaaaaggcaaggaaacagatttcaccatagagccttcacacagaaccagccctacaaagcattgacttcaggtcagtgaggctgatttttggacttactacctgtagagctataaaataataaatttgtattgtttaaaccataaagtctggcaatctgttaacgttagcagtaggaaattaatgtaccagaatatatatttaaaaattcatgtaactcagtgattaaaaaaaaaatagtcctgtttaaaacatgggcaaaaggtttaaacacttcacaaaggaagacatgtgaatgacaagtaagcataataaaagtattcaacattactagtcatgagggaaaagcagattaaaagcccagtgagataccactgtatacccacaagaatggctgaaattagaaagactgactataccaaatgttggtgagaagtggagcaactggcagtttcttacaaaataattaaacaacctaatcagtgatccagcatttccgttacttacccaagagagaagaaagcatatgcaccttaaaagatttcctctagaatgttcataggaaatgtattcataatagtcaaaaactgacaacagcccaggtgtgtatctcaaaggaaaatggttaatcaaaccattatacattcatgtagtagaatacttctcctcactggaaggaaacaattgacttacttaacaacatggatgaatctgaaaaacataaagtgtactttatataatatagtatgattatactgtatgattatagtatgtggtatgattatactatatgattatagtatatggtatgattatactatatgattatagtatatagtatgattatactgtatgattatagtatatagtatgattatactatatgattatataaagttctagaagagacagaagtaatctatgatgaaaaaaatcaaggggtgggggtaaaaatttttttttttgtttttaaaaagacaaaaatcagaactgtagttgtctctaaagatgattgtcaccaaaaattaactgagaaaagtgacatggaactttccagggtattcagatgttctatatatcttgatagggtttgtgttaaacacatgtctgtacatttcaaaacttttacatttcaaaactcgttgaatggtagacttaaaaaataaaaataaaatttatacatggtgaaagttacaaatcttattttttagaaaataactgtaaatacatattgaattataattgatgatttgcatgttaaactgttgaggagtgaagtgtgcaaatgtccacaactttctttgaaatgcatcaaaaaaacattcatggaaacgggtggatatatgtataataaacacatagtatgtttgatttagaatccagatgttggagccaggcacagtggctcatgcctttaaccccagcattttgggagaccaaggcaggacgattgcttgagcccagaagttcaaggccagccggggcaacctggcaagaccatctctacaaaaaaataaaaaatgaaccaggcatggtggtgccagctacatgggagggtgaggtgggatgatcgcctgagccctgaacgtcaaggctgcagtgactgtgttcacgccactgcactccagtctgggtgacagaatgagactctgtctcaaaaaaaaaaaaaattgcagatgttgagtatatggatgtatactgtacattttttcagtgtgtccacatgtataaatattttcttaaaagctgcagaaaaatagaaattaatttttgttatgatactatctaaaccaacttcaaataaaatagatttacctgtactagaagatcagtaactaggttctctatcagttcacattggaaattaaaatataccttgtccttatttaatgaatacttatcgattaactaaaatttcaaagaagtgagcacagactttttttagtactacattgtgtacaattttcaaaggcttgccatttaattcaggtaatttcggctgacttttttcaacagactatttttagtactacattgtatacaattttcaaaggcttgccatttaattcgggtaattttagccgacatgaaggtgattagccttcatttattaaggtgtaaccatagcaaattaaagtatcttatttatacttgtattgctttctgtaatcaaataagtattatttggatatttgagtttagttttcaaagatttcatcaagttgttaaaagtataagtattgtctaaaagctaaataaactcatattagaaaaaaaaaacaacctagatttctagttgttaaattcagttacctgccacacatcctcatcatacttataaccttcactaggcatttgtcgaatttctcagaactcccttctctttgcttcttgaatcacctgcctttgtttattttccatcacttaacttctggataatcttttccctttccgcaacttcagttactatcaataggctagtaatttctatagttagacacagggtctcactgtgttgcccaggctggagtgcagtggtacaatcatagctcactgcagtctcaaactcctgggctcaagtgattccccctgcctcatcctcccaagtagctgagactacagacacatgccatcatgcccaactaattattttttgtagagacacggtctcactatgttgcctagagtgatctcaaactcctggcctcaagggatccccctgcctgggcctcccaaaacgctgggattataggcataagccaccatgcacagctgaaaatttaacattatttgcatttcctctttcttccctgaaacttcctaatttttctgtacagttgctctctctattagcagatactgcatctcagatttaatcacctgtggattgaaaatattggggaaaagacaataataaaaaataatacatttttaaaaatacaatataacaactattatatatagcatgtacattgtgttaggtattgtaagtgatgcagacatggtttaaagtgtatgtgaaggtgtagatatgttatatgcagatatatatatatataccattttatataagggacttaatcctgtggattaaaacttcacataccttacaagtctatgcttctgcacatggacttctctcctattccttcactgaatctcagtctccccatatctaccctataccttgtagcatgggaaatagtggcactcagatgcatttgccctgcgctctgcttctaagacacattgttcagatctctttaatagcattgttcagatccctttagtagcattgaccaagttgtataatacattgtttctgtaattaatccctgctagaatagttatcccatgatttattaatccattaagtattaaactcacatttagcatgtccattaatatctaacttatgggtttttgagatgtgaactaaatttacccctctctcctctgaatttagaactattaaggagaaacaagagtcagttacatatctaaatgttagctctagttccagtagagcttatttggagaactcatcttggatctggacttacctgctagctgatcatagtattggtaatggcatgtatcatctcttccatgtgtctctctcaactaataattcttcctcagaaagctaatcctgattcaccatgaaagatagggacaaaattaaaagaaaacagttaataaatgtttctaaaatctttactacagaagggccaatcaacaaatgtatccctattacattgataggcatgcagaagatgaaacatcatgatggttgtaaaatatgtggctttgttttaattctgaaatattcctgaaagtgaatatctttttaacattaaaataatggctggtgataaataatattatgaaagtttttatatgtcaatgactgcttttacttgagctattaaaactatagcctttgatgaaatactttttttggtgttttgggggttttttttgatgatgaaatgttttttggccaggtgcggtggctcacacgtgtaatcccagcactttgggaggctgaggcaggcagatcacctgaggttgggagtttgagaccagcctggccaacatggcgaaaccctgtctctactaaaaatacaaaaaaaattagccgggcttggtggtgggcacctgcaatcccagctactggggaggctgaggcaggagaatcgcttgaacctgggaggcagaggtcgctgtgagcagagatcacgccattacactccagcctgggcaacaagagcgaaactccatctcaaaaaatatatatatatatatatttttttaatcccaacttgcagtaaaatgtcattgcatttcaagttttttacccagaagatgttaacctgttagttaaaattccttttgggaagtagtgtgacaatagcagaatttaaaagtaaattattttcacataatttttttacatttaaaaaaagtaaggccatcaatacatgcttagagctgcacagtttttaatagagtaacctacataagtacataattttattgttgcaaattaaaataaagttgttctgataaaataatatttgtcctaatttaaaaatcatttatcaagaacagaattgatgactttgatatgttatcattatttgttatattacatagcatatttcatgcaaaaagcctttgagtccttcagaataatacatgtattattatactttttaacaagaaaacctaacatgatatgatgcaatcccttatacatttcaaaaataaatggagcaaattcaagcaaggatatactttaagaaatatgtttctacttacaaatgggctgtttaagattacatattagccctttctaatgtttttatcctccctaatttgttataacctcctttattttcacttctgccatcttttttaaaggaaaaataaagttatttcacattatacactttaatattttccagttgaaaatgaagatgaggctgaaagggttcttttttcctacggctatggtgctaatgttcccacaacagccaaaagacgactaaagcaaaggtaaaatcaatatatatttattttatttatctactcaagatgaatgtaattacatttgtgctttctgataatgtgctgagttcagtgacaaagtcctttattcttactctgcataaatattaaatttctcacaaaataaaacactaataatcatgtatttcatatatatttaaataaatttagtggtttgtagaagtgtgcataagaatttctgtagaattagattcgatgataaggaccttgtttttattttcacattaatttcagatgagctacaaatgctttgtatcaagaatattcagattaaaattcattgtgctttttttttttctttctctcatttttattcaactgcctacattccttcacatacatgttagggagagtgatttggaattaatgcatatattgtaattgaaactatgaaaggctttacaaaaccaagagaatatttagaagacccactagttatcttgtgagataatgtttaaaagtacagtcagccctctatatccatgggtttcacatgtgtgaattcaaccaaccgcttatcaaaaatattcgcgaaaagaatggatgattgcatctatgctgagtatgtgccgactttttttcttgtcattattccttaatacagttattcacatagcatttacattttgttaggtattataagtaatctagagatgatttaaagtatatgggaggatatgcgtaggttgtatgcaaatattataccaattgtatgtaagggacttgagcactcatggattttggtatccacaggaggtggagaatgtacactggaaccatgcatcccgtggataccaacagacaactgtacgctaacagaaaattatacctacattaatcaggtttccagttgacctgcctgatttttattcctaactcctctcttgcacgaaaatttatcctgctttgcaaaaacatctcacggccccattcactaccacatcaaatccatcaaatctaaatgtttctttcagacttccacgcgcctctataatgtagctctatctctccagccttatttgcctctctacccaaagtgcagtggatatacctatttctctgcctataaagcaactgttttctctgtaccacacagcagagcatttctcttatctcattagctatcatttcctgtgtaatttacccatctagatggaaagttcttcgaggtcagcaactacctatttttttttttttttttttgagatggagtctcattctgtcacccaggcctggagtgcaatggcacagtctcagctcactgcaacctccaccttccaggttcaagcagttctcctgcctcagtctcccaagtagctgggactacaggcgtgcaccaccacaccctgctaatttttgtatttttagtagagatggggtttcaccatgttggtcaggctggtcttgaactcctggccttggcctcaagtgatccacctgcctcggccttccaaagtgctggaaacacaggagagatccaccatgcccagtctagcaactacatctttttttttttttttgagacagagactcactgtgtcacccaggctagaggcagtggcacgatctcagctcactgcaacctccacctcccaggttcaagcaattctcctgtctcagcctcccgagtagctgggattacaggcatgtgccaccatgcctggctaatttttgtatttttaatagcgacagggtttcactgtattggccaggctggtctcaaactcctgacctcaagtgatccacccacctcggcctcccaaagtgctgggattacaggcatgagctaccacgccgtgccaactacatcttattcttgtttatttttcactttctctatctaactcagtgcaggatacctagtaaaattgtttcttcatcagagcgtttgagaattcagagttgcttttttttatgtgaactgatttagacatttagagacattgtacactaagaaaatgactcagaaaatagaacatctatatggctatctaaaatgatgtatcctcattaatatagtggtgaataaaaaaataaagtgatgtagaatatagagcactttatagaaagcaagaaaaggatgcttagaacttatggctcttaccagttaaactaaatatatgccaaattttgatcaaggcgagctgaatagaaagtatatatttgtagctggaatgtttaattctgtctggtgaggattcagatatttcagaattatgtatttttaaaaaatcagtcccattcccatttcctctaaaagtcacaatgggtaacctaggatattttgtaattttcagcatatctgtttcttagtccaatgttgcctaaggaagaatagaacatagttttgtgggtaagagacttatcagtagtaaatgataggtaaaatactaaaacttgaaatttaaagggaaaggtcatattcttttctctattttggcctctgaatccttcaaaagaatctttgttacaagaaaaaatagggctgggtgcagtgactcacacctgtattcccaacactttgagaggccaatgcaggcaaattgcttgagtccaggagtttgagaacagcctgggcaacatggcaaaaccccatctctacaaaaaatacaaaaacttagctgggcatggggacatctgcctgtagtcccagctaccctgctcaggaggctgaggtgggaggattacctgagctcaagaggtcgaggcagcagtgaaccgtgattgtccacttacgcttcagcctgggtgacagagtaagactctgtctccaaaaaaagaaaaacagaaaagaaagaattctgctgttagaactttgcttttcttagccccaaatgctgagttcttcagaatcacaaacaattattgctgttgcacattactatttttttaagaatttttaaaaatagaggttggtttttaatatttaaagtgaggatttaaggaaccacaactgattcatactcgaaataatgttaactgtccaaatattctaaagattctatcactgagctatctatgtgccttgaacatgtgcctaatgggcatgctattaatatctcctgccagctggtgccaggcattcttctcatggtgagccagagggttattttgaggaagtgcttctcaggtcatctaagctgaatgacgggaaagtaaggctagatatccaaagagaacatttatgcattccttcatgcattcaacaacttttattgagtgcttactgtatgcacaaaattgatcagtggcactaaagatcccaggttagggtctgatacatttctgaagtttgcaaagtccacatttgagttcataatggatatttgtaaagaaagcggtggctttgcgctctttttatgtttatttaagataaaagcagtataacctttgagagaattatatgtaatccttcacatttgaaattaaaggattggagccagacgcactggcatgtacctgtaatcccagcttctggggagcctgaggcagaaggatcacttgagaccagcagtttgaagctgtagtacactataattgcacctgtgactagtcactgcactccagtctgggcaacatagacagactcccatctctcaaaaaaagaaaagaaaaaaaaaatcagtggaaacttaaggcgaatgataaaacaactcagtcaaaacagtaaatgaactatatgcaaaataaagttttcattgtacatcagcctataccaaaatatattaaagtttcaaaggaacctattttccaactactacacaatagattccattcatattaaatttgatttaaaatcttatatgttcaacaaccagaattagatattttagggtaacatttaattggaaggagatttctgatttgttataacagtaatgtttattttattttatttttatttttattttttggagttggagtctcactcactctgtcacccaggctggagtgcagtggcatgatctcggctcactataacctctgcctctcaggttcaagcaattctcctgcctcagcctcccaagtagctgggactacaggtgcatgccaccacgcctggctaattgtttgtattttagtagagacagggtttcaccatattgtccaggctggtctcgagtgatctcaaactcctaagctcaggcaatctgcccaccacggcctcccaaactacaaggattacaggcatgagccaccacaccaagccatgtttatttcataaaattggaaaattactggtaatcctaccatccaaaataaccactcggaaatgtatacagatatatatatatactttcttatttaagatattattgcttgtaatttaatagtttaatttattgtcatagaattccattgtaaacattttcttatgtcattggatattcttcagaaaggtcatttttaatggttatccaaaacgttaatttttagtacttccatttttgagtgctatattttcattacttaattgtatagttactgaaaaatatcattagttgcctattgcaacccaggcaataccacaaaattaaaatgagaaaatggatgtgaagttcctgacatagagtagatctttagtaagtgctaggtcgttacaccttgatgtgtttgttcttaaagtaaattacatagttaattttagaggaaaagccagggttctgaaatcttttactaggcacaatttgagttttcatttaagacgatattgttttaaaattatacagaagcctcttgaaataattagcagggataccccccaaacatgaaactttctttagtatcagtccatttttaagagtctcactctgttactcaggtcggaatgcagtggcaccatcatagttcactctcatctcaaactcctgggctgaagtgatcctcctttctatcttcctgagtagctaggcatgcacgctgtacctggctaatttttttattttttatttttttgtagagacagggtcttgctgtgttgcccaggctggtctggagctcctggcctcaagcaatcatcccacctcagcctcccaaagtcctggaattataggcatgagtcaccacacccagcctattttttaaaactctttctgggacacaattatagaaagttacaagggcttatacaattaaagtagattaaaataaaatgggctctccttgactaaacttgaaaatctgaagtaatgttttcctttcagttgtgattgttttgaaaatagcaaacatgattttctagttacatgttttggttaagccctttaacctgccacactaaatggtgacacccaggcactaacatggtctttgtatatgcctctgtgtttgttttggctaatctgaatgtggagactgttctgacgttcttaaacctttcaaattgtgagattactgcgtactatagtttctctcgttttataaaaagctttaagttaaaactttcagtttactgaacttcataataaaaaaaaataaagcagaggaaactagcaaaattttgtgtatgacaaacatgttttcctttcctttattctcatatatatgagttctcatttttgtccttggggaaacttgtactcatttcatttgggatggctttaggaatagttctttaaaaagttgctgcttttctattcatgataaatttggaagtgtaagcctatagaagaaactagcgacagtctcatgtaactacagataatcagcatgagatcactgtttagtccttagtcatttccagctgagtagatagtataaggaccagccttaagctttttgaaagtgggatccttctggcacatgtccccttctttgcaaccatctttgatgccatgctagtagagacaggactctgatctactgaaaactgagaaagatcaaataactaatatagctaataagcatgcctcacatattcttgctcatttcgagttttggtaatagtaagacaccgtaccaatactgaagaacccagaacagagcgtcaatcctccattgtgctttgatatctcagatataaacaaaactctgtcatgtccacatttgctaggctaaaaatgttaggaaattgtatgtagtaatcagaaatacagactgccatggacagagccaaaaccaataacctgtatttggcatcaagaagtgctaagagagctaaaagataacccttggaggaatactaatttgaccaagtaacaggtgaaattttggtttaatatttaggtgtacaaccaatatactggtggtggtagtttctagctgatatcaaacttaatcttggtataagtgaaaatcatttaagcaattaatgtattaattacaaagaagtattgtatctatttaagtgtcccaatagatagcttataaaaagcattgctttcttgagaaattcagtacattctacaccaaaaataacatttagcaagagtcatttttcctgaccatgtttatagttattcttcttgaagatcttagcagggccaggcacggtggctcacgcctataatcccagcactttgggatgctgaggcaggtgaatcacctgaggtcaggagttcgagactagcctggccaacatggcaaaaccccacctctactaaaaagacaaaaattagttggcatagtggtgggcgcctgtaatcccagctgttccagagactgaggcaggagaattgcttgaacctgggaggcagaggttgcagtcagcccaggtcacgccattgcactccagcttgggcgacaagagcgaaactctaactcaaaaaaaaatttttttaaataaagatcttaggacttgttttcattgtatgtttattgtgttaaggaggcataaactcagctgtagttgagcagttcttcatttgtcttgttttgaatttcatttaaacactcttctttcttcccacttgtaagatcccagacttctaaagaggatccacctatagcaccaaatcactcaccaaagcaatatgcccacttaaagttttaggaggttgaatatagaagtggtgaattggtatctaagacatttgccttcttctttgtgcactttttaattgctagttcaatgcttaatactgagcattagttgtactttattttttttctttaattgcccattattggcaataggtgtaccttaatgttgaggtgctgcaacttcggagtatggtttctaacagtgtgttcatttgaacaaaatgcacttcaacaagatcagtccagaggtacttatcgctatgcacatgtctcacgcctataatcccagcactgtaggaggctgaggtggaaggatcacctgagcccaggagtttgagactagcctgggtaacaatgtgaaacacagcctctacaaaaattttaaaaatgagccaatcatcctaatgcacctgtggtcccagctatgtgggaggatgagctgggtcacttgagcgcaggaggtcaagactgcagtagccatgtttgcaccattgcacttcctggcctgggcaatagagtgagaccctgccagaaaaaaaaaaaagaagatttattaagtacctactctgataagctctacagttagataccacaggggataagactcctgtcattttatgagttgcatctgtttagggagaaatgattaacatacatgaaagaatatataaactttagtactatatcatatgttgggttaggctatgtcagtcagaggaatagagatccgtgaaggctggcacagtcaaaaatggaggaagtggaactcgacgggagcctttaaagaaaatcttcagactggaggaccaagaaaaggcagtggaaggaatacagaaaacatatttgtgagacgttaagtagagtagacatgaagggcaaataaggttagttccagtgagattatagagggtcttgatatttttaaataatttagagatagagtaaaactaaccatgaaggtcagatttgaaagtgagtgggaacaggatatagacatcagttcactatgtaagaaatacagatgtctgacaaacatgaaacaatgcttaatctcacaaataaatttaatttaaaacaggattttatgtttatctataaggttagcaaaacttccaaagattgacaatgctcagtattggttgggttatgaagaaacaggagatatgaatgaacaggaattcattcattcaatagataatttctaagtacctcctttgtaccaggtatttattgttgaactgtaacaggtttttatattttctggattcaagtctcttaactgatatgtgataagaaattttttcttccattctgcagattgtcttttcactgtttttttccttttttctttctctctcttttttttttttttttttttgagacggagtctctgttgcccaggctggagtgcagtggtggaatctcagctcactgcaagctccgcctcccgggttcaagtgattctcctgcctcagcctcctaagtagctgggattacaggcgcctgccaccacacccagctaatttttgtatttttaggagagacggggtttcaccatgttggccaggctggtctcgaactcctgacctcaagtgatctgcccacctcagcctcccaaagtgctgggattataggcatgagccaccgcacccggccctgtttttctttttcatgacaaaactgaaatggttaaaatctttttactttcttaatggtgcattttgaagcccagaattttaaaattttgatgcagtccagtttatccaattttttttgttacttatgcttttgctgccctgagaatcttttgctaaatctaattttgtgaggatttactcatatgttttcttctaaaagtttatagttttagcttctgtatttaggtctttgatccattctaattaattttttggtatcatatgaagtaagggctttgtactgtttattaatgtggctactagaaaattttaaattgcatatgtggcttgcattatatttccattggacaaagctgacctagaccagtggtctccaaactttttgatacgaatttttattgggaaaaaatttgagtacacactcagcaatatatgcatatgtattcatatttatttatagattatgtatgcatgtgctatcatatgaatagtatgcacataatgatataaaacctacacagcaaatgaaaacttaagataatttaacattaaaataaatgtaagtaaaagttcccacagttcaagaaataattttgcacataactacttttaaagaccactggtctagattatgatcataaccttctaaatgactgtagtcttcttccttctgcaggccatcctgcacactactgatagagcactctttctaaagtgcgggccagatcgtgttatgtctaaccaacttcaggataaaatccaaacatacaaggcttttcataaaatatctctgcctatatctctctagcttcaaccctcaccatgcaccatatattattgatctatactctactacttagaattttccctagcacttcatcctctacataggcatttccctctacctaaaatgctgtttctctgcttcttcaccagattagttagtatagtttttattccttagtggtatgccttttcttagcatttagcatactacagtaatttttaaatttgcctgtcttcctcagtagactattagatcttcccagtagatattatgtattctcagtgcctatgcagattataggtttttaatacatgtttcttcaaaggaagtgttcatgaatatttttcgaatgaattaatgagtgtgtttcttctaattcaccctgcttttctgcagtcattgatattcatcaccaagaaaaaatagtaatttcctttttttttttttttgaaacagagtctcactcagttgcctaggctgtagtgcagtggcacgatcttggctcactgcttactgcaacctctgcctcccgggttcaatagattgttgtgcctcagcgttccaagtagctgggattaaagatgtgtgccactgtccgggcgtggtggctcacgcctgtaatcccagcactatgggaggccgaggtgggcggatcacgaggtcaggagatcgagaccatctggctaacatggtgaaaccctgtctctactaaaagtacaaaaaattagccgggcctagtggcgggcacctgtggtcccagctactgaggaggctgagacaggagaatggcgcgaacccgggaggcggaacttgcagtgagccgagatcgcgtcactgcactccagcctggtgacagagcaagactccaactcaaaaataaaaattaaaataaaaaaaagatgtgtgccaccacacccagataattttcgtgtttttagtagaggtggggttttgccatgttggccaggctggtctcaaactcctggcctcaagtgatctgcctgccttggcctaatttttttttactgtttttgttttactgtaagtattataatgatgaaaaacagttatatttcttgtttctgctgtgttcttttgcttaaatatatctttatatttcttttcattaaatcttaatataatctcttatatccttaataatacaatcttaataaatctgagtataatcttttaatgaaagattttatattatcttttgttcttttctgtgtatgtgtgtttgtactacattagtgggctaaatgggtcttttagggcaactgagaactttaataccatttctaatatatgtgtgtatatatatatatatatacatatatatatatacatatatatatatacacacatatatatacacatatatatatacatatatatacatatatatatatatatatacatatatatatgaggaaatgtgttttactgttcttacaactgacttagaggtgagtttttaaaatgtgaaccccatatatactggagaccaattgtaccatgttgtcttctacattattatcattatgcatcataaatgacatcaacagtcatactaatactcacggtccttcccgtcaccatcaattctcagaaagtttttctcagtaaaattgtactataaactagtaatcaaagcactgtagagtatatttgtaagcaatttgaagataccttagatactttccttctatttagagttgattttccttacttggaatctcccagtcaaaatcagggaaattcctttttgaagaaagtagtcctggtgttaaggcttaagcactagcataccaagaatttcttttttttgagatgaagtcttgctcttgtcccccaggctggagtgtgatggcaccatctcagctcattgcaacctccgcctcccaggttcaagcgattctcctgcctcagcctcctcagttgctgggattacaggcgcctgccaccacgcccagctaatttttgtatttttagtagagacagggtttcaccatgttggccaggctggtcttgaactcctgacctcaggtgatctgcctgcctcagtctcccaaagtgctgggattataggcgtgagccacctcacccggcaagaatttcttgagtcagtgttttatgacttatgatatttttattggtaagtggtatcaccctatctgtataagaacattatagaattcccaaacaaaataaaagcactcaaaccaaatgaacaatttaatattattaaacttgatgtcttcaagtcattatcttgttcagattgttggtaatatgtgacctctgcatctcattttcttgcatgtctttgtcttccatttcattcatttgtaactctagttctgtgtaattgcatttgattgtgtttattgttctatactgagtatacacatacttgttctacaccttcaacatatttattgaaaaattaccatgtttaagtgaccctagtgtgaagttctgtgggacacaaaaagataaaaaaaagttaacacctaacatgtatgaagagtaagaaagcaagaataaaaatgtgaataaagatagctccaagattttttaattaacctaataaaaatagagctaatgataaactgatgcttgcaaacgtataatggaatcaacggattttaaatgcaaaattcacattaaggcttattttatttgtagaaatcttgttattttagggtcaaattagagagaacttagtatatttttattgggaaatgaagaacaatatagtcataaactgtaaactccttaaaaatttataaagagagaaagattaatggttccctaaggttgaatttgaggagcaaaggaggaagttggaatgtggggaggatggagagtgactggtaatggacacagaaattcttcttgagataatgaaaatgctctaaaattagattatagtgatagtggcacaactctaaatatactaaaaatcattgaattgtacactttaaattggtggactttatgatatttaagttgcatatcagtaaaattgtatgtcagtaaagtttaaaaaaaaagtggttgtcaaaaaatgaggactatatgctttttccatctctaatgccagttgaaagaattttagatctaaacaagcaactcaaatcactttataaacttttgccagaactcatcttttttatttggtatgagttcttagaaatagatatatagaatgatatttaacactatttattattattattatttttagagacagggtctctgtgtcaccccaggctggattgcagtggcacaatcctagctcactgtaacctcgaactcctgggctcacgtgatccccccatctcagcctcccaagtagctggaaccacaggcatgcaccatcatgcccagctaatttttgtattttttgcagaggcagggtctcaccctgttgcccatactggtcttgaattcctggcctcaagtgatcctcctgcctcagcctcccagagtgctggggttgcaggcatgagccaccgcgcctggccttaacattattttttagaatgttgtctgcatttctttatctgatattgggaaatattaaaatacaatagaattttttctgccctatgattttatttaaagcacagttatcttactttttgtcattataaaacattccatctaggattccatggattctgcaattcacagattaataggttaactagtataaaatatgaaaatatgataaatatgaaaatgttaagttactggaaatgcagagaggttctttggagcaatatgtcttctcaaaattattagcagttctttaaagaaatataccacttcctcccaccatagttagaaggaatagattttattcttaaaattgtttcttaaaagtagaattgagatgtttcatatgtaattttaaatactaaaggtcagtgcaataagttatggtaatgcagagcatcagagggagtgatttttttcttttagtacagaagcttagcctttactatagacattctctaagttttatatatctttttcatctccactttcaattaaaaacctcatttttgttttatattataacatgcattatgttgtttaaagtaaactctgatacttctcaaagtgataagctaattattgtttgtaatatttcaactaattttctgatttgtaattggaaaatatttataaaagtggagacaagctgtaaattgctgtattgtggtcttttcaagcaagtgttataatgttacctctccacttttatagcaagggctaaaaaccgttactgcagtaatcagtctatcacggttatgttttaatgttgttactctcataattctgagttgtggggtattggtcttccactactggtgcctgaaaatattatttgactctatattttttctgttaatatttaagtataattaggaaatgatgtctattttcaagtacacaaacacattttgaatattttgggcagtatttcacttttaagcattaattttcttatttcatttgcctagtgttcacttggcaagaagagtgcttcaattagaaaaacaaaactcgctgattttaaaagatctggaacatcgaaaggaccaagtaacacagctttcacaagaggtaaataacttaaagaaacccatatgaagaatcacagtattcattttaattgtttgtaactcttttatttttctaagcagttttaaaataagctgtttgctagtacaaaatgatttcacaatttatgaaactaactgaatgttaaggccataaaaaacaacttacagtgtatggcaaaactgagaacaaaagggagattaaatgcccagactaagtataaatgcagactagacagacagagctttgatttctgagaatatcaactggtaaaacaggtttggcaaactttggtgacattttaagttttttactaatcatttttaagatagatttggtttttacctctgtgtttaatgagaaatcactcctctgttaaatttaactttgtttacacttagaaaatcaggctcatattgcttctttttcttagccttatgtcatttaaactacgtatatatatatatatatatatatatgtatgcattttacatagcatttttaatcatcttctgatgtcaagatctaattttatttttctgtacttttgaaatgcgagtcataaaacaatttaaaccggaggtactactttgctaatgttccttttatttatttatttaatattcctgagtgtcaacataagaagtttttccgtttttttctttgtttctttctttttttttttttttttttctgagacagggtctggctttatcgcccagactggagtgcagtggcatgatcacagttcattgcaacctctgcctcccagggtcaaggactcctccctcctcagcctcccaagtagctggaactgtagctacgcactactgtgcctggctaatttttgtatttttttggtagagacagggtttcaccatgttgcccaggctagtctagaacttctgggctcaagcgatccacctgcctagggcctctgaaagtactgggattggagatgtgccactgcacccagccaagaagttaatattttaaaagttttaaaaactatttctcttataacaaagggttttttcaagtcatacattaaataacattaatatatgttgtttattatttgttttcttaaggatctgtttatattctttagagtgtcttttcatactataacattaggaggatctttatcctcaaatttcgaaagaccagaaatacttcattttattgcagttcctgacacatagttaatgcttggggttgacacagtggtgtgttggtaaatgttaacagccagctttccaagagggatatgagggagagcttgatttgtaacattggcttgtatctcttttataaatactcccaccatggctgacttcaaactaccaacctaaggttactgaagatggagtaaagattgtcagcagcataccagtacttaatgtttgcaccatacagatacaacagacataggtaaactcaagagcacagataatagtaaaataattttaaattgacaaatttgattgtttttacctttgtttttaataaaatgtattttactataaatttaaataatttagtttagtttttaatgctagttgtgtttgatagccagcccacaaaattcctaaaaattttcaggattcatttgtacttcattcttttcattgctgagtaatttctttgtgtggatgtaccagtttgtttatccatttacttgttgatggacattggagtcatttccagtttttggaataaagctcatatgaacattcatgtacaagtctttgtatgaaataatagagaactcctacaagctgctgcaagccaagtccagcacactgctaggtggaagcagaaaagataaataaataaacaaacaaacaaacctctgtttgctaatatattgtagatccctcatgttgcctttaatttcacagtaattttcaaaaatattttttaaaagtaaaatattaaaatacatgccttcctgagcatttcagttaattgaaataagaatttctaaatgtgggctggatgcagtggctcatgcctattatcccagcactttcggaggccaaggcaggagagtcacatgagctgaggagtttgagccttggctacaaagcaagatccaccatctctaaaaataaagaagccgggtgcactggctcatgcctgtaatcccagcactttgggaagccaaggcagggggatcacttgaggtcaagagttcaagaccagcctggccaacatggtggaaccctgtctctactaaaaatacaaaaattagctgggcatgatggcacatgcctgtaatcccagctacctgggaagctgaggcacgagaatcacttgagcctgggaggcggaggttgcagtgagctgagatcgtgccatcgtactccagcctgggcaacagagggaaactctagtctcaaaaataaaaagaaagaatttctaaatgtgaacacacgtctataaattgttgggagaaaatgtaagaaattaagtgttaaatgctcctataattaagtataattaactttgtatgaaaccatttttaaataagctatggcttatattgagaaaaagacttaaatgctgaaatatttatgatgtgaaatggtatggtgcctggaatttgctttaaaatatttcatgagaaaaggaggaagggcttaacaaataaaacaagaatcacaaaatgttaataatgtttgaagttggatgacgtttacatataggtttagtagtgagttctggacttttgtgtatgtttgaaaaaatttcataagacatttggagaaagaatcagtaaccctatattaaaggatctatgccaacttcagtatataacttttcccttaagattgaaaataaaatatttaaagtattctatggactttacttttttctgctttacaaaaattatattgcttacactgaaaataattatataaactagatgaatgattagtattagattgctgttataacaatagactattcataatagatggtgaaataatacagatggaaattatctcaggatctttattctttattttattttattatttatttatttttgagacagagtctcgctctctcgcccaggctagagtgcagtggtgcattcttggctcactgcaactctgcctcccagtttcaagtgattctcctgcatcagcctcccgagtagctggtattacaggtgcacgccaccacgctgggctaattttttgtatttttagtagagataaggtttcaccatgttggctaggctggttcaggatctctattctttggatcaggttaaatatttaaatcagtttggcctttttgataatacacagatgaaatactgataactaatgttagaattaccattgagttaaacactattcagattatgtctgagattgtacataagtgaactgacaaaatgacaatgctaagtaatacccaaaataaaaacaaatactcccctttttagcagctttattgaagtataattgatatacagtaaattgcacatatttaaggtatagtgcagtttgacatttggcacatgaatatacctatgaaactatcaccaaaatgaaggtaataaacacatatatctccccaaaagtttccatatgcccctttggaattcttgcctcccaaccttccccatctcagtccctaagcaattactgatttactttcagttactgtaggttagttagttagttagtttgtttgtctgtctgtttgtttgtttgtttgtttattgagacagagcctcactctgttgcccaggctggaatgcagttgtgcaatcttggctcaccacaacctctgcctcctgggttcaagcaattctcctgcctcagcctcccaagtagctgggactacagccatgtgccaccattcccggataatttttgtatttttagtagaggcggggtttcactatgttggccaggctggtctcgaactcctgaccttgtgatccacctgtctcagcctctcaaagtgctgggattacaggcgtgagcaagcctagcttgtatttcctagacttttatataagaggaatcatatagtatgtatatgctttttttaatgtctcctttcactctgcataattatttcaagatttatttgtagttcatttttttcattactgagtaacatttcgttgtgtggaagtaccacagtttgtttatccattcacttgttgatggacattggagtcatttccagttttctgaataaagctcagatgaacattcacatacaagtctttgtatggacgtatgctttcatttctcttgggtaaatatctaggagtagactggccggatcatatcgtaggtgtctatttgacatcttaagaaactgctaaactgtttcccagatgtttgtaccattttacatttccaccaataatgtatgaaagttccaatttttctacatccttgccttgatatggttagtttttttatccactataatgggtgtgtagtggcatattagtgtggttttaatttgcatttctctaatgacgaatgattttgaggatcttctcatttgagtttctttgccctctgtttatcttcttgggagaagtgtctcctcacattttttgtctgttttatcaggttgtttgtcctcttattcttgagttttgagtattatttatatatcctaaatacaagtcatttatcagatatatgatttacaaatattttttcccaccctgtggcttatcttttcacctcttaatgatgtctttttatttatttatttatttatttattatttatttttagagacagagtctcactctgttgcccaggttggagcgcagtggtgtaatcatagctcattgcagcctcgaactcttggactcaagagcctcaaactattgggagccttagcctcccaaatactaggactgcagttacctgcaaccacacctggctaattttttttatttttttgtagagatgaggtctcactatgttgctcaggttgtctcgaactcctgggctcaagtgatcttcccaccttggcttcccaaagtgctgggattgcaggtgtgagccatcccacccagccaacaatgtcttttgaagagatgcttttatcaagtacagttcatcactttgttcttttatggattgtgctttggtgttgtattttaaatatctttgcctaacctagggtcataaggggttttgtctatttttaattctagatgtttcatagttttaggtctgtgattcatttttagtttaatttttatactgagtggaagatatagattgaaattgatatgtttgcataattgaaacacaactgttgtagcatcatttgttgagaaacaatcatttatgtgtgagactgttctcgactctctgttccagttatctgtctttatgtcaataccacactatcttgattgctgtagctttataatatctggaaatcagatagtattggtcctccaatgctgttcattttcaaagttgtttagctgggtgttttttttgcatttctatatgaattctatcatcagtttgttaatttttttttcaaaaactagctgtgattttggttgacattacgtaagttgaatatatagatgaagcagagaaaattgacatcttaatattgaatattctgacccatgaacatactgtatctttacccttatttacgtcttctttaatttatcttaatactattattttttagttttcactgtataactaaaaactgtcaagtgtttgacatcttttattgtcaaacttttacagtgaaaactactaaaacattagcattagcaaagtgtatgtttttccagccttcttcttttaacccgtctgacaaaatatgattttcaattggagatttttttagaacacttaacatctagtatatttattgatatggttatgttcaagtttttcatcttgctaatgttttctgtttggcccatctactttttattcactttatttttcttgtcttcttttggattaattgaatttttttatttcattttatcttattgttgcttattggctataactttgttatttcagtggttgatttagattatagtgtatatgtatctttaacttatcaccatgtagctccaagtgatatttagtaaaacatatggtataagaaccttacaacagtattcttctatttgttcccccagcctttgtgttcttgttgtcgtacattttatttatacacatataaactcccatactacattactgctattattacttaaacagtgataatcaggctgggcacagtggctcatgcctgtaatcctagcactttgagaggctgagacaggtggatcacctgaggtcagtagtttgaaaccagcctggccaacatggcaaaaccctgtctctactaaaaatacaaaatttagtgtggtagcaggcacctgtaatcccagctactcgggaggctgaggcaggagaatagcttgaacctaggggttcgaggttgcagtgagccgagatcgcgccacttcactccagcctgggcgaaagagtgaaactccatctcaaaaaaaaataaatgaaatgaaataaacagtgataatcttataaagagatataataatatgagggaaatatgttaaatttaaatagttaccataccttgtgctctttattcctttttgtaggcctaaatttcaaactgttatctattccttctggttgatgcacttcctttaacaatttttatagagcaggtctatggtgatgaattctgtttctgtatatagcaaaaagttgctattttgcctatttttagtttttttgtttttacatttctgactatttttgacaaaagtctaggttaaaatgcaattctcacagatatggaataaggccaaattaactgaaagtagccatttaagagtttactttttttattgtggtaaaattcagataacaaaatttaccattttaaccattttaaagtatacgatttagtagctcatggtatgtgtatggtgtttcatacacagcaccactatctagtaaaagagcatttccatcacctgggaaggaaaccctgtacccattaagcagtgactccccattcccgcctccacctcagtcccccacaagcaataatgtgctctctctctctctatggatttgcctgttctggatatgttatataaatgaaatcatgcaatatttggccttttgtgtctggctcctttcacttagcataatgttttcagggttcgtattttgccatctatcagtgctcagttcctttttatgactgaataatattccattttgcagattaactacattttgtttatccatcagttaatggatttttgtctgttttgaatagtgctgctgtgaacatttcatgttcaaattttttgtttgaacacctgttttcaattctcgttaagtggaattcaagatgaaatggtaattctatgattcacttttcaagaaactgcaaaactgtttttcgtagtgactatgccattttacattcccaccagccatttcaggggttccaatttttccacatcctcaccaatgcttatttttcatttttttaactctagccatcctggcaattacaaagtagtatcttctaatgattttgctttgcatttctctaattaggttaataatgttaactatcattttgggttcttattggccatttatatatcttctttagaaagatgtctgttcgagtcatttgcccacttttgaattgggttgtctttctgttgttgagttgtaagagttctttatatattctggacactagacctttatccaatacatgatttgcgaatattttctcccattctgtgtgggttgtctttcctccacttgttagtgtccttcaaggcacaaaagtctttaattttgataaaatctactttatcttaggtgtcttgtgcttcacctttggttttgtgggttttttattgaggtgaaattcacatgacataagattaaccattttaaagtaaaccgtttaatattcattcacagtgttgtacaatcactatctctatctagtcctaaaacatgttcatcaccccagaataaaaccttgtacccattaagcacttaatacccactcctctttgcccccaccctctgacaactgccaaatcactttatttctgtggatttacttcatctggatatgtttcatataaatggaatcatacaatatgtgacgttttgtgtctggtttctttcactgagcatactgtttttgatgttcatccatattgtagcatgtatccagtactttaaccctttttatggccgaataatattctgttgtgtatatttaccttaatttgtttattcatttatcctttgatgaacatttaggttatttccaccttctgactattgtaaaaagcgctgctatgaacacgcaaatacaagcaaatgtatgagtacctgttttcatttcttttaagtgtatacctgggaatggatttgctgggttcacctttgttttttagaaagatattttccctgggtaaggaatttgaggttgacttttctctccctctctctctttttcagtagttgaaagatactgcttcactcccttctagtttgcatcgtttctgccaagatattgccgtcatccttatctttgttcctctctaggtaatgtgtatttctttagctgcttttaagagatttttagtcactggctgtaagcaatttgattatcatttggctttctggagttttcttcatgtttcctatgcttgggttttgttgaacatcttacatatgtgagtttatcaaatttataaatttcttaaatttttaaatacttcaatcctctcaccttcctttgaggacttcaatgagatatatattaggttgcttaaagttattctacaacagaacaaatgatgttctcttcagtttttttcagtcttttttctgcttttcttttgaatagcttcttttactgtgtcttccagttcactaatctttttttcaccactgtataatctgctttcagttcaatccagtttttatctcagatattgtagttttcatttctagaagttcaaattggatcttctttgtgtcttttaggtctctccttaacattctcaaactttattttctggaatatgtgaaatataatttcaataacttttttatattcttgcctactaattctattattttgtcatttcatggctgccttcaataaatttgaattttctcattatatatcacattgttcagcttctttgcatacgtagtaattatttactggatgccagaccttgtaaattttaccttgatgctatatattttgtattcctatatgtttttgttagctttgttctgggacatagttaggtttcttggaaacagtttgattcttccaaatcttgcttttaagcttttttaggcagagaagggtttatcgtaaggccaatttctcccccattactacaaccaaactctttgagtattccatgtcctgtaaattgtaaggttttctactttggctgatggaaataagcactatgccttgcccatgttcacttcagagattgctcctaccaatcttgtctgtagttctgtctcctgtctttatacatatgcactgttctgtgccaggtaaatacttaaggggcactatctgtaaattgtcagagttctgtctctttgcagctcccttttcttcagtagtctcccatatgaactgtaaccaccttggttattacttctatcaacagctccttaactcagggaatttgacaggctctgccttaattctccttcccagcaccacagcttgaaagctgtctctagtcaataaactaaggcagtcatagagtttaccttgtttgtttcctgtgtgtcagggatctccttcattgcatgatgtccaatgtctttcgaccgttgttttattagttggtccagtataacagagaaaacaagttattcttttttgtgtatttgtgtatacccactaattctcaagaaactgccaagtttagttaagagtcaagtgtcagtgtggagtttgttaaacagtagaaaatccagaatcataaagtgtgccacattactgccaacagtaaggcagctaagaattggtctttcttagctgcctcaaaccttgatatatgctctccttctagttattcagtaaatatttatcaatttcccactatattcaacaactgatgacaaaatagacatggtttttcacttctaacataaccaaccttattcacaaaggccttattttctactgtaagcacgcagagatttatcttttacaactgacttaatttcaggaagcttgtctagaaagtgggacatgcacagtcatcagtaaccacatggcaaggtttagctacctggaattttgtacctagaaggcattgctagatttgaaagaggcgtcaaggtgcataggtaaaataaagtagacctatatgtattaactttgaaagaaatttatactgtattgatgatttttcaaaaaacaaattgcagaataatttctgtttctctgtttgggttttaatatatttgtgtgtgtgcatgtacccagcatatacagagaggatgggattgtgtttctgtttaaacatacagaaaatgaaaaaaatctgaaaatatgtcatgcaaaggggacacaaataccactagtcatggattagcaatatgaaatgagctttattggtataaagtaagtacttgaagtaataaaacatttatctctgccccttgagttgcctgacccattcttctgcctctaacaactgctaggagtgttcttccagcatccccagtgagctcagtctcttggaaagagtctgtggcacatacaactcacaggaccacacctcaacattataaaggaggagactcacatacctaccatgtggccctaaacaatctagatctgattaaatttcaaggtcaaccatatttctaagacttcaatgatgtaaaaaaaaaaaaaaaaaaaacccactgttttgtgtaccactgtgaggaagagtggaggatgctgctgattaaactgtgatacaatgctttgttattactttaatttttttcattttagacatactttcttttagactttaggcagtgatttttgtcctatattgcacaactctgtttctgtgtttttcttctgtttcaatgccgaatcccttgtgatctttttagatacttaaatgacaattgtactcagcctatgaaggactagccatactcaaaactcaattgaagtaataatatgaacagccaagaccaattttttcatgcatgggctttatcaacagcaattataagatgtatgctattttcatagaagagattaaaaacagtatgatttatagggttcctttgcctttcaaaatgtttgtctgtttgttgatattaaaaatcctttagtaggctgggcacagtgggtcacacctgtaatcccagcactttgggaggtcaaggcaggcagataacttgaggccaggagttcgagacctgcctgaccaacatgatgaaaccctgtctctactaaaaatacaaaaatcatccgggtgtggtggtgtgcacatatagtcccagctacttgggagtctgaggcaagagaattgcttgagcctgggaggcagaggttgcagtgagccaagattgtgtcactgcactccagcccaggtgacagagcaagactctgtctcaaaaaaagaaaaatatcgtttagtaaagaacagtggcatttatttcattactagaaatacaaggcttaaaaaataacacttagatgagatactacattgcctgaatttttttttaatttagcaagtgaactttaattcatcagcctatcaaaagtctttaccttactagaataatagtagaataatagtcaccagaacctgggaaggtgaagatggggaatgaagagagggtggttaatggatgcaaacataaagttagatagaaggaatgagttgtagtgtttaattgcacaataggatgactgtagtttacaataatttattgtatatttcaaaatagctagaagatttgaaatgttcctaatacaaagaaatgacaaatgtttaaggttattgatgtcctaaatatccctatttgattttcacatatgcatgtatcaaaatatcacatataccctatgcatataattatgtatcaatttaaaaattaataattttttaaaagttccctatccaaaactgtcctctgtgctgtcaatcatgacttatttttaaaggcccatggcctacaagacaatgtccagattctttagcgtggcatagatggccaatttgattctaatctacttctcatcctcatcttctgtcatctcccctcttcccaaatcttcacttgctgtctcctcccaccactttgttaccttcgtactcctcagtctcctttgttgacttctttttctctgattatgtcttaagtgttgacatgccccagggttctaccttgtttgtttaggggaaaaggggaaaaagccaagaactttcaagttaggcagactggttatatgactttaggcaagttatctttttgtaagcctcagttttccaaagtgtaagtggaaataataatactatattgcatgtttgctccaaaatgagagagggttcaatctaagatgagcacttagcacactaactggcatatgttaatcactcggtaaatgtaggatcttatttctgttctagagtttcatttatttttctcttgctggccataatattaataaaataagtatttttcttgtaaatctggcaatttttaaaggaaataataggtccagaattggagtaaataatgattttgcctatataggagtattcagaataagccgggtgtggtggctaatgcctgtaatcccagcactttgggaggctgaggcggggtgatcacctgaggtcaggagttgaagaccagcctggccaacatggtgaaaccctgtctctactgaaaatacaaaaattagctgggcgtggttgtgggcacctgtaatcccagctacttgggagactgaggcatgagaatcggttgaacccaggaggcagaggttgtagtgagctgagattgcaccaccgcaggactctagcctaggtgacagagcaagactgtctaaaaaaaaaaaaagaagaaaaagaagtattcagaataaacaataaaatcaattttaacacaatagcaaaatgtttaataataatttaaataatttctgctcttatcaaatgcagaagtgtatttaattgcatacaaactaagcattttaggagaaaagtgaaaagctgcatttttgttttattttttttaattaagacaagtattcattgatgaatagtgtttatatgatcaaaacataaacagtgaatgttcttgttttttaatttcaacttttattttagattcaggggtacatgggcaggtttattatctgggttttttgttggttggtttttttgagatggagtcttactctcttgcccaggctggagtgcagtggcacaatctcggttcactgcaacctctgcctccctggttcaagcgattctcctgcctcagcctcctgagtagctggaattacaggctcctgctacagtgcccggctgatttttgtatttctctgggtatattatgtgatggtaaggtttggagtttaattgctactgtcacccaggtagtgagcatcatacccaatagtttttcaacccttggccccctctccctctccccattgctagttcccagagtctgttgttcccatctttatgtccatatgtatgcaatgtttagttcccacttataagtaaaaatatggagtatttggctttctgtttgtgcattaaatcacttagggtagtggcctccagctgcatctgtgttgctgcaaggacacaatttcattcttttttattgctgcatagtatcccatggtgtatatgtatgataatttctttatccaatccattgttatgggcacgtaggttgattccatgtcttcattattgtaaatggtgctgtgatgggcatgtgagtgcatgtgtttggtagatgatttatgttcctttgggtttatacccagtaatgagattgctaggttgaatgatagctgtgtttcaagttctttgagaaatctccaaactgctttccacaatggctgaactgacttacattcctaccaacaatatacaagcattcccttttctcctcagcctcaccagttttgactttttaataaaagctattctgattggtatgagatggtacctcattgtagttttgatatgcatttttctggtgattagtgatgatcattttttgaaaaactgttttttaaaacaaagaaaagcttcaaattaaccagaattgttatattcaaattagagaatatgaattactgacaaaataaatttgttgaatcaaaaagccaaagctaagcaataataataagacaaaaatgaatataaacatttaagagtaatgatatcatagtctattatcaattttcagtaaatataacaaaaatgattatacgaatatatatgtataaataagaatagctagtaattttgagagcctacttaatgccagtcatagcactttatgaaaccacataagttctgcttgggttaactggactttccagaacatgaaacccctgagttggccagtgtgtccagacttcttgaggcctgaaagaagctctccaactgagtgagcttccattaggttggcaagtgtattagtccgttctcacactgctaatgaagacatacctgagactgtaatcaatgaaggaaagaggtttcattgactcacagttctgcagggctgaggaggcctcaggaaacttacagtcatggtgaaaggggaagcaaacacgtccttcttcacatggtggcagcaagaactgccaagcaaagggggaaaagccccttacaaaaaccatcagaccttgtgagaactcactcactatcatgagaacagcatgagggtaactgcccgcatgattaattacttcccactgggtccctcccacaacacatggggattttaggaactacaattcagggtgagatctggatggggacacaaaacctaaccatatcattctgcacctggaccctcccaaatctcatgtcctcatatttcaaaacacaatcatgcctttccaacagttccccaaagtcttaactctttccaacattaacccaaaagtccaaggccaaagtcttatctgagacaaggcaagtcccttccgcctatgagcctgcaaaattaaaagcaagttagttacttcctagatacagtgggggtacaggcattgggtaaatacacccatttcaagtgggagaaactggccaaaatggaggggctacaggccccatgttaagtccaaaatccaacaggacagtcaaatcttaaagctccgaaatgacctcctttgactccacgtctcacatccaggtcacattgatgcaagaggtgggctcccacggtcttgggcagctctgcccttgtggctttgcatggttcagccctgctcccagctgctttcatgggctggcagtgtctacaacttttcaggcagacagtgcaaggtgttagtagatctacagttctggggtctggaagacggtggccgtcttctcacggctccactaggcagtgtcctagtgtggactttttgtgggtgctccaaccccacatttcccttccgcactgccctagcagaggttctccatgagggctctgcccctgcagcaaacttctgcctgaacatccaggagttttcatacatcctctgaaatctagtcagtggtttccaaacctcagttcttaacttctgtacccctacctgcatgcccaacaccacgtggaagctgccaaagcttgagacttgcaccatctgaagcaatggcctgagctgtacattggcccgagctgtacattggccccttctagtcatggctggagctgaagcagctgggatgcagggcaccatgtcccgaagctgcatagagcaggggggccctgggcctggccccaggaaaccatttttctctcctagggctccaggcctgtgattggaggggctgctgtgaaggtctctgacataccctggagacattttcaccattgtcttggcaattaacattttgctccttgttacataggcaaatttctgcaagaggctcaaatttctccccagaaaatgaggttttcttttctatcatattgtcaggctgcaaattttccaaattttatgctctacttcctcttgaatgctttgcctcttagaaatttttcccccggagtgtaaattagttcaaccattgtggaagatagtgtggcgattcctcaaggatctagaaccagaaataccatttgacccagcaatcccatcattgggtatatacccaaaggattataaatcattctaatataaaaacacgtgtacgcatatatttattgcagcactattcacaatagcaaagacttggaaccaacccaaatgctcatcaatgataggctggataaagaaaatgaggcacatacaccatggaatactatgtagccataaaaaagttcatgtcctttgcaggaacatggatgaagctggaaaccatcattctcagcaaactaacacaggaacagaaaaccaaacaccacgtgttctcactcataagtgggagttaaacaatgagaacacatggacacagggaggggaacatcacacaccagggcctgtctcggggtggggagctaggggaggtatagcattaggagaagtacctagtgtagacgagttgatgggtgcagcaaaccaccatggcacatgtatacctgtgtaacaaacctgcacgttctgcacatgtatcccaaaactgaaagtataatttaaaaaaaagaaaaagaaatttcttcccccagataccctaaatcatctctctcaagttcaaagttccacagatctctaaggcagcagcaaaatgccaccagtgtctttgcatagcaagagtgacctttactccagttcccaagaagttcctcatctccatctgaaactacctcagtcagcctggacctttttgtccatatgaccattggcattttggtcaaagctctaggaagttcaaccagtctctaggaggctccaaattttcacacattttcctgtcttcttctgagccctccaaattgttctaatctctgcctgttactcggttccaaagtcacttacacattttcaagtatcttcacatcagtgccccactacccagtactgatttactgtattaagccattctcatgctgctaataaagacatacctgagactgctatctataaaagaaagaggtttaattgattcacagatccacagagctggggaggcctcaggaaacttacaatcatggtggaagggtaagcaaacaacatgtctttcttcacatggcggcagcaaggagaagtgcagaacaaaggggggaaagccccttataaaaccatcagattttgtgagaactcactgtcacgagaacagcatgagcgtaaccacgcccatgattaatacctcccaccaggttcttctgatgacatgtggggattatgggaactacagttgaggatgaactttggatgggaacacaaagcctaaccatatcaacaagtatatcaaagaagaatcaaagaattcacaaaaatgattcaaatacaatcagtctactcttaggttcctgatggatgtgttattagctatatttaacatattgaagaagaaaaacagagaacatactgaatactgtaatatatgatatgaccattcttgaaatcacattttcactaagtgattaagcttttggaaaactggccacaaagttgacctgagactgatttggaagattggggctgatttgtatgtaaatataatcctttataattaaaaatgtaactactacctagacaaatagctgtctttttttttttttttttttttttttttttttttgagacagagtctcgctctgtcagccaggctagagtgcactggcacaatctcggctcactgcaacctctgcctcctgggctcaagcaattctcctgcctcatcctccccagtagctgggattacaggtgtgtgccaccacacccagctaattttttgtatttttagtagagacagggtttcaccctgttggccaggctggtcttgaactcctgacctcaggtgatctgcccgcctcggcctcccaaagtgctgggattacaggcgtgagccacggcacccagccaacgaatagctttcatacttttttgaccatgacctgtagtatgaagtgtaccttacatagcaacccagtgcccaaatatatgttgtgtatttgtgtgtgtgtgtatctgaaacaatatccttactatgtacagtacattctattagttgctattctgttctgtttctttttttattattatttttttaacactgtttgcaacctatgtgtgaaaacactcatttggataaatgtgtaatattttcatcttatggaagccttcatgaaaaatcagttttagaattgaaaaagaaaggtgaaaaagtaagaatgattataaaggatactagagaaatatggagtcatcgggtgtgactgttgtataaatatccagaatgcttcctagacgtgtttgtctactatgtgtaggagcaagctaatccaacctctatatcattttgaattaatactgcgtactgctgaaataattgttatgtatccccatatttttgtcctgtcccttttctgcccctttgagcaatcttgaacaaattggctgtggttttcttagttggttggaattagtatcatttacaaatttgaataattctagtctgtactctattcctccgaattatttataatacagctatatggctaagactcagagaaccccaatactttcattctttatctagagaggtgtttagaccacgtcttcaaaaaaaggtacccctccaattcaatagtgatttcctttgaaaaatcttattttgaactttgttgacttttttgaaggcctcctatttatgtgttaacattttaatcactcagttacatagttcttgaggaactgcaataaatagcaagaattcccactgcagaaaccgtgttactttttctcaaataaatttgtttatttatggctttttatacacagagcacttgccttagaataacttataaaagtagtgttaccgtaaactgttctagcccgtcatgccatttagctcatcataagaaataaagtatgtttagtaataatgtttgttaagtgttaagcagtactaatatcaaattcattctttcaacaaatatttattgagtacctattatgggccaggcatttgttctaggttctggggatgattagtgaataagacacagaaattcctgccctttggtgctcatactggagttggggagaaacagagattttttgtcaagtgaaatatatactcatttagaacctaacgggttatatgaagaaaaacaagcaatgaagaagattgcggacagttcatcctgcctgtagttcccagcccactgggcatgtaggaggctcaaagtgagtgccgtggtttttaagtttcttctgaaagtggccaatcagcaaggaaaaaggcatcagacctatagatgctgcatgaatgtaggtattcaggcaaaaagcaatcagatatctctagtatggaagaatggttgtgaagcatatttctttgtggataattagtcacatttatttatcatttgtgtgtgtgcctgtgtacacacacatcagtgcacacatgcgtgtgcctttaatacaccttatttatctttgggtcgtaggggagagggattcttttgtgttcacattctgggttatttttaataattgccttattttttgttattgggaagcagtaacaagtattgcctgaacatgattctggaaccagactcactggattcaaatctcagctttggcaattactagctatgtaaatttggaaaagttttttaacttctttggtttcagtgtcctcatttgtaaaatgttaagttccaaataaagcaactttcattgaaatatttcctcagaaaatgcaggggtttatttttttaaaaacagattgtgtcttataatatctaaggggtggaaaaacaggacagaagagaaaaggtaacgtttaaaaataggcaaagacaatctgaaagggctacgtacggtatgattccaactatgtaacatgctggaaaagacaaaactatggagtcagtaaaacagcagttgccaaaagttaggaagactccaccatgcctggctggtgtcgtgcattctatggggtttagacagatgcataatgacatgtgtctgtcattatattatcacacagagtagtttcactgccctaaaaatcccgtgttctgcctcccaggctcaagcaattctcatgcatcagccttccaagtagctgggactacaggcgtgcaccaccaaacctggctaattttagtatttttagtagagacggggtttcaccatattggccaggctggtcttgttggccatgttggccaggcctcaagtgagccgcttgcctcggcctccccaggtgcatgagccactgcatccagctttaatttcttttaatttctttctttcttttcttttctctttttttttttttttgagatggagtcttgctctgttgcctcgtctggagtgcggtgacacaatcgcggctcactgcaacctctgtctcctcagttcaagctgttctgccaggttcaagcgattatcccacctcagtctcccaaatggctgggattacagacacacaccaccatgcccagctaatttttgtatttttagtagagacagggttttgccatgttggccaacctggtctcaagctcctgacctcaggtgatccacctgccttggcctcccaaagtgctgagattacaggcgtgaaccaccatgcccggcccagctttaatttctttatgttggttttcacctttctctcatatctccttgagtaacttattagtcagccttttaaattatttgtctagtatttcaaattatttatctagtattatcttggtttggatccactgctggagagctgttgtgatcttttgggggtgttatataatcccgtttttttcatattgccagaattatttttctggtttcttcttattggggtagactattttgtctaccccagtgagaaggaacttatttatttctaattcaactgagtttttttttttttagtttttttttactcgttggggatgtgactttatggtttcttagctagctttgactcagcattttcagtgtgaagactcgtatgagttccttagttgtagagaatctttgtgtgatggctttctcagatgctgatgatagtagtgatgtgctggatttgtgagcaggttcactgtctcctgtggggctggaatggcagaggtctcatgaagcttctctcattccctagtgatgtgcccttaagaaaaaaaaaaaaaaatccccagtattttattcacatggttgaacagtgcaagcttgaggccagtaggaggtgcccataggtaaaaaccagcttctactaaagcaggtggataaatgccatacttaatagtgagcagagctcccagccttgacagaagcagctggggaaggtctatgaaatgcactgaggtcttttcagggagaagggagggagccaccacagctctccttccaggccaacaggaaagtaatacacctcccaggcacactcctgacctgctgttccagctgttcaaatcagaaaggcatctcttttcatctgcaggaatactgatgttccatgtagactttccccctatgagcccagcactgcacctgtgcctctgatgaaaaacaacttcccacaagtggaaagttcagggactcaaggcctgcagactggtttcttttgtcccacacggtgcctccgtaatgtgcggcactccccctttacctggagggccagactactgtgaatcctgctactcctctgggtctagctgctcagtgggactcccacactccaggatggtactggagaatatccgccaaggatccagtgatgtgacctgtcctctactctcccagcagcgggtaccagcaccagttctgatgggggtaggagaggagtgacgtagactctgagatttccttagttacaaataaccttagtgttggctttctcagatgccagcagtagcagtaatgtactgggcacatggacagactcaagacctcctggttagccgaggcaatgcaggcaatggcaacagctgagggcatgcagaagttttctccttcctgagtgctgtgttattctgccttcaggtgtcataatgggctgtgcctggctaccagccaggaggtggtgcttgcaaaagagtaccaggtgcggtggtagtagtggaatttgtgcttgccttatgttacccagggcaggcactctggggtctcaggcaatgggcggggctatggagcctccaaatatccctgtccattgtgttatgctaccagggctcataaagtggcaaagcctggtgaggactggaccaggcaagtcctcactcaggctctccaggtacaagcacaagcagtgtccccagtggggatcagagaacagctttctggccactggggtaatgttccagaggggagcagagctgcctctggtgcacagaagaatccacacagggagtgggagcaggagggagtagtagaaggcagtaaggcccactcagctcccatgcacttggcacagcaagtcccataccctcagtattctgctaacagcaactagctgtgttccaggcagtctacacttagaacacaaaactgccccaagcagtaagccttcctgccagcgatagaaaccaggctttcaggccatgcccctccctatccacctgcgaagcaggggcgcccaacttctgcactatagcacacttcatgccagccccctggttctggccgacagggttagtctccacttaaaatcatattgcgaatctcaggagctcttttcaacctgttactacagcctgagttactgagcagacttctgtgaggtaggatcaggaatggctttcctccatccccgctggaatctggtagtgcgtgcaaagcacatcctgatgccactccttctcatgtattctccacgctcactaaattggctcccatactgagtagggttaaggccttcccctgtggcctgggctgcccagctttgctgtgggagtgtgtgttctggtggctgagtctccccatcttatgctctggagattcagagttttccatctggttcacagtgtaggctgctgccaccacttcttttaaaggatctgtggtttttttcagttcttctgttaaattcttgtgttgcttcttgtgaaaaaaagttcacagtgtgaatctctacacatactttgtttttccaagtaggagaggtatgctaacactgtctccagtccaccatcatgtcttggtatcctccctacagtactcccagtatctgcaggtcacagagccacagaggctgtggcagagccacctggatcctctaggattggaggaaacagagcaatggagataggacctggagttgggagggcagatgctcagaaattattattaactgttatcactctgttacttatttttgaggttgttctgatatggaattacatataaagtaatattttaattatgttggacataacatttatcttccatatgaatggctgattcattacatggacaaaacatttcactttcattgtagtagtagctctgtgtctaaccttgccaagtgcttaatccaggaagtcttggttatggttcattctgggaaaaaattcagttaatatggatccagacagtatgctagtatttgttatttaaatcatgcttgtataggtgcaaacaccaggtcatataaatgtgtgtgtttgtgtgtgtgtgtgtgtgtgtgtgtgtatgtgcacattaccaaatgccaaccaccactgaagtgggaaaaacaatgacttatttataaattatattctgtttatacgtcaaacaaataaggtaattgtttaaattttttacctgccggttgttcctcgaaaactcatgagtgactataatttttttcgtttcagagctatttgaaaatcacaatgcaaattctttatacacacacatacatacacacacacacacatcccaatcagcaatgttatacagttgaaccacattaaaattaatttctcaaaggtagctttgaaggagaaagaagttgcaaacacttgaactcaaattctgttctctaaccctaatctcctttccttccagctctcctagttctttcattcccactaaatttgtactttatttggactcattacaagtccctgtctcataaagcccttccatatttttccaatctgtcaagcccctcctcgttttacttttcttcctgcctatccttggactttgtcagccatctgagtactagaattcaccatctctctagattgctttgtggccaaatttatacagcaggcttttcttgacaatttctacctttagcatattatcttacaatctgataattagcctataaatatttaatggaagaaaggcaagagagagaaaattcttaggttttgcagtaacaatactgaaaaattcttgtggaaatctgtgtgactcgtcctgcttggaagcattatgaattcatgttattgaatatcaactaggcccttaactactgttgcccagtgtttttatttttctgtctccatcctatttcccattatctccattgcagatcacttctaatcccaaagctatcaattctattatctgtctccttttttcagtatctctccttaccctttttctcctctttagtacccccttcaaagtatgtgtgtgtatgtgtgtgtgtgaccaaatgccaaccaccactgacacacatacatacatgggggaagtggtattggcataggcaactttcaaaagttaataccctatctttgtgcttaatttattcttctctcctcccatgtcagctacactctcctcagtggtcattaatgacctctgaatggccagcattttcttctcagagcctatacaatttgatctatctgtggcatggcattatggatattctagaaattctgtcctgttttggcattacaacacaattctccctggctctcgtcctgtaactctgatggctctttagtctatttagctgatgtcttcatcttctagcccttaaatgtaggtgtccctcgggtgcctgcccttttctctgttcttacacctcaggagagattctaaaacattagacgaagtctagaatcaagcccagtgagtataagaatcatcaaaaattctagctggaagaaaaaaaccccatcaaacagtgggctaaggacatgaatagacagttctcaaaagaagatatacaaatggcaaacaaacatgtaaaaaatgctcaacatcactaattatcagggagatgcaaatcaaaactgcaaagtgataccacctcactcctgcaagaatggcgtaatgaaaaaaatttttaaaaaatagatattggcatggatgtggtgaaaagggaaaactttttcactgctggtgagaatgtaaactagtacaaccaatatggaaaactgtgtagcttccttaaagaactaaaagtagatctaccatttgatccagcaatcccactactgggtatctgcccagagaaaaagaagatattatacgaaaaagatacttgcacactcatattcatagcagcacaattcacaattgcaaaaatatggaaccagctcaaatgcccatcagtcaatgagtggataaagaaaatgtggtatgtatatataccatggaatattactcagccataaaaaggaatgaaataacggcattcacacaacctggatggagttggagaccattattctaagtgaagtaactcaggaatggaaaaccaaacatcatacgctctcacttacaagtcacagctaagctatgagaatgcaaaggcataagaatgatacagtggactttggggactcatggggaagggtgggagcagggtggaggatacaagggtacacattgggtacagtgtacactgctcaggtgatgggtgcaccgaaatctcagaaatcaccactaaagatcttaatcatgtaaccaaataccacctgttctccaaaaactcttgaaataaaaaaataataataaaattctaagcccagctacttgggaggccaggatggatcactggaggccagtagttcaagagcagcctgggcaatatagcaagaccctatctctaaaaaaagaaaaaaaaactacaaaacttagctgaatgcagtggcgcacacctatagtcccaactacttgggaggctgaagtggaaggaggattgcttgaacctgggaggcagaggttgcagtgagccgtgattgcgccactgcactccagcctgagcaacagagtgagatcctatctcgggcaggggggaaagaaagaaagaaaaaaacaattagccagttgttgtggcatgcactatagttttagccacctgagagactgaagtgggaaaatctcttgagccgaggagtttgaggctgaaatgccaccacacttcagcctgggcaacagagtaagaccttgcctcttaaaaaaaaaaagaatcacgtaagattcttgtttaaaatgtaaaacaggcttctagatcctgccctcagaggttgtgattaagtaagtctagaatgaagtccagaaatctggatttttaacaagctctgcagtgaactatgattccgccactgcactccaacctggatgacaaagcaagaccctatctcaaaaaaaaaaaaaaaaaaaaaaaggaatgcagggccacaatttgaagtagtaatgttctatagttctatctacttcaatgacttcagtcatcacttccatgctggttactctcaagtattttaacatcccattcatgaattttccttacttggaccatactttgtggatcttaagaccaaaagcggagctgataatcaactaccatgtccttgctttaattattgacataataaaatactagcagaaacactggtaaatagctctacactaagatcccactgtccgttccaccacagtctcatctgtcctgtggcccctctcctgagacctgcctgtaatccagcgacaaagaggtcatacctgagacacagagtttcaccaatattttaattggttgaaatgtatcagttaaatattaccgctgttaaagatgataatgttaatcacgtgggaacatgagagaaggaactggtattagtagggaggattacaagttcaagacgtaaaatgatttacgtactaatttggatggagtggcctacatcaagtccaagatcactaggactgtattcttcaaatctggctgattatcagaatctgagacccaaccctgagaaattttgattcagtaggactggggcccaccagaatcactagtaggacccaaaaatcacttattttttggtttgtttttctgggttttttgagacagagtcttcctctgtcacccgggctggagtgcagtggtgtgatctcggctcactgcaaccacctcctggattcaagcagctcttgtgcctcagcctcccaagaagctgggattacaggcatgcgccaccacaccaggctaatttttgtatttttagtagagacggggttttgccatgttggccaggctggtctcaaattcctgacctcaagcaatccacccaccttggcttcccaaagtgctgggattacaggcatgagccaccacgcccagccagaaatcactatttttttttacattttccccagcaattgagaacatagagaagttgtaccaaagtgttgcccccctatcggacctcaagcaggcctttttcattcctagcacgattaaaaagattaagcaaggatatgtgactgattctgtacaaactaccaccactgctagaaagtatcacttgcatatattttatagacagaaagcaactcaatgttaaattccactcagcagtattcattttattcctggcaataaagaacttcatttctagtttctgtgaaagtaaactccccaaggaaaaaaactccacatgtaggaaaaacatgcagcaaaatgtagtcacctttatattagtttatttgaattttaagagaaaaattgtaattttagattctcatctaagttaaattagtacttgaatcaaaagatataatgatgttttaatcaggggttacttttctctgaatcatatgtacaggttattgaaacaaaggaagaataacacttctgtaaaatgttgtgtcatgggttttatctagagtcacttattacgtatatgattcctgagtcactaattactaaggctttcctataaggaaaagattactaacaataggcaatgtgagcaattgcaaaactttttgaatagtaattattataggtacagaaagatttttgaaaactctattgaaggaattaaattctaataaattatgtttatttcaaacatggaattagcatcactttttattcagagatatgtacttttttcctgacaaatgaaaatcaactttggggatttagaagcctacaaacaggtttataaagaaatgtatctgtaacactaacagcattattatagtatttattatccagagtaaggcggttataggttttatgttaaagataccttttgaaagtaaggcttctggcccttaactttgtttataatactaaaacctttagccgggcatggtggtgcatgcctgtggtcctggcgactcaagaggctgaagtaggaggatcacttgagtctgggaggtcgaggctgcagtgagctgtggctctgcactctagcctaggcaacagagtgagatcctgtctcaaaaaaatatatgtatatattaaaacctaatatatgtaactactttcatgaaaaaattgaactaaaataattgagactgctgctgtatattttgtgcaactaaaataattgagactgctgctgttatgttttgtgcaattgaaattagatttggtatgttttaaacagctcattctagacagaagttaactgaaattcataaatgttcttagttattccctgccaccctttccccacacacacacttgaactgttctgcactttgaaacacaaagcaacttgtcagttcagtttattcagtcagggtcagttctgtgaaaacaaagccaaggcaattgtttgatttaattgactagacaaactggttatacaggttagtagaacttagttttatttttgtccagctgcatatttgaatgttcataaagtaacttagtaaaataataagattccagtgacattgtaatatattttaaagaataattaccaaagcaaagaaaaaaaacattctaaaacccaaactatagaagctattcatggtatttttttctttatggctccactttcactataatgaaatgtgttcccccaaaaaagtagccttcttttctttcactattcatttccttctttttttttttttaatttttttttgaagattttttttcctgggctgtagttaatataactatcagaaaatttcctgtacaatttagatgaataaatgcttttacagaatagttctctatgtgcaagcagacatcctctaacagttggtcagcccccttttggcttcagtgtcctccttacccagccaacctcatggctgatcattttaacaatgttctcattactatccttgattctttctgcctcccaccatgctttccactatatccatcccactgttccctgcttcttcagctcctgggcttctaatcactcattattttattaaaatgagtggaaaaccaaaaaattgatatgctaaagtatactcttaaaggtcttaatactttaaaagtatatagatctcatgaacataattcatttgaggaaaaaaatacaaatcatttcttgtcccaggaaaacagtaaatctttaatggaactttttagcaattatgacaaaaagaatggaaaaatgtttaaacatatataaaaggctagacgtttatcgccaaatagtatctaaaggtcatagaatagttaggaattctgtcattttgttttgtgtaataaatacccccttccttaccctttcaccctaataatagatatccaccattttgttgtgattatccaactatagagtacctttttcaagaactcattatataccaaagtaggagcttgctgacactgataatgctttatttagttttgtagtgacatacaattaccatttgcttaggaaaaaaaataaagaacaaaaacaagtaaattttttaaaactatggttgtgtatatataagttgataaaaatcctttgggagaaaacttttgtcttgtgtgttaagagcattaaatagtcataccccttagcctagtgtgtcttctatcctgaaaaaaaattaacaaagcaaatactaacttaagaaaaaaaactacagcactgaaaagatttgttgtaatattgtttatgctaacataaattatgtaaatttttatatattgtttatactgacttataatttattactatacatagtgtaaattatgatacattggctttggtaggcagttttgtaaccgctaataatataaataccatactattaacaatctagaaaaatgattctggtataggttatgtgaaaaggcacaaaataaaattgtatatagtacactagcaatgaacagtctgacaaaggaaattaagaaaacaattccatgtacaatagcatcaaaaagaaaaaaatacagccaggcatgatggctctggactttgaaaggccaaggccagaagaattgcttgagctcaggagttcaagcccatcctgggcagcatagggagactctgtctctataaaaaataaaataaaattagccgggcatggtggctcatgcttgtagtcccagctactcaggaggctgaggtgggaggattacttgagcccaggaggtaggctgcagtgagccatgatgttgccactgcactccagactaggtgacagagtgagtccctgtctcaaaaaaaaaaaaaggaagaaaacatttaggaataaattaaccaaatggacacaagacatcccatattcatggattagaagatttaatgttgttaggatgataatactacccaaaacattctacaaattagattcagtccctgtcaaaatcccaatggcattttttacagaaatggaaaaactgatcctaaaattcatatggaatttcaaggaaccctaaatggccaaaacaatctttaaaaggaaaaacaaagttgtagggctcagatttccagatttctgaacttactgtaaagttacagtcagcaaaacagtgtgcaactagaataaggatggacataaaaacccacggaatattaatagaatagagcccagaagtaaacacttgcctatatggccagtcgttttcaacaagagtgctaggaccatttcatggagaaaagccagtcttttcaacaaatggggctggtaaaactgagtatctacatgcaaaagaatgaagttggacccttaccttacaccatattcaaaagctaactcagactggatcagagacctaaatttaagcattaaaggtataaaatgcatagaagaaaacataggagaaaatcataaccttggatttggcaatttctgcaaaaggacaagcacaaaaacataaaatagataaattgaatttcctaattataaaaaattgtgagttaaaggagattatcagccggacccaatggctcatgcctgtaatcccagcactttgggaggccaaggcaggcagatcacttgaagtcaggaatccgagaccagcctggccaacatggtgaaaccccgtatctactaaaaatatgaaaattagccaggcatggtggcgcacgcctctaatcccagctactcagaaggctgaggcaagagaatttcttgaatccaggaggcggaggttgcagtgagctgagatcgcaccactgcactccagcctgggtgacagagcaagactccatctcaaaataagtaagtaagtaaataaataagattatcaagaaagtgaaaagacaacccacaaaatggaagaaaatatttgcaaattacatatctaataagactatattattaagaatatatagagaactcctacaactcagcaacaacaacaagaaaaatcacaattaaaatacaagcaaaagacttgggaagacttctctccaaagaagatatacaaatgcccagtatgcacatgaaataatgtgctttggccaggatgtggagaaattgtaatcaaatttcttgctggtaggaatgtaaaatggtatcaccactgtggaaccgttgcagttcctcaaaaagttaaatatagaattaccatatgacctaacagttctactccacttctaggtagctacccaacagaagtgaaacaagaactcaagatatacagtatttgtccaccaatgttcatagcagcattattcacaatagccaaacagtggaaacccaagtattcatcaagagatcaatggataaacaaaatgtactataaacatacagtggactattatttaccattaaaaggaatgaagttctgatacatgatacaacatagatgaactttgaaaacgtcacactaagtgaaataagcagacagcaaaggacaaatattgtgttattccacttatgtgaggtatctggaataggcaaattcacagagacagaaagtaagatacaggtttctagggccaggagggaggagaaaatggggagtttttgtttaatgggtacagagtttccatatgggctgatggaagtgttctggaaatagaagtggtagctattcaacattatgaatgtacttaatgccactgaattgtacacttttcacatgattaaaatggtaaattttacattatattttaaaacacatttgtcaaaaatttatacataatgatttggatatataaattatgtatttttaaaacaagggaatatgaagaaatgaaaaaattattgaattatggtgtgaatatttttagtagaagtaaagctgaaataaaagagtttaacttttagctaagtgtttccattttaaaaagatatattttatgtcatatagcttttcagaccaagacaaatactaagaaaatttaagtttatgcattctcaaaattgctattaatattttatttaaaattttttcagccaggcgaggtggctcacacccgtagtccccgcactttgggaggctgaggtgggcgatcacctgaggtcaggagttcaagaccagcctggccaacatggtgaaaccccatctctactaaaattacaaaaattagtggggcatggtagcaggcacctgtaatcccagctactcggaaagctgaggcaggagaatcacttgaacctggaaggcggaggttgcagtgagccgagatcgcgccactgcactctagcctgggcgacagagcgagactgtctcaaaaaaaagaaaacaaaaaaaattattgtttatagttgctattaagaatagctatattgattcactcttaaaaccttcaaatttacacaggaaaagcttttcagaataattcatgtcaaaggaatttctgtactatatttgtgctagagcattttgaatgattttattttgttgtcacattttctagattttaatgaaacctgtgtttctttagcttgacagagccaattcgctattaaaccagactcaacagccttacaggtatctcattgaatcagtgcgtcagagagattctaagattgattcactgacggaatctattgcacaacttgagaaagatgtcaggtaaaccatctacaaatcttttatttgaataataaagacattgttaccatattgctgctgtaggtgaatttgggttgtaaatcatgaacagaaaatttaaataatgaaggtgtcttaaatgtaatgaatattaaacttttcttagaaaaactaaggtcacatcacatcaggtgttcacattccacctgtgatcagatgtcttagcatggaaataacaatgttacacttatgagcataacattccatctatcctagaggacacaaccgctattggtccttgtttccctagaactctttagtgtggtgtagactgaccagagggagaggaggaataaaaccagatgccatttgtgtcgttaaaatggctttttaaacaacaacaacaaaaaatttacatttacttagatttatgttgatttttccaaggaatttttaggcttttcttctgaccttttacatgaaagtaacttttaagtgtaaataaataaatttctttcacttccttaatttgtaattgtttctgtatgagatcttatccaaaaaaaatttgctatgaccagtttggttttttaaactgaaattaaagaatgaagatatgtgtaaatgaaacagttttacttgtggatagatggttagtttgcttagttactagatttccaagattataagaataatttagatttttatgggtaaattattaactgattatcaatgtaaaagcagagaattaagtgggaatagaaatggttaaatcaaggaattggaaaacaataaggagaagatggttgttaaatccaggtttcttaaagtatgcaaacaaaaatataaacctattggtaactaattccaaagtataaatgttatttttaatgaatcacagtaattaccttctttcatttctaccccaccaaaataattggtctagaactttattcctgttcttaattttttatgatttgtttaaataatttaggagcacatttataccttaaatgtgtcaaaataaataagtttgtttctagattaattttaaagttaaaaattctgtatacaacctacaataataaattaattgttctataaatagttcttggggacaatagaaattatgtctttcacaattcactgggcacctgattatcttagggaaattgaagaaagaaccccaaatagaattttttcctcctatgttacatatttctgttaaatttgaatattttttggccaggcgcagtggctcacacctgtaatcccagcactttgggaggctgaggcaggcagatcacctgaggtcaggaattctagaccagcctggccaacatagtgaaaccctgtctcgactacaaatacaaaagttagctgagcatggtgatgcatgcctgtagtcccagccactctggaggctgagacaggagaatcgcttgaaccggggagacggaggttgcagtgagctgagatcatttcactgcactccagcttgggcaacagagtgagactctgtctcaaaaaaattaaaattaaaattaaattttgaatcttttttttttttttgaaacggagtctcactgtcacccaggctggagtgcaatgatgtgatctctgctcactataacctctgcctcccgggttcaagtgattctcctgcctcagcctcctgagtagctaggattacaggcacacgctgccacgcccagctaatttttgtatttttagtggagacagggtttcaccatgttggtcaggctggtcttgaactcctgacctcatgatctgccctcctcggcctcctgaagtgctaggattaaaggcatgagacaccatgcccggccttaaaatttgaatcttttatatgtcttattttaccattatttcttgtgatgaggaggtatataaaaatcctgaggaaaaaaattactcctttcacagttatctccaaacaaatttatttgattatttattttactaagaattaaggtagcttaaaatgtttaatatagagaaaataatagctagctgtaggagaaaattataaagatgaacaaattcagccacagagaaattaagcaacttgtcctctaagaacatgcaacattgtgatagagtaagaattcaattttatatctgtctgcttgctaattctattctcctaaccattaggttatactgcccctctatgttctattctgaataagggataatatttctttagctaaaataattaaggaagagaacaaaaaagtagtgtatcatagtgattaaaagtagcactttaatgagttgatcgttgttgaagcggggtgatagatatatcagggtttgctattacatattttctcttctgaaatattctataataaaattttttaaaaaacagattttaaaaggaagttttcaaattcaactcagtacttagttttgagttagggcaagtaatttaaactctctaatacctctgttgtccaatagaactttctataatgataaaaatattccatatctggctgggcacggtagctcaagtctgtaatcccagcactttgggaggccgaggcgggcggatcacgaggtcaggagatcgagaccatcctggctaacacggtgaaaccctgtctctactaaaaatacaaaaattagccgggcgtagtggcgggcgcctgtagtcccagctactcgggaggctgaggcaggagaatggcgtgaacctgggaggcagagcttgcagtgagccgagattgcgccactgcactccaacctgggcgacagagccagactccgtctccaaaaaaagaaaaattctacatcagtgctgtccagtatggtagccactagctagccacatatagatgttgagcatttgttttggggttttgttgttgttgttgttgttgttcttttttttcttttcttttctttgagacggagtttcactcttgtcacccagactggagtgcaatggcgcgatctcggctcactgcaacctccacctcccaggttcaagcgattctcctgtctcagcctcccgagtagctgggataacaagcacccaccaccacagccggctaatttttgtgtttttagtaaagatgaggtttcaccctgttagccagggtgttcttgaactcctgacctcaaatgatccgctggccttggcctcccaaagtgctgggattacaggcatgagccaccacacccaacctgagcatttgaaatgtggctactgttactgaggaactaaatttttaattctattaaaattaaattgtttaaattatctttaattttatttttaattttattaaaattaaagataattttaattgccctagtggccaatggctgtggtattgcacagtacagccagtttcctcatatgtgaaatgagagtggtgccgaggcagacagattgcctgagcccaggagttcgagaccagcctggacaacatggcaaaaccatgtttggttttgtctctacaaaaaatacagaaaaatttgccagtgtgatggcacgcttctgtagtcctggctactcaggaggctgaggtgggaggatgagttgagcctgggaggtggaggttgcaatgagcaactgcactccagcctgggtgacaaagcaaaactctgtctcaaaaaaaaaataaaaataaaaataatgagagtggtcctaacagcacccgattgatagggttgttctgaggaataaatgatataatcttcataatatacacagatataatagtgcctaaacattatattcaacagtgttcaataaatgtttgccattcttagtacttaccatacatgtaacaaatttttggttgaaaattatattaaaaatgagaaataacatttctcaaaatatgttgaatttcaacaaaaattaagactcccttaataacagcaacggttttcataaaggccatgtcatttatggaattaattaccaagaaaaattttgtactaaacatgagtcctttaatgttgtcttgtgtttcataaattaattgtgtgatattttagtacattctgaactgataattcacaggatatgaaatcttattcttaattgaagcaactaccttctaaagtgaaaagttattaatactttcagtagtttaattacaacacttgagatgttgctataggtgtaccctggtgacatgaatgaaatgctgtgatgtaacaatgccattaaaaagtcagctcagccagtaattcagatatggtaggatagatcacagttctgtatacccacattccttcatccctactcgaagcaaatggcatttcaaatcctagagtggaattatcctgggctttaaatacacatcaggctggtttctctccttatggtaaatgtgtctgtaaaattagatattaatatgaacccgaaggggtagttgtgaaaattaaatttaggggcatatataaagctttggcatgtaggagaatctcagtaaatgttacttccctccccttgtcttttatttgaaatttaaacattaatgatggcccatccaaaagcgttatcaagttattatgttccttagaaaacataaacaggaaaattcctattcctcattgctaggtgttgatgttagttgtaaaaatatttacatcaattgatgatttttaaatgtttttctaattcaataaaaactctttgaagaactgaataattgtatgcttttcttagaaaattaaacaataccactataccatacttaccccttgaaaatcaactatttatacaatatattcaatttctagaaaggctagagtaaatattcactaaaatgaaatcatcataaacacattaaaagctaacatttgagatgtcactattaactgctttaaattctcctatcattaaagtaatactttattataaaaatagtactgttaactttcttccaccaagccacaagagacactctgcgtaatacagtttgatctctacttcagaaaggaaggaagcttggaaagagaataattagcataattttctttgcctgttgtcagttctcagtttattcttaactggtagttaaagataagactacattgccaacttcccttacaaagctatcccagagtgtattgatccaggaagttaaggaacaatatatcaggaatgttttcgtattgcaggtgaaacagagccataaacatgaatttctaagtaataattaacagtgaatttaacaattatgggtgtaatataccattcaagatagatgtgcttacaaggagatttgttttgtagttgttttatgagtcactcatagaagctttgtattttcaaaggtaagtttccactgttatgaaatatgttttatgaagactaaaattctattgagtaaatacatactagaagaagagtgaatataataatcatcatattcagttttagagacccacatgttaaaggttgtctccctgtggttcgagtatattataaagaagacaaaatatatgcccagatattgtaatcacagcaatattgtctgggaagtccacattgtttgtaataaactcatgtcttacaggtgcaacataattgttctgtaagccagtttatccccccaccatttattccatgtatatacggttgttttgctatttaattatagaatactttatttttgaaaagttaaaacacgacaatataaaagcatttgtaaagaattatccagtcaaaatcctttaattacctcgacattccattccgattacactacatattctttagaagagccagttggtatttgaaacagagagtgagtgtgtgtgtgtgtgtgtgtgtgtgtgtgtgtgtgtgtgtatgcactgaatgtgagtatatgcttatataccgtggttataagtgtatacatgtatatgaacatagacacatacatgttccttaaaagttcctagtcctatttactggatatttaaatttgaaaaatattttgccttcaaagtgattccagctaaagaggtggttagaattctagagttagagaaacatgtgatccttaccatgctttggagactctagcagaacatggcactcagtttcctttatactgttttgttcttttcaactcctcagctcttgtgggatctctggcgcctaactctaaaagtcagtttgtttttcagctgagctgcttacctttattggcatttaattactgttttactctgatgcctatttttttatctaaattagtaacactgtataacatttatatagttttatgagttcaacactttatataatcattcacatagtcctttgacatacatgagtattatgttctacttttacagatataaaaactgaggttcagtggggtggtatgtgttatgctttacagcacacatttgagtctgagtcagtggcacagttgggaacagaagtcaaaattgcatctagtccgtctcctcagaggacaaactatgatgcttccttctcgattacttggaaggagaagaatgtgggctttccctcttaagtcctttgaattagcagttgctgcagattgcctactactgtttcttgaattaaaaaaaaaaaaagtctgccaaatattattctaaagattagtggctttcatttatttatttatttatttatttatttatttatttatttattttttgagagagcctcactctgtctcccaggctggaatacagtggagcatcatagctcactgcagcctcaaactcctgggctcgagcgatcctcctacctcatgctttgatgtagctgggactaaaggtgcatgtctccacacctggctaacattttttttttaagagatgggggtctctctgtgttgcccagactaggctcgaactcctgggctcatgcagttctccaacctcgatctcccaaagtgctaggattacaggcatgagccagtgtgccctgcctccattttcttaaagtagaacttaagtagaactttaaaaatgtttttaccggccaggtgcggtggctcacgcctataatcccagcacttcgggaggccgaggtgggcagatcacgtgaggtcaggaattcgagaccagcctggccagcatggtgaaaccccatctctactaaaaatacaaaaattagccgggcatggtggcacacacctgtagtcccagccactcagacagctgaggcagaaaaatgagttgaacccaggaggcagaggttgcagtgagccgagatcgcgccactgcactccagcctgggtgacagagcgagactccgtctcaaaaaaaaaaaaaaatgtttttacctatttaaaacaattcttgttagttttaccctcacaaattttgtcttttttattgtaatcattcattagataattgccaccatgccaggccagaaattgaaaatcaaactaataatttggagacaaacgttcttttttcaagtttatcacagactaaatacctgattcacttacttaactcaattatatacctgataatttagtttgtaaaatattactttcagttttaaggatgttttaatttgtcttctagtatcttgtgttgtaatagtttgctgacatagtacttcttaccttttatgtgagtttctttatctttttacattttagtagtaaatagtcatctttaaaacattaattttatgcctatactaggcaggaaattattctcagacagcatctcagttacgttgtcaaatggattcttaagagaagaaaagctgggtgcagtgatgtatgcctgtagtcccagatacttaggagactgaagcaggaagattgcttgagcccaggagtttgaggctgtagttcattgttaccatgtctgtgagtagccactgcactccagcctgggcaacacagcaagactccatctctttaaaaaaaagagaaagagaaagaaaagaggagagggaagaaagaaaagaaaaaagaaaggaaaagaaaagaggagagggaagaaagaaaagaaaaaagaaaggaaaagaaaagaaaaagatcttctgacaaaataggccattcattgggccaaacattttagtggctggtctggaatatttatggactataaatttatctttagttcaaaccatcagattcatgtttattcttttaatatttaccatttattaactatatttatactaacataatgactttttaaaactggggttttttttttcagcaacttaaataaagaaaagtcagctttactacagacgaagaatcaaatggcattagatttagaacaacttctaaatcatcgtgaggtatttttcctattttgtcataattgtaatcattttaggcttttttaaaaactgctatcaggttaaaattattggatcccagttgtgcatgttcattaatgacttctcttatttatgtctcactgtaattttgtccttttttattcaacttttgatatacttcttagagttaattcttattcctagaataaccccttcttgttgtgttgatatctgtcactgaatttccccatattatttaataataatctgttttatcttattctgcaactagacagttaatttccttagtgtgcctctcgtcttctttatcaatgtatgcccagtgcctgtagtgtagataatttgtgttgagctttaaagttcataaaattattttcttttcttcatttgttccctaccaaaattcttttagagtaaatataattcctattttatagatggagaaatgagttttaagtggcttgcccatggcagttagtaactaagagataagttctgttttgttttgtttttttcctttaaggtttattgagttataatctacaaagaataaaattaaccttttttagcagacatgtctgtgatttttgacaaatgcacacagttgtgtcagcaccaccacaatcaatatatagaatagttctattactccacaaaattccctcattacccctttttagctgacccttttcctcaacccccagccctatcaaccacgggtgtattttctgtaactattgtttaccttttacaaaatgctataaaagtgaaattatcagtatatagccttttgagtctggcttttctcagttacaataatacatttgcaattcatatatattgttgcaatacagatgtataatatattgacctcaagtgatccgcctgcatcagcctcccaaagtgctgggattacaggtgtgagcctgtacatacatctacattagtcatatgtttcctttttattgctgagtaataagccattatatggatgtaacccagtttgttaattcattcacagtttatggacatttgagttgtttccatttgaggacatctccgaataaaatatctgtaaacaattaatgtacacattttaatataaacaaaagtttccatttctcttgggtaaatacccaggaacatgattactgcattgtatggcaggtgtatgtttaagtttataagcaactgtcaaaattttccaaagttactatacttttgcattccccctctacgatgaatgagagttccagtttctctgcatcgtcaccaaccattggtatttttaacacaaagccttttttctactgaactatcactgcctcatcttagccatctttttaccattttgttattctaatagaaaaagaaacttttttttttttttttttggagacaggatcttgctctgtcacccaggctggagtgcagtggcatgatctcggctcacggcaacctctgccttccgagttcaagcgaatctcttggcttaacctcctgagtacccgggattacaggtgcatgccaccatgccatctaacttttgtgtttttaatagagactgggtttcggcatggttggccaggctgatcttaaactcctgacctcaagtgatctgcccgcctcaatcctcaaagtgctgggattacaggtgtgagccaccgcgcccgaccagaaaacaaaacatttaaaacatatcattggtttatgagtatcctgatactagtctgggagaggtataccagatgttgggaagaaattattgggagaatattgttgagagaggggaactggaaactattactggaagcagttcaaaggtacgtatcctagagatggtgtcagaagaattggaggattgtctgtatctgagaaatggcattggagtgagttctcttaaaggtgtcttctatgtgatgggtgaaaaggatgagaaagtgtcccaggactagattgtaatgataacatttaggaaggtaagtcaatctaacaacaggttacagagctaggaaaagcttctctgaagatatttattctttcttctgagttcggacattctagaccttatccatcaccgctgctgtcacttatgtcctaggattctgctttcaagtaattgtttcttcactgtggaaacctgattcattcactatgtggaattttcgcaagtgtttttgaaattaaatatttaagagtagtaactacagatgaccattcagccatatcaactacatttttttaaagctagatattaatttttttttcagaatggcaattctcatttgattttaaggggatgtgctacactgaaaaatatatgagcagttccaacacttggaatcacattactcatgagtccaaataaaaaccaaaaaactttgcgtggtggattgagaagaaaatacatttaagcatgcaaattaaattctagcagagctgggcacagtgtcacacacctgtagtcccaggtactctggaggctaaggcaggaggatcacttgagcacaggagtttgagactatagtgcactctgatctcacctgtgaatagccactgcactccagcctgagcaatgtagtgcaaccctatcttttaaaaaagaaagaaagagaaagagggagggagggttagagggaaggagaggaagaagaagaaggaagaaaggaagcgaaggaggggagggaaggagggagaaatttaaacactagcaagatgaaactactcattaattgcctactactacatgttattactggtatttgtatggatgcatatttagataattgtcagtttttatgtatttgacagtatatctttattttggcaagtatgttttaataatttaacattgtatagcttttgatgataccaaacatctaaagaaaagcaactttttttgttttaaagcaaagtaaaaattaaagcttagtaaaacaaatctaatgttattaatcattttctaagaaaccatttactaccaacttacatcatatatacacatgcaaaggcctccgcaaattgcatatatggaaagaaaacagctggtgtgaccccctagaaatgcttggccattcacttgaacatttacctgatgaaacaggattgatttattcacttgattgttcagaggatcatgtcctcataatagtcaatagataacattggttaagaataattctgatttttttttgaaaatgaaaatcagggctgggactagggtgaggcaagcaaggcatctaggacacatgatgtaaggaggtgcctactctcagagtgggcaaagaacatggacggcccctgggagccactgcttctttacctaaggccgctagcttgtctcaccctggtcaataccctgggaaaattatctgataccagtctggttttaatcagttaaatttggacagtgtaaatgagtgattcaaaaagagaccaaatgaactttttaaagtttcttattttcttttttgcattggacagctcttgctttaatgttgtgttgttttgttttgttttgttttgtcttgttttgttttgagatggagtcttgctctgtcacccaggctggagtgcagtggcgctatttcggctcagcgcaacctccacctccctggttcaagcaattcccctgcctcagccccccaagtagctgggattaacaggcgcacgccaccacacctggctaatttttttgtatttttagtagagatggggtttcaccacgttggctagactggtctcaaactcctgacctcaggcaatccacctgcctcagcctcccaaagtgctgggattacaggcatgagccactgcacccagcctagctctaactttttttagcagtgtcacttagttctgattaggctgtatgtgttcatgtaatgtgaagtaagatcaccagttcatttacataattccaaaatatgtgttaaacagaaaaagcaagtaggacaattctaggttgacaattcagaaacatttggggcatgaccacagagagtttttattttctatattagtgttagctcaaaaatattagcttaaaagtatcttctctcatgttaagagttagggtgtggtgtgacaatttccaggaatgtgtattgatctcttacaattgagtatttcttgaactatgagtggaatattaggtgatgtttagtcctaactttttttgcgagaaaatatattcaacaactaatttcagaatgatataacgtgaagagcaggtggccgtagagagaaataggatattttaggttgacttttcagactacaaagctcaactgggttgggtaaatatattaggttaaaggatttacacaacaaatactaacttaaaaatgtgcataaattgaattgagagcttatacctgcccacacttctccattctaaattctccaggttttgtccctatattcagtaaaatgttcataaagcagagggggaaagggcaaaatatctctcctcacagaatttattttattaaagaacagtttaatgtcatgccttctgcttttgtagaagatcaaaacaaagtgtgatctctcttggttttgtaaaactaaggcagtctactaagtacatccacataaatgacataatctaatctttactacagtccactgataaatatcattgtcctcattgttagagatgaaactgatgctgataagagttaaataactcaactgtgattacgtagtcaaaactaaaagtaattcattttttccctgaaacaaaactaaggttctttttccttagtctcatttagacagaaaaaaactcatgatgaattattgcgtatattccaggaaaatttttgcctctgggcatgaagttatattcctctttctttttttcataaaatgaaaactttgtaatttaatgtgtttcctttttgtcttcattgccagaaaactcagagctgaatatcttatccaggtgttataatcttttttttcctctttcacttttgatacctcagaataactttatctgtttccttcaggtgggttgtaatctatcttactctaaaatgtcttcacttgtactcggattaagacctcttaggtgtaaataaaatataaacctaaataattagatattgaaaagaggtaaaaggaaaagataaactgataggaactcacttttagataacagtagcaggacttcaaataaaacattcattttgaaaagatttgagtataagaaatgtgatttcaggcccgatgcagtggttcacacttgtaatcccagcactcaaaaaggccaaggtgggaggaacgcttgaggctaggtgttcagcaccagcctggacaacctaggaagacctcatcttcacaaaaaaatcaaaatttagctgggcatggtggtgcacatctgtgttcccagctactggggaagtcgaagcagaaagatagcttgagcccaggaggttaaggctgcagtgaatcataatcacaccactgccctccagcttgggtgacagcaacactgtcttttagaaaaagagaaatgtgactccttaaaatggcttctttcttgagcttatcactcagtaatcgtcattaattgcatttagttttcatctgtttttatccactcatctttgccttaacgaaacaagatttactgatcacctttggaaattctaattctgcttttctttgtatatattttatccacgtgtccttagaatataagcttttgagagtaggaaaagtatctttcatcagccaaatgcctaatagaatactgagctcagtcgttagaagctgatgtagaagcccttttctcatggctcttggagctgtagaagggcagtgggaagaacacctcttaggaagctattccagtatttcagtgagtgaaggtggtgtcttgaactagattggtgatgatgaggtgaaacaaaaatggaccgatttgaaagctatttaagaagcataattggccgggcgtggtggctcaagcctgtaatcccagcactttcggaggccgaggcgggcagatcacaagatcaggagatcgagaccatcctggctaacacagtgaaacctgtccctactaaaaatagaaaaatttagccaggcatggtggtgggcgcctgtagttccagctactcgggaggctgaggcaggagaatggcatgaacccgggaggcgaaggttgcagtgagctgagattgtgccactgcactgcagccttggcaacgacagagcaagactctgtctcaaaaaaagaaaaaagaaaattaagaagcataatcacggtccttggtgatttgagtacattagggactgatgaagagaggagggatgagaattgatgcctaggtttttggcttgtgtctttagtggtgctacaaagaacctagaagaaagaggtttggggaagaaaagttcaagaaaatatctaagtggatatatacactagagagttggaaatgtaggttcttgtgcccaagaaagagaattcatctgttaatagaaatttgaaagtcacaacataaagatgttactttacatggaaatagagtaaatgaactagtgagactatatagagtaagaacagaaaaaggcctgtgacagaatcttaatgagtaccagcatttaagggaagggcataggaaaaagtgcttacacaaagaagagtgaagagtgaccagcatcagtgatgagcatcaggaagagagtagagtccctaaagcccagggagaaccattcataacagagccagttgtacgcagtgacgtgctctcaagaggtcaggccaaagaaagatttttaaaaaagagtcatttggatttaataagatgctaaagggccggcacggtggctcatgcctgtaatcccagcacttgaggaggctgaggcagacagatcacttgagctcaggagttcaagaccagcctggccaacatggcgaaaccccatctctacaaaagatacataaattagccaggcctgggggcatgcacctgtagtcccagctacttgggaggctgaggtgggaggatctgggagaattgcttgagcccaggaggtggaggttgcagtgagccaagatagtaccactgcactccaccctgggtgacagagtcagagccctatctccaaaaaaaaaaaagaaaaagaaaaagatgctaaagcagtttcaatggagctggagctaaaaagcagataccagtgaaaaataggcaatccttagaatatttgaagaagaaaagataggacaattgaggaaggggcatgagatcaagagcttttgctgagccaggcacggtggctcacgcttgtaattccaacactttgggaggcggaagtgggtggatcccttgaggccaggagttcgagaccagcctggccaacatggtgaaaccccgtctctactaaaaacacaaaaattcgccgggcgtggtggcagacacccgtagtcccagctactcgggagcctgcggcaggagaatcacttgaacccaggaggtggaggttggaggttgcagtgaactgagatcatgccactgcactccagcctgggtgacagagcaagactctgtctcaaaaaaaataaaataaaataaaataaataaataaataaaataaaaataaaaaaaagcttttgcctctcaaagctagagattacacaatttaaatggtgacaggaagaagcaaaatagacattaaaagtacacaaaagaaagagataatcaattgagcaaaagtgataggaaaggagatccatagcagagtcatgggaatcagctttagaccaccagtgttaccttttccattttgaagaataaaaaaaagaattatgtgaaaatagaagtaagtttataggtttagtggtaagtatttagagagttcccatctaatggatgttttctaatagaaagagatgtggtacagtcagtgttttgagaaaaatgaattttgaagtagctgtgtaataaatgaatgatgtacataaaagaattgccaagttgaaatgttatgtacttatagtagtaccattctgtgtaatttttctttagcagcacttagcaccccaggtgtaaacatagaagatggaaactagactgatccagaattacattctactttctactatatgtacatataaatatgttcaactctctcattaaattgtaagactggcattacctttatattccttacatcttctacattttgaaatactatggaaaaagccagcagtcagacagacaagacttgtattcatatcccagctctgctacttaatagcagtgcatttttgagacaataatttcacccctctaaactcagttatctcatctgtaaataaaggtaatatctactttgcaaggttctgtgagaattaatatagcagtgttcctggaatataacagaactcaatgaatgtagttccctttcctcatttccttctgtgtcaagggtctttttaaatattatctatcatttgagactgggcacggtggctcctacctgtacccagcacttaggaaggccaaggcaggcagatcgcttgagctcaagagttcaagatcagcctgggcaacatggtgaaactgtctctacaaaaaatatgaaaattatccagggatggtggcacatgtctgtagtcccagcttctcaggaagctgaggtgagaggattgcttgggcctgagaggttgaggctgcagtgagcagtgatcgtgccactacagtccagcctgggtaacagagctagaccctatctaaaaaaacacaaaaaataaaaataaaaaaatattatctatcctttgaagccctccctacctcaacaaagaaaaacatacccttttctacctcattcctataactttttaaatatttctgttaatgttcatattactatgtaattaagcatctgtcttacccattagattgacaaattcctttttgtactttagcctttagcacaatatttagcagataataagtactcattcagatgtttcttaaactaatggttcttttcaatcttcaataatataaagctgtcaaatagaaagctttagaaactgtcatcaaaaaataagtgtcactctgatactgaaatattttagctgaagaaagcacagaagctctcctgtatccaaggacaattttagatactactactgaaattttacttacatactacttttacatacaattttagatacatactactgaaagtaggccataggaagtcatatcccaaaggtttgtctacaggagagctacttcctaaaaccttggagatggtagttgtaggcacagcaacctctatggttatcacacttatacagaatcatatatatttgtggaatataaaacatctgttttggctgggcagggtagctcaggcctctgatcccatcactttgggaggccaaggtgggaggattacttgagtctaggaatttgagaccagcctgggcaacacagcaagacccctagcatggtggcacaaacctgtagtaccagctactcggttggctgttgtgggaggatcctttaagcccaggaggtcaaggctgcagtgagtcatgattgcaccactgcactccagcctgggcaacagagcgagactgtatcaaagaaaaaagaaaaatttgtttctgagacctgggatatcttctatcctctcattgcagtgtttttgccaataacacttctcagggcccacagtcatttcagttagtatttaaccagaattaatcaaccactccttactaagtacttagaatgtacaaggccccacacttacctgaacattggactaattcttattatcctggataactttcttcttacagcagtgtatgtcagataatgaaaagaaaacaaaccctgcagttagccaggtttcttgaaagtgaaatcacagtataattatcattcttttatggtatgtttgtgttcccagattctaactcatatgttctttgcgatttctcggaagatttcagggacatttcagcatcccaagtgccccttaggcaatccacttcataagaagttccaacaaattgcatttttctttatgtgtgtcactctttcggttcatacttaactgttttgaaattttcttaggagtatctttttacatgtttttcttatgcacctatgtagttaaattttacagtcagcatgctaaaaaaaaactactgagcgggtaaattaatttttctttaaatgaaaatatacttgtttctcagattcacacatacatttctcatcatagtggtgctcttcaagttaaactgttttcgatttgttggatataaatgagtgtttttaaagagaaagataattattatagtgaaaaccaaaaacacatgtatgatacaagtcatattttccctataaagttttagaaagattttttttttccatgtaagggtgtgtgacttcaggtctgaagaaatttagggactaaaatgttgcaaaaaatactgcaaatgttgaatttacacacatactttatgagaaagctaaagctattgtattaacagtgagaatatatcttgaatttttataatctttttctatcaaactctaaaatgctttcagatgaattatgttatactaccctacttaggaaccagttacaaattactttcaagtaagtgtatctgggaatgaggaatcagagaaaggaaaagttttaaattagtcttctctgctgagaattggccttttgcttatgttttctaggattcaagagggaattaggctttttacccaaaatacatacttttcagtaaataataagtgtgtttaatattgatatattatcttgtagttttttatattcatttattttatttaagcctcacaacagctcattcttacacccatttcacagaggcaacaactgaatcacagttgttcattctgtaaaatgttaattctcctcagttttgagttgtgtaaaagacatttgaatttcctttagattgtactctctggaccactgtgtttatataggcttgtatagaacctaatagaactatgtcaaaattgttttggtttttgtaagtattttgatttcttctttaatcttttcattatcttcttttaaattataaatatctttgttgtatcctacaagtcagttcagtcttgtgtgacccaatatattaatatctcatcataaaaatattttatctgtgcatatatacccttttaattttttatatcacattttcacatctattatgtaacatatagacctagcaatttttaggtttctttttttaagaatgaaatgtgtattttcccactgcattttagaagcttgtgatatgttttcggttaaattaaaagtacatttctctgacctttttttgtcagtaaggagcaagtaaatgacttctcttgctatcatttctaaccctgtgcttatatgactatcttagaatagtagcagcttataacaaaccaaacaattctgagacataaggagacacacacacaaaaaaaaactacaaaactgtaaaatctctgaaactgtataatctctgaaaatatttggtggccaggccgggcgcagtggctcacgcctgtaatcccaacacttcgggaggccgaagcagggggatcacgaggtcaggagatcaagaccatcctggctaacacggtgaaaccctgtctctactaaaaatacaaaaaaaaaaaaaaaaaaaaaagccagggcggtggcgggtgccttgtagtcccagctacttgggaggctgaggcaggagaatggctgaacccgggaggcagagcttgcagtgcagtgagccaagatcacactactgcactccagcgtgggcaacagggtgagactccgtctcaaaaaacagaaaaagaaaaagaaaatatttggtggccaggagacaatattaacaattatatgagataattatagtcataattctgttagacaccatattggcaatatcttgttgtaaacttaagtcactgatcccgtatcaaggagctgacactaagagaaggctggaatacaacatggagaaggtacaggcactggagtgagtcatactctgaaaaccagtgctctaagtggaggatagggtttaaagtctgaagttgatgctgaaaatcaacaagaatatgcaacaaaacccatcaaacactactgaaatagtaaaggccagggtccagcacagtgggtcacacctataatcccaggactttgggaggctgaggcagaaggattgcttggagcccaggagttgtgtactagcctggtcaacataatgagactccatctctagaaaaaaaaattttttaaaataaataattagctagatgtggtggctcgtgcctatagtcccagcttcatgggaggctgaggtgggaggaccacttgaccccgggacttcaaggctgtagtgagctgtgcttgcaccactgcactccagcctgggcaagagtgagaccctatctcaaaaacaaaacaaaaaagaaggaaaaaaaaattttgatgaaaaagttaagaccagaaactagacagcagccagatgactactgttaatagaagggaaagcaattgcacttggtcacaaagccaggcatcaagaaaacatgaatgtcagaaagcagagtggggaaagtagtgagaagtccagggtaatcagtaatgagatgcacaaaagggtctgagcaaaccaatcagaatagaattaaggttcccacactcctgttttaagtcaacaatagcagtagattttaattcaggaacctacttcagtgtgttaataatagcttcttatctggatcactgttgagaattaccctaagatcatatccatgattgtgaaagaatgtttcaggtgattagttatgtcccggaggctgtaacagcccaattgtctctcatttgctatcattcgtataaaagcatgagctctcactaagccttcagtcatagatagggtatagctccaaaaatgtttctgtcatctttttttttttttttttttttttttgagacagagtctcgctctgtcgcccaggccggactgcggactgcagtggcgcaatctcggctcactgcaagctccgcttcccgggttcacgccattctcctgcctcagcctcccgagtagctgggactacaggcgcccgccaccgcgcccggctaatttttttgtatttttagtagagacagggtttcaccttgttagccaggatggtctcgatctcctgacctcctgatccacctgcctcggcctcccaaagtgctgggattacaggcgtgagccaccgcgcccggcctctgtcatcttaaatgtattagaataagaagtagataaacctgctctgctctagtcagtacttctttctttattctgttctaggcccaaaaattttcaatgtaaggaaaacaggatgatgaaagaattcttttcagtcataagagagatgaatgaaactggggatgtttagagaagataagacttagtgaaagataagaaattcaaagtaggcacgtaaaacaggcagtaagagatttgttacacatgtctccaaagtccagaattaaaccaaaggctagatgctatgaggagacacatcctgttttgttgttctacttttttttttttttctttttgaaacgggagtgttttggttttatagttgagtaaggaaaacctagattaatacctaatgtgtcttcatttttaaagcctgggctaggtggccatatagtcagaggggatttcttaattgtatagagagactgggctaaataacttgaagatctcttccaaacctgaaattgtgtgtatcacagacattgatggaaggcatctgcattattgtataatgatagctttgaccccagaaaggccttacttaatttgaatgctgtttcacttcttagtagctaaatgaacatggttaattttcttgagccttctttttatttatttatttttatttagaatttttttattttcctttgttgtttttttttttgagaaggggtcttgctatgttgcccaggctggtctcaaactcctggactcaagcaatccacctgccttggcctcccaaagtgctgggattataagcatgagccaccatgcctggccttcttgagttttttttattttttgtaatttatttatttatttatttatttttttttttttttttttttgaggcagagtctcgctctgtcgccagactggagtgcagtggtgtgatctcggctcactgcaacctccgccccccgggtttatgtgattctcctgcctcagcctcccaagtaactgggactacaggcgcatgccaccaggcccggctaatttttgtatttttagtagagacggggtttcaccatgctggccaggatggtctcaatctcttgacctcgtgatccacccgcctctgcctcctaaaatgctgagattacaggcatgagccaccgcacctggcccttcttgagtctttgaagcctcagtttcttctcttcaaaattaaagtaatatctacttcttggtatttgagtgtgaattaaattattatgtaagatactcagcacaaagcctggtacattgtagatactcagtgaacattcacttctgtcccctctcttcctccctccagacctaaaatttgtatatacttcttttgaggcaaagagacaatcccagggtgatgttaccctacaagtggaagcaagtatctagatagggagatcgaggggctgtagataacagcagtttgcagttgcagatattaatactattctacaatttgcagtacaaaatctgttttgtcctttatgtagtgtatagtggtattgcattcaaagtaactttttaaaaataatacattatatttgctttaatagtagtttaaaattcttgttgagcatttagagtgtagaatggatgactttgaattaaagttatattttcttttaaactatttttaatcatgttaaataggataatgatattttgctattttaaaaaatttttatctgttaaaaattcccactgaagtatttacaagtgaaattatctgaggctgggcacagtggttcacacccataatcccagcactttgggaggctgaggcgggcagattgcttgaggtcaggagttcaagaccaacctggccaacatggtgaaaccctgtctctactaaaaatacaaaaaattagccagaagtggtggcacacccttgtaatcccaggtactcaggaggctgaggcaggagaatcacttgaacccaggaggggaaggttgcactgagcggaaatcatgccactgcactccagcctgggtgacagagtgagtctccatctcaaaaaaaagaaaaagaaattatctgagatctggaatatgtgttaatatatatcagggggaaaatctggtaaggaaatagataaaacagtgttgacaaaacaatcctggtagttcctcaaacagttaaacatagagttacatacaacccagcagctctatgcccaggtatataaacaaaagaaattgaaacatatccacacaaaaatttacacacaaaacttttcactgtttcaaaatgtgtcagtgtttatgagtgcaacattattcatagtaaccaaaaagtggaaataacccagatgtccttcagctgatgagtaaacaaaatttggtatatccatgcagtggaatatgattttgccatgaaaggaagtactgatagatggtacaacatggatgaactttaaaaacattatactaagtgaaagaagccagtcacaaaaaaagcagacggtatatgattccactgatgtgaactgtctagaactgggaattctacaaggacaaaaagtagattgattagtgacagcttagaattagagtgatgggggcatggcaggataggagggtatagttaaagcaatcagagtttcttaggttttggtttgtttttgttttttgtttcttttgagatgatggaaatattttaaaattgactggtaattgttgcatgtgtctgtgaatatactaaaaaccattgaattatacacttcaaatggatgaactgtgtggtatgtgaattatatctcaggaacgctatttgagaaagaaaatattgacaaaatgttgataattgaagttgcgcagtggaaagtggggactcagtattctatcccctccatttttgtgtcattgaaaatttccgtcataaaatgctttattaaaaaatgcccgaccaggcactgaggctcatgcctgtaatctcagcactttgggaggctgacacaggtggatcacttgaggtcaggagttcgagatcagactggccaatatggtgaaactccgtgtacactaaaaatataaaaattagctgggcgtggtggtgcacacctgtagtctcagctactctggaggctgaggcaggagaatcatttgaacccaggagacagaggttgcagtgagctgagattgcaccactgcattccagcctgggcaacaaagcaagactctgtctcaaaaaaaaaaaaaaaaaaaaaaaatgccaggtacagtggctcacgcctgtaatcccagcactttgggaggccgaggcaggtggatcacctgagaccaggagttcgagaccagcctggccaacatggtgaaaaccccgtctctactaaaaatacaaaaattagccaggtatggtggtgtgcacctgtagtcccagctactcaggaggctgaggcaggagaatcgcttgaacttgggaggcagaggttgcagtgagccaagatcgtgccactacactccagcctgtgtgacagagcaagactccatctctccatctcaaaaaaaaaaaaaaaaaaccttttaaatgaagtttaaagctgggcatggtggctcacacctgtaataccagcactttggaaggccaaggtgggtggatcacccaaggtcaggagtttgagaccagcctggccaacttggtgaaaccccatctctactgaaaacacaaaaattagccaggtgtggtggcacatgcctgtaatcccagctactcaggagactgaggtaggagaatcgtttgaacccgggaggtggaggttgcagtgagccaagatcatgccactgcactccagcctgagtgacagagcgagactccatctcaaataaattaattaattaattttaaatatccaaaatatatatgtatttggtttaaaacaagactggtttttaccttgtgttacttcaagagagatgcacagagttatatgacttactagtcacgatgcgttgttactcccatatgaaagcacttccatttaccagtggagcacatagtttgcattatgcttgtcaaagctattttcatcaagaaatgctatctatgtgtctccttgccaacatctttgcagagtttacaactttcagcaatttattggcatcaactatgcaatactgttaagcagctgctgtacagctgagctgttttaatatgccaccacttatgcaaatagttaatattaaatggccaagatgcatgcttttggattcaaaagaacagtttatctctctcatagagattgtttatgcagtcgtcatcatcatcatcatcatctggaaatttcacaagaacatccttgcccttaactcttcaattttgaaaagtaattattatactgcaacatagtttttgttatttagtttttagttttagtccaagtttcagttgtataatcagatgcaattcttcatttgttaatgttaatgaatggttcgttcattcatatagtaatggtaattttattatgtatttgatatactagaattacaacatgtactgttaactttctgcaagttagtataaaagcatatcagattttatcagactacgttatagaatagtattgaaacgtttcagctggccagatttggtggctcacacctgtaatcccagcactttgggagcctgaggcaggtggatcacttgagcctaggaattcaagaccagcctgggcaacacacccccatctcaattttttttttttttttttagatggagtctcgctctgtcgcccaggctggagtgcagtggcacgatctcggctcactgcaacctccacctcccggattcatgccattctcctgcctcagcctcccgagtagttgggactacaggcgcccgccacctcgcctggctaattttttgtgtttttagtagagatggggtttcaccatgttagccaggatggtcttgatctcctgacctcgtgatccacccaccttggcctcccaaagtgctgggattacaggcgtcagccaccgtgcccagcccccgtctcaatttttttaaaactgtctcagctgggcacagtggctcacactttaaatcccagagctttggtaagccaagatgggaagatagcttaagctggggagtttgaggctgcagtgagctacagtcgcatcactgcagtccagcctggacataagagtgagaccctgtctcagtcaatcgatcaatcaatgtcttaaacaagtggtaaaaggaaaagaggattgagggaaggcacttttacagtttttgaattttacaatgaacaaataatatttctataaatttaaaacagaatttaaaaaatattttgaaaataactttctaaattaatgaagcatctgccaggcctaggctagaactgccagaatgaaacgaagctctagattagaatactctacattttgtcattttgagaagggagcttcctttctgcctgagaaccttagggtaaatcctgctacacaaattatcgcatccacgtacacagagattgtactcaatggtgtcattaagatgaatagccccactttgggatgccgaggcaggcagatcacttgaactcacaagtttgagaccagcctgcgcaacatggtgaaaccccatctccacaaaaatgaaagataaaaaaataaaaaaataattagccaggcatggtggtacatgcctggagttccagctgccaaggaggctgaggtgggaccattgcttgagcctgggaggcagaggtgagccaaaatcgcaccattgcactccagcctgggtgatagagccagaccttgtctcagaaaaaataaaaaaggccataaggcagaaagaaaacatgtgagctggtcctttattcataaatgggatcacacaaccaaaaactatcagaaactggaagaaaaagcatagaaggaaaaaaatagcaataaacagataaactgggggaaaaacaaattctggagcagaaaagaacttccacattgttataattaatttcttcagaaagatttggaaaagtaatatttccctaatataaaaatcagtaggccagatgcagtggctcacgcctgtaatccccacattttgagaggccaaggcaagtggattgcttgagtccagcctgggcaacatggcgaaaccccatttatacaaaaaaatacaaaaataattagccgggcatggttggtgcatgcctgtagacccagctactcaggaggctaaggtgggaggatcgcttgagcccaggaggcggaggttgtagtaagccaagattgtgccactgcactccagcctgggcgacagagcaagacctgtctccagaaaataaaaataaaaataaaaataaattgtgatattttgaagaattgcgaaagtcaaaatcatgaagtaaataaagtataagtaaaactgccaatagagggatataggaaaagttaaaccctccaaaaacttagaaaaaggtaaaaagatggaaagccaaaggacatagaagattctcgcaagaaagaaaatacctacaaggaaataaagaatcaggatggcatcctggctaacacagtgaaaccctgactctactaaaaatacaaaaaattaggtgggcatggtgacgggcgcctgtagtcccagctactcgggaggctgaggcaggggaatggcgtgaacccaggaggcagagcttgcagtgagccaagatcacggcattgcactctagcctgggcgacagagcgagactccatttcaaaaaaaaaaaaaaaaagaatcaggatggcatcagagttttcagaaatttgattttagaagacagagcagtaataccatgaaagcatgtttcttttacagcaccagcaccctctcagaacattaataaattgtatgccatcaaataacaaacagaatgagggaggaaggagttcaagactagcctgggtaacacagtctctacaaaaagttaaaaagttaactggggacagtggtaggtgcatgtggtgccagcggctcaggaggctaaagcagtaggatcccttgagccccagagtgaaggcactgtggtgagccatatttgcaccaccgcactacagcctgagcaacagagcaagaacctgtctcaaaaaaaaaagaaaaaaaagggagaaagggaggtagaggccggaggcggggaagggagagaaagagagggaagtggaagaaatagtggaacttgccaaagtgtacaataaaaagaaatttcagtcttaaaagcagtcagtacagaattaatctcagcaaacaacacgattaagaagctagataatattaggtaataaggaaaaaggcgtacattgtttctatcaatgagaaaacaaaagggcagaaactctgaaaagaggggaaaaaaatatttgttggaaagttgaagtacaaataggaacctaaatcaatggcatgatttttgagcagtagatacagtataagaaaaagaatccagtcaaacttagtacttaaaacattcttctttgagcatcacagtttccttttctgtagtcacattctctgcaataaacaatatttacaaataatgaggcaatgctgcaaataaacccactgaccaatcagaaaaatgatagttatagaagaggaaagtagaatcaaaaggcagggagatgagatgccaaactcaaatgcaaacaatgagagcggaatctgaaatacgagatgaagccaatacccagaagccagacacaggataagaaccgaaccaggttagaagcaaagcagagggcttcaaaatgatttcatcttaccaaaggatttctcttcgtagtgacaaaaatgttttctaattattgcctgttatgttggattgtttcctgtttgctttgtcagtttgtgaattgggatctcatgaatcatgatcatttcattgtaatagtagcatcaactaggataggacaatttatgtcaaaaaggtcggtgtaagacatattcaaatactttcatggctgtgaacacttaatataataaagaggttcttgcggacaggtgcggtggctcacacctgtaatcccagcattttgggaggctgaggtgggtgaatcatgaggtcaggagttcaagaccagcctggccaagatggtgaaaccccgtctctactaaaaataacaaaaaattagccgggcatggtagtgggcacctgtaatcccagctacttgggagactgaagcagagaattgcttgaacctgggaggcagaggttgcagtgagccgagatcacaccactgcactccaacctgggcgacagaatgagactccgtctcaaaaaaaaaaaaaaaaagttctttctaattttgttttcccttcagcatgatcccacgcctatctccaagaatacagccagaaaaatacatcattcattaaagagtaaaacattaaaacagtgcgacatgggtgcataaatagacagactgtagaaacagagttttaaagtccataaataaataatatacttacagcagtttagtacattataaagatggcatcagtgggggaaaaaatggtctcttcagtacatgatgttgttataggagagccatcttgaggggacagatgttgtattcatatgttttaccataagccaggataaactttaaaccaatcaaagatctatatgtttgaaaaagaaaagaggctgggcacagtgactcacgcctgtaatcccagcactttgggaggccgaggcgagtggatcacgaggtcaggacttcaagaccagcctggccaagatggtgaaaccccgtctctattaaaaatacaaaaattagctgagcgtggttgtgggtgcttgtaatcctagctactctggaggctgaggcagagaattgcttgaacctgggaggcggagattgcagtgagccgagatcttgccactgcactccagcctggatgacagagcgagactccatctcaaaaaaaaaaaagaaaagaaaaaccacaaaagtaacttaagaaaatataggaaaaaaacatggagaagaccacagaagaaaagattgacatattctgctacatcacaatcaaatgttcttcataacaaaaaaaaaaaagcgggggggggggggtcataaacaaagtcaagtaagaggtaaactggaaaaattgccactcatattaaagacaaagggctaatttccctaacatataaagagctccttgaaatgtataagaaaatgaccactcagtagaaaaatgggccaaggcaatcaactgaaaaaaaaccttcaatatattaaaaaaaaaaaaaaactgctcaacttcactgtaaaaggaatgcaaaataaacatacacaaacccttatcagactggcaaaaatcctaaaaggtaacagaagcttacattttatcaattataaaactaaagctcattgaactagattaggcagcctaagtttaaacaataataatgtcaagaatagatgtgtcgtttgctaatagctttatactaaaatagtaccactacatgtgcttagccaggtgcagtggctcatgcctataatcccagcactttgggaggccaaggctggagaatcacttaaggccaggagtgagagaccagcctgagcaacatagtaagacctcatctctaccaaaaatttaaaaattagctgggtgtgggggaatgcccctgtagtcctagctactcaggaggctgaggcggtaggatggtttgaatgaactgtgatcacaccatagcactctagcatggacaacagagcaagaccctgtctctaaaaaaaaaaaaattgaagtggaattttcttggttcaaatttaccatcgatataagttggatcattatataagccaaacataataaaattgaaaatgtgttctaaatgttatttgggtacccactgtagctgtattatcctaataagaattttacagaattttgctgatcttaaagtgttctttgcctggatttcagaaactgctaatattttttgtacagtcacattaacgaaagtggtactgtgacaacaccccaaactggggtgatcttaggataaagcaaagatgtgaatttcccttctaatctcctgaccactaaacccccctttaccttatttatctgtagaatagtgctagattgttttggaggggatttttgctcttattttatcttcatgccaaagatagaaaagttgtggctaataaagagatgttctttcagatagaaagtttttcttttcataggctttcccttctacttatcttggtaagtagaacaggagctgaaatctaccataacaccatacccatttgacatcaaatcaataattatatacttcaccatagtggagcatataaatgaaacaacataatcttgaaagcaaaaagagtccccaaatggcccagataatcatatatcagattggcaatgtctgcaagtatatgcattctcatgtacattggccaagccaggcccactactgcagaaaggagaaaggattctgacaccatttcttctgacacgtctcgcagccctaaaatctattaaggttatatggcttaaactcagcaacactgctttaaaatactcactcaagttagatggttctaaatagaactaatgacagccagaagagaaaggcctgtaggaacttgctgtgacacagagctggtgtctataaacagattagtagaagagagcagaacattgttctatcaccataactttcgtgttttggcatgaagatacaataagataataggaaaaaattacctgttacatagcctaccactgttctgttctgataaataaagattaagaagagtttagcctgtcatctctccatatacttgtatatgatgtatcaatttagtaattaatcataaatacccactaactagtgttatgtactaaagatttgtctatggatatgaaagacaaatacacttgggagcaagaacgggtgaaatttttgatctcttcaaaaagttcatcacaattaattcttagttcaaagggcaactgaagccaaccccacttatcatttgtaaaaggataagggataatacagctaaagaaatcctgaatctgtattaaacttactgtttaactgctgactagtagccaagattggattctttttctctaccatctttatataagaattcaaaggaaatgcgacagtttaaaagaagaagagaaaaagttaaatgcttaaatagtctactcagcgaatatatgtggagcatctacagtggaaggtagctatgccagtggttcccaaatttgtctgtctattagaatcacttgagatcttcaaaaattccaaaatacaaaaaaattagctgggcgtggtggcatgcgcctgtagtcccagctactcaggcactgaggcaggaggatggcttgagcccaggaggtagaggctgcagtgagccgagaccacaccactgcactccagcctgggtgacagtgagatcctatctaaaaaaaaaaaaaaattccaaagcccaggccacaccacatcaattatctcacagtctctggggttgggacacagtcatcactggcaatatttgaagctccacaggtgatttcagtgtgcagaaaaacgtggaaaccactagactatagaatgttgtaattgtcagttatattaaatgagtattaatgatcaaaagattcatgtgcatgattctaattactattttattttcacaacttatgtgtgtagtataattgtttcttctacttaaaaatattttaatattaatcattattagtctgcttgctaaaatcactcttgctactttcttctgttttcatatatcaacaggaattggcagcaatgaaacagattctcgttaagatgcatagtaaacattctgagaacagcttacttctcactaaaacagaaccaaaacatgtgacagaaaatcagaaatcaaagactttgaatgtgcctaaagagcatgaagacaatatatttacacctaaaccaacactctttgtaagtacaatttttaaaactcataattttaatattcctgattcttactaaatgtattttagttaattttttccttttacatttatgaaatgagtagattccacaaatatgtttcatgaaaagaccttgaaggatttgcattaatccattttctaaatgtgtatattacctatcttatagatgatagtatattttactgtaattcctcataaagtgtgaaatcaattaacataaactgaaatgcattgttagctaaaaatatatgtgcacagaaattaaagaaaaagaaataagaaaaatttggattaaaaggtaaaataccaaaaatatgtacagttattatgtgccaatttttaaaaatagagaaaataaattaggaaatattgaaaactatatattttaacaaataataagaatcaagattaaaaggcaagagaattaaaataggagtaacattattaaatattccattttacttcaaatggtttctcaatcatgctttcatttctcaggagaaacatgatttttatctgctaaacatagagactcaaaaccagaaagattttctctgatattctgattcagtgagtccccagaatcttaatttttttaactcccaagttgaatataatagtcaaatatgagaacttctgatctcagtcattttattatacatgcagataatgctactgaagattaataggatgaaagagattttttagtgattatataattcaacctccctttttaaaaaaatgaaagttgcagtttagatcaaataagagacaattgggcagacatggtggctcacacctctaatcccagcactttgggaggccaaagtgggaggatcacctgaggtcaggagttcaagaccaggctggccaacatggtgaaaccctatctctactaaaaatacaaaaattacccgggtgtggtggcacacgcctgtagtcccagctacttgggagacaggcaggagaattgtcggtgcgatggcaccactgcattcaccaccttggcgagagagtgaaactctgcctcaaaaaataaaataaaataaaataagggacaattattttaaggatacgtgtggcagtaatgtagactaagctgacaggcgggagaaaacaggatggctcagttgactagcctggacacaaggcggctgagtccatgcatcttttcctctgtagtacatcagcttctctttgtttctcctctagtttctgcttactcatgttttccacttcctcattaacttgctcacagccctttgtgttgaaacaggtttctgtacatcctttctgcatctactctcttataatgtagttctccctgtattttccaagactaacaatctaattggcatagctaattcttgttgggtgatacccctttttggcaagacttcctaagcttattacccagcctacagaatggctgcccttaatggtgagcaggagtcacacagttccaaatacagctgccgaggactgtttattaagggctatggctaggcaggttttgctcagagagtgggcagagattgtggcagacactatgctgtgtctattataatctataggaagaaagcagattgaatacatacacattaatgggaaatagggtcagatgaaaaccacaagatacagctgaatacttaaagcctgtcagcactctctgatctgcctttctgatcctactctgctccaggcagtggcactattccttctgaccctgaccttctgcatttctagctttagcttggtaacctgattgtgattttctggaataccggctataatcaatcagtacatgagtaacaataagatttccccagtacctccagataaggttatgcagtgatgataaaattaagaagattcaatattagttgggtagttcttccttccttatttttgcttatctggattttctattttattctacaataaaattctttttaaataataataagggaaatttttttcaaaagaggtacaagctcagctatgtcctaatgaaaactgagaggtaatactacaaacaagtcaaatcaaagactgtaagctaatgcagaattagtaaggtgaaccgactagataacctggggcaaatcattaaatgttctcaatgtgttcttatctataaaattaagtgggaggttataatgaaatgagttctggactccttttattctagcatgctatgattctcttcaggcatcataatttttagttattcttttgaatattttcaattttccataagaatacttttttatattttctctgaacttgttgataaggaatttaccatgctaatatttgaagtaagagctaatcattttataatctcatggttttatacctaaaatgaaaacatttctaaatccagatcctttggctgaaagtatttgctataggtattttcccctgatagtaaattcagtgatggatgggtggatggatgagcgtttccatatgcattgacaatatgaggcgagccacacaaaactactgttaactgggtaatggagtgggagcagtgctgtgacgcagaggaggagaaataagagcttgactttttttttttttttttttttttttttgacacttaggtcttcttctgaagactttttttttttttggagatggagtctctcactctgtcgcccaggctggagtgcagtggcgtgatctcagcttactgcaacctctgcctcccaggttcaagtgattctcctgcctcatcctcctgagtagctgggattacaggcatgtgccaccacgcccagctgatttttgtattttcagtagaggcaaggtttcaccatgttggtcaggctggtctcaaactcctgacctcgtgatctgcccacctcggcttcccaaagtgttgggattacaggcgtgagccacagcacctgacaagactttttttaatgtgcttttttatatgtatacaaatgttttacagtgtacaagtgatatttacatctgaaggcaacctcaaaattcccttttttagaaaagctctggcctttgaaatgacatatgtgacagagtcattgttcaggcacttagtgtaccaacaaaaactaattgaaccacagaatgtaagtgccttaaggacagaaactgtattccttttgttttgcatagcatctgaacaaagcagatactcaataaatatttgctgaagagaaaaaaaggagttatttgtctccccagtttagttatgttcttagctgttaaaactctaaactgggtggggaactttaatgttaaagtaaactacagggagaatgaaagcttcacctcccatgactctagttagtgctacttctgcaacaggcaacttaagtcttctttattcagaaacacccagttcattcccactaatcacctactttcactcttaaggtagctttttgctgtgctatcccttttttcccagcctcacttatctctttcttagaaaaacctagagctattctaatctgatttagaacaactttcctctttccttcctgagcagtatgggactcttttgctgcttttctgctgccatcctattcgaaaatagaatttatactcaggattcacatcattgtcattattttctcaataccttattaaaaatgcagatactagcaactctacttttagtcttttcaccaagtagattgtaagcattaaaacaaaaaagagcttgggcgcagtggctcacacctgtaatcccagcactttgagaggccgaggcagacggatcacctgaggtaaggagttcgagaccagcctggccaacatactgaaatcccgtctctactaaaaataccaaaattattcaggtgtggtggtgcatgcctgtagtcccagctacctgggaggctgaggcaggagaatcacttggacctgggaggtggaggttgcatgagccaagatcatgcctccacactccagcctggacgacacagcaagactctggtctcaaaaaaaaaaaaaaaaaaaaaaaaaagccttaggctctaagtatggtagcaaacaatacgattgtgcacctccagtgtatagtgtgtgaagtgtctgatttttggtgagtttacgacgtagttcaggccttgacttacatttgttatctcattggctagcatatgttgtatagatagattaagtttatataattgatacataagtggttatatgaacgacatgattccctagaagagctttggaaagctatatgtcatctggaaagaaaaaaaaattttttttttttttgagacagagtctcacgctgtcgcccaagctagagggcagtggcatagtcttggctcactgcaacctccgcctcctgggttcaagcagttctcttgcctcagcctcctgagcagttgggattacaggcacatgccaccatgccccgctaattttttgtatttttttgtagagacggggtttcaccatgttggccaggctggtctccaaactcctgacctcagatgattcacccaccttggcctcccaaagtgctgggattacaggtgtgagccaccgcacctggcctggaaggaaaattagtgtagtcaattcaagaagcatttactgactatatgcaagagcctgtgatgatcattaagacagcatcagcattaaaactgctgctcctataggatcaagcttagtaaacaataatataaggcaaaatcagttagcctactttttttgttttatttttgagacacggtcttgctctgtcacctaggctggagtgcagtagcatgaacacggctcactgcagcctcaatctcccaggctcaagtgatcctcccaactcagcctcccaaatagctgagaccacatgtgcacaccaccacacccagctatttttctttattttttgtagagacagggtctcactgcattgctcaggctggtcttgaactcctgggctcaagcaatcctcccaccatggctataatctcaaagtgctgggattatagtcatcagccactgcacctggcctgggtatcctactttaaaggaaatacaaattgctatgaaaattcagagaaagaatagacactgtggttttggaggactctaggttgccttgtcagaaaggaagtatttgagcttggctttaaagaatgcatggattttgacaagtgaagatgagcattatttagaaattccaagagcaaagaaaatatgatattggccaggcgcggtggctcacgcctgtactcccaacactttgggaggccgaggtgggcggctcacctgagatcaggagtttgagaccatcctggccaacatggtgaaacctcatctctactaaaaatacaaaaattagccaggtgtggtggcaggcacccgtaatcccagctactcaggaggctgagacaagtgaatcacttgaacccaggaggcggaggttgcattgagccgagattgtgccactgcactgcagcctgtgtgaagagcgagattctgtctcaaaaaaaaaaaaagaaagaaaagaaaagaaaagaaaatgtgatattcacaaaatattttctaacttgtgctcctttttaattgttgaagaataggatgtctaatatgtattttctatatctagactttattcctttcttactatattcttacgtctgactttggccaattcactatctgttaatcctttcccatagtacaaaagggaaataaaagtagataggttatacctagtcacattaatagagacagaaagtagagtggtggttgtcaggggctagggggtatggggatttattgtttaacaagtagagagtttcagtcaagcaagatgaaaagagttctatggatggacagtagtgatagttgcatcgtaatgtgaatgtaagtaataccactgatatgtacatttaaaaatggttggccgggcactgtggctcacacctgtaatcccagcactttgggaggccaaggtgtggggatcacctgagatcaggagttggagaccagcctgaccaacatggagaaatcccgtctctactaaaaatacaaaaattagccaagcgtggtggtgcatgcctgtaatcccgaggctgaggcaggagaatcgcttgaacctgggagggggaggttgtgatgagccgagatcacgtcgttgcactctagcctgggcaacaagagtgaaactccatctcaaataaaaataaaaatagttaatgggataaatcttatgttatatgtattttaccacaatcttctttttaaaaactttttaaagcctgggcaaaaacttttgtaagatcctacctttaccaaaaaaaaaaaaaaaattttttttttaaattagccaggcatggtggtatgtgcctatgatgctaagctacttgggagtctgaggtgggaggatcacatgagcccaggaggttggggctgcagtgagccatgttcacgccactgccctcaaccctggatgacagaacaagaccctgtctcaaaataatatatataaaatgatgaaatataaaataaaaaataaatttaaatttttaatttaatttaaaaattgtaagtaggttacaaaaataatttttctcatttattcatgagggaaagtttataattttatcaaaaatggaacgtagcagttatttataatatagtaatataatgagtacaattggttgtgtttagacaagtgacaaggatgccacactagggtagcgtcatcacagaatcatgtcctaacactgtgcctcccaacattttttataacacacatggaaaattataatatttctatggcacaacaggataactgaacttgctggtagattgaagggactccagccaccccaggcactggggactgaggagaacaaaagctccacatacctgtaacacttctgtgtcatatttgtgtttagaagttctggtttcacttttttttttttttttttttgaaatggagtcttgctctgtcgcccaggctggagtgcaatggtgcaaactcggctcactgcaacctccgtctcctgggttcaagcaattctcccacctcagcctcctgagtagctgggattacagggacgcaccaccatgcccagataatttttgtgtttttagtaaagacggggtttcaccatattggccatgctggtctcgaactcttgacctcaagtgatctgcccacctcggcctcccaaagtgctgggattacaggcataagccaccacgcctggcccggtctcacttttttatgttgaatgtagactcatctcaccaaagtatgaccggacctcaaaatatctagctgtttacatatacatttttaaatattcattttttaatttctagtgtcaggaacactaattgtaacctcttcctgatgttatttaatttagctggtgagctaaactagaaatcaggaattttttggtgagcatggaacgaagctgactgatctcagacagcttcacattttgttagtgataaagccagatcaactgtcttaaactcacttaagttgggccctgcctatgaggacttctcaatatttacttatttgatttccagtttatatcttatttggaaaacaaagtaatgatatctaccagacatagattttttttccttagagaagtggtactggttaaacactaatagattcttaatttctagctctttttttagattacaggagtaatctgccaggcttactatgtctgcatttatcagtcatcattctttctaattttaactaaccctctcaatgggttataatccccatgttatatattaacgttttagctggctaattctgggtgacacagaagtatctatcttatcaattatttgtttccaaaatcaccttgtaacatagtaaattacttctggtaagtttccagttagtcttgtcatttgtttctgcaatggctttgtgctctctttcctaaatctggaatatagtatactttagggcctgttaatactccactaacaatttaaggtttttattaatttgtatacatatatatatatataatgtgtatgtaaaatatatatgcatatatagtttatatatatctgtaaagcacttcatattatgaagcctataagccttatatttaaaataaggaccctactcagttaaatggttaatcccattaatacctgaagcagaatgtcaaattttgtcatataaagcaccatcttatggatataaagggaagtaactttaataaaatagaaaaaagaaacactgctgatcaaagagctaaaagaatggaattatcaaaataaaaagcagttaatttttgtttttgtttttttttttttttgagatggagtctcactctgtcacccaggctggagtgcagtggcgcaatcttggctgactgcagcctccacctcctgggttcaagcagttctccaaaaatcagttaattatacatctgaattattttgctgtgcccattttaacaatcagttaccaagagccagcaaactctattgtatattctttgttcgtttgttttttaccttttaaactaggccaggcgcagtggctcacgcctgtaatcccagcactttgggaggccaaggcgggcagatcacctcaggtcgagagttcaagaccagcctgaccaacatggagaaaccccatctctactaaaaatacaaaattagccgggcgtggtggcgcacgcctgtaatcctagctactcgggaggctgaggcaggagaatcgcttgaacccaagaggcagaggttgcagtgagacaagatcgcactgttgcactccagcctgggcaacaagagccaaactccatctcaaaaaaaaaaaaaaatgtcaaaaccattcttagcatgcaccccatacaagaacagaccatggaccatagtttactgatccatgatctatctcaggagttgataaaagcttagaaacttccagtgtttggaacagggctatcactaatggctagcacattactgactaaaatatctggaaatgaagaatatacattttatgaaaatcagaaataaacttttcagaagcagtattatctacttggaatctgttcaaattttggtagtgatgagacttacatactaatgtaggtgagaaatcactctgacatactctatgctaatgtaattaacagagaacctgaatttcagagaataatataaccgaaggaaaaagttcaccaatcgaaggattgaaaatatctttgaatgatataagtaaatttgagttcatacagcaaaatatgctgtttccatgccttactggttatttaccatttccactcaaaaatcaggctgttgcttagaatcacaagtactacccctgatgcttgtaaagggtgatgttgcctgattagttaaaagcatattattgcattactgtagtagaattctcttttgtcttgcatagtagaaaggcttgaatagactcacatgaaactttatgcccagacttaaatagaactgaaaggcttctgtcacagcagacccaaacattcattcattcattgaaaaatgtttattgagcacttactttgtgccaagtactattccaagcagtagagatataaataattcctgcctctgtggatcttacattcatggatagagatagactataaaccgacaaacaaaaaaataaattgaataagatgtgaaaacatgacaaatgctatggagaaaatgtatgaggtaactgagaagtcctcgatttgcccactttgcaaaattaataaatggctagaacctgtgctttaaccactgtactatacggtgctcaaaccacaaaaatcaaagaaggcatgacatcgaacacctactgctggcgagacacttccctgcatgctgaagatacaacatgagataagataaatggtataaactaagagtataagagtcagcatctttaggaattgtgtcccactgctagttcagcagctttagcaaattgttcagtctctcacatacaggcctggagataactatttcaggacaagtatgtggccctatgaagtcatcaggaacctagattccctcttcctttctcttcaaccatccttagagtgtggcatctgttcttagaatcacaatatggttgctctggcctcagccatcatgtctgcattttaagcgggaagcgagaaaaagggaggaaaatagtctccctttccaaaggagtttttccctaagtcctacccaacatcttcagcttatatcccattggccagaacttagtcgtgtggccacacctagcagcaaggaaggctgataaatgttttatacagggtgaatctattgctttactgataaaatcagagttctgttattaagaagggtgaaatagatataggctagacagccagcaacctctgcacttgatctcagccaaaaggtcgaggcgtgatcccagcagcctctgtaacagggtttgattcatttttatatacccagaacctaacacaaggactggcacagagtagttagtcaaataaatgctattaaactaatcccaagtacaaataattgagttcatgttggagagtgtcaagaaataggattagatatgtaagtatgggccagatcctaaaggggccagtcttctaagtgaaatgtggttagaacatgacagtgatggtgaagttcacccaaaataacctgggaataaggaacatatcttagtcctatgggaacagactttgaaattaaaatggttgtgataagacatctgaaaagtcaccctatgaagtagcaaggcagttaatccccaagacaaggtacacttgactgtggcaaatctgtctcattaacaggaggagaaaacatattaggggtgggagtaatggtctgcagtgtagcagacacagataaaaggagagtcagaaagaactgtctgccattgaaattcttataccgtcctttttgagtattaagattcctttttaatgccaaagtttttatttaccttctccctgtaaacacatagtagtagtaaaaagtttagtatcagttcattgaggaaatgcaaatgtacaaaccaattctgcatcctttggtataatcccgaggatctgtagcttagtttatagcagttgctttcacctttttggccaggagtcacagttgagaaaacaatttacgttatgacctagtaatgatcacacagtttctcaaaacagaacttacccccactatggccaatactctaatattttctatgctagttttttttttttttttttttctaaattctgttcttttacctactagagttcattacccgtgggttgggacctgcaatttaaagaacaatggtggccgggtgctgtggctcacacctgtaatcctagcactttgggaggccgaggcaggcgaatcacctgaggtcaggagttccagaccagcctggctaacatggtgaaaccccatctctattaaaaatacaaaaattagccaggggtggtggtgcatgcctgtagtcccagctactcgggaggctgaggcaggagaattgcttgaacctgggaggcggaggttgcagtgggccgagattgcgtgactgcactccagcctgggcaacggaatgagacttcatctgaaaataaataaataaataaagaacaatggcatacatgttcttctatgaccaagaatagtgacagccctagacttttagctggctcacctttcccagtcacccaaatctatctgattgtataagaatcatgcaattccctagttttactctgacttttccttatcttaacaacaaataaaagctgagctggaaaatcattaacttttcttttttttttttttttttttttttttttgagacagagtttttcactctttgttgtccagggtggagtgcaatggtgtgatctcagctcactgcaacctccacctcccaggttcaagcgattctcctgcctcagcctcccaagtagatgggattacaggtgcctgccaccacacccggctaatttttgtatttttagtagagaagggtttcaccatgttggccaggctggtctcgaactcctgacctcaggtgatcccccccaccttggcctcccaaagtgctgggattacaggcgtgagccaccacacccagccaacttttcttaaatacataagagaagtgaggtcacaaagcaaactgctgcccccaaaattggacagataggccaatacagagaatgatgatgtatcagagcaaaaaatcccatggatgggaaccagtgctggggtaggaaaacctgaatgtaactgctagaagttaggtatggacaagtctgaaagttaaaaactccagtcatagaaggaacccccacactcttgtgaattttaactttagaagcttgacctagttcttacagtaaatattgggagaaaaatccccttccgtttccagcagtgggagggaaaaaagaacattttgaaatatgttagagaactcagttctcaacaaggtctcccttcaggagaagctattttaactagaagctaccctgctggggctttatcaaagcctaactgacctgggaaaaactcaatacccaatccagcccacctagccatcatggcccacctaagaagggaaaaaaaactgagaaacgtgtgtaaagttcatattccagaggcacactctaactgaaagactgagacctaatcataggaccataggatgacttccctacccccacaccttaccaccacattaccaaaggcccatttacggcagtttctttttcccagtacagtatgtccagttatcaggaaaaacttaaccaggtagactaaaaaccaaaaaacacagtttgaagagacagtgcaagcatcagaaccagagtcaattgtgccataaatgttggaattaacagacagagaacctaaaacaactatgattagtatgccaagggctgcaacagataaagtagacagcttgcaagaacagatgggcactgtgagcagaaagatgaaaatcctaagaaagaacccccccaaaaaggagaaatactagagatcaaaactgcttataacagaaacgacaaatgctggccgggtgcagtggctcacacctgtaatcccaatgctttgggaggccgaggcgagcagatcacctgagatcaggaggtcgagaccagcctgaccaacatggtgaaaccccatctctactaaaagtacaaaaactagctgggtgtagtggcaggcacctgtaatcccagctacttgggaggctgaggcaggagagttgcttgaacctgggaggccaaggttgcagtgagccgagattgtgccactgcactgcagcctggacaacaaagtgagactctgtctcagaaaaaaaaataaatgacaaatgcatttgataacctgattagtacagtggacattgctgaagaaagaatctctaaccttgagaatatttcaggccaggcacagtggttcatgcctataatcccagcactttgggagtgtgagaggatcacttgaacccaggagttcgagttccagaccaaccttggcaacataagagaccctgtctacacacacacacacaccaaaaaaaacaaaaaaaaacaaaaaaaacacttagccaggcactgtggtgcacacctgtggtcccagcaactcgaagagctgaagtgggaggatcgcttgagcccagaaggtcaaggctgcagtgagccatgatcatgccactgcactgtagtctaggcaacagagcaagaccctgtctccaccaataataataataataataataataagggtattgtaacagaaacctctaaaaaagagaatatccaaggactaaaggatgactacaaaagctatagcatatatttaatgagaatattagaaagagaagtaagaaaggaagagaagaaatatttgaaacaataatgacagaatttcccccaaactaatgtcagacaccaaatatccaaggactaaaggatgactacaaaagctatagcatatatttaatgaaaatattagaagggccgggcgcggtggctcacgcctgtaatcccagcactttgggaggccgaggcgggcggatcacgaggtcaggagatcgagaccatcctggctaacacggtgaaaccccgtctctactaaaaatacaaaaaattagccgggcgtggtggcgggcacctgtagtcccagctactcgggaggctgaggcaggagaatggcgtgaacccgggaggcggagcttgcagtgagccgagatcgcgccactgcactccagcctgggcgacagagcgagactctgtctcaaaaaaaaaaaaaaaaaagaaaaaaagaaaatattagaaggagatggaagaaagaaaggaagagaagaaatatttgaaacggtgacagaatttcccccaaactaatgttagacaccaaaccacagacccagagaaagataaatgcaaaaagaaaaaaacaaaaaacgaaaaactatacttaggcatatcatttgcatatcattttcaaactacagaaaattgagataaagacaaaatcctagcctgggcaacatggcaaaaccccatctctataaaaaatataaaaattagctgagagtgatggcatgcacccatattcccaggtactcggaaggctgaggcaggactatcacttgagcccgagaggttgaggctacagttagccatgatcataccactccagcctgggtaacagagcaagagcctatctcaaaaaaaaaaaaaaaaaaaaaagaaaaagaaaaaatcctgaaagaagcccgaggaaaataacaccttacctatagagaagcaaaggtaaggattacatctgacttctcagaaacaatgcaagcaaggaaagagtggagtgaaacatttaacgttatgaaagaacaaaaccaccaacctaaaattctgtaccctgcaaaattattcttttcagaagtgaaaaaacaaaaattgaaggaatttattccataacttttcaaaacagaaagcactaggcccagatgggttcactgttgaatcccttcccttcccttcccttccctcccctcccctccactcccctctcctcccctccccctttttcctccctagtagctgggactacaggcgcatgccaccatgcccagctaatttgtgtattgtttgtagagatggagttttgccatgttgcacagactggtcttgaactcctgaactcaagtgatctgcctgccttggcctcccggtgtgagccacagcacccagctaaaattgtacctattctctacaatctctttcattagatagaagcagagagaatacttcccagctcattttgcaaggccagcattgccctaattccaaaatcaaagatattagaggaaaacaaaactacagaccaatatctctcatgaatgtagatgcaaaaatctatgaggatttctagggcagtgaaaatattatgtgatactatatattattatgatactataatggtggatgcctgtctatagacatttgtccaaacccataaaatgcatagtaccaagagtgaacccaaatgtaaactgtggacctagggtgataatatgtcagtgtaggttcatcagtggtaacaaatgtaccattgtgctaagggatattaataatggaagagtctgtgcatgtgtggagccggagagtatatgggatatctctgtaccttcctctcaattgttttttaagacagtcttgctctgttgtccaggcttgagtgtagtggcatgatcacagctcacttcagccttgacctcctgggcccaagtgatttttttttacatgatgtcttgctctgtcactcagactggagtgcaataccacaatctcagctcactgcaacctccacctcccaggttcaattctcctgtctcagcctcccgagtagcttggattacaggtgtgcactaccatgcctggctaattttttgtatttttagtagaaacagggtttcaccatgttggccaggctgatctcaaactcctgacctcaagtgatccactgtccttggcctcccaaagtactggtattacaggcatgggccaccgcgcccatcgtcaagtgatcttctcacctccatctcccgtgttaactgagactacaggtgcatgccaccatgcctggctaacttgttttttcttttcgtggagatggggtctcactatgttgcccaggctagtctcgaactcctgggctcaagcagtcctcccacctcaacctcccaaagtcctgggattacaggcatgagccaccgcgcccagccaaaataggaactttgactggaatcagtgaagttctgaatgttttattctgtaattcacctcccctgcctttttctttctattctgtacagcctgtcgccttttaggctgaaatgattgagtaataaacccaagaagtactctggtaaatacttagaaattcataagatctaaaacacaataatttggatacagtaattatttaataaatatctattgagtgaatgaatatctattatctatatagatgagacaactgaaaagaagtcatgtccttgatttttttataattctctttgaaaataaaatcaattcgtaaaataattgcatccccagaaaatcttaagtataggctttgagcaagaaaacacagttttttccatcatatacctaccaggtgggagattatttatggcaaaagacaaagtcttcgcccttaagtatcctttctgaattaagaaaagcaattttttagtatagcttacataaaaaaacctcaatgtatatagttctctgagttgcctctcttgtcctccttgtaagcattttattggattttctttttctttttttaaacagactaaaaaagaagcacctgagtggtctaagaaacaaaagatgaagacctagtgttttggatgggaagcacctgtagaccattatatactcctgaagttctttttctgatggaaaacaaaattcagcttaatcgtgtactcagcattttttaaataacaatgtttatttgaactaatattaaattaacaaattcagtgtaatcaaaatgtgtaaagaacaatcaatatactttatttttttttctattttataaaataaatatatatgctatgctttaaattttggagctttcataaatgttcaatgcattttaagtgtgtggcttataaatattttggtgagtatttttctatactacgtaaattctgagtttaaatgtcatacacaaatactaagacactttgcatttttaaaaattaagaatcatttgtgaagtccactacgaggtacttcaaaagcccagtaatggtggtcagataccatgtagatggatacagattgttgactcttttgaagttgtttttttcttatattttatattaccattaaccaataaaatctggcagaaagtctgctattccattggtaaagtgaaaatttggtggaaagtctgttgctacatcagtcataacattgttggaccagatgcaatatggatcagatttctagtcagaaaaaaaatcaataggattttcttttgtcataaaatatgctccatttctcattgaagttgtatactttaaaagaacggaaggaggcaagagagaggaaaaaaggaaagaaatatatatatacacacacacatatatatgtatgtccaggtttttcaaccactattgacattttgtttgtttgtttttttgagacggagtcttgctttgttgcccaggctggagtgcagtggcgtaatctctgctcactgcagcctccgccttccaggttcagacagttcttctgtctcagcctcccgagtagctgggattacaggcacccgccaccacgcccagctgatttttgtatttttagtagagacagggtttcaccatgttggccaggctggtctcgaactcctgacctcaggtgatccacctgcctcggcctcccaaagtgctggaattacaggcatgagccaccacaccctgcccactattgacattttgggctggataattctttcttaagggtggacatagggtaaatcctatgcatgtcataatatataccagcatccctggccttcagcactagctaccagttacacccccaccgcaaccctagttttttggtttttgggttttttttcttttagagacagagtctctctatgttgctcaagctggtcttgaactctgggctcaagcagtcctccctcctcagcttctcaaaagtgctgggatgacaggcgtgagccacctcacctggtcccacccccagttttaacaagccaaaaatgtcctggatgaagactagggttccttctacctcttggccattgtgaattgtcttactttttaacccttacctcatcttctcctggtcatggattttctatttatctatctgtttatctatctatctatctatctatctatctatctatctatctatctagaaacagggtcttgcactgtcacccaggctggagtgcagtggcatgatcatagctcaatgcagcctcaaactcctgggcaaaagggatcctcccaccttagcctcccaaatagctggaactacaggtgcataccactacacctggctagtttcttttaaacttttttagagacaggggtctcagtatgttggtcaggctgggctcaagtgattttcccacctcagcctccccagtagctgagattacaggtgtgagtcaccacacctggctcttacttaaaaataataaaaacaaaaattaatcataacattattttttcttgataaatgttttatgaaatgttgcccaaatgcaagtgtaatagccaccattatcaagctcattctgtcagccagttgctgtgttacatgctttctactctttatttaatcttcacagtaactctgtcaagtaagcattatcttcatttttaaaatgaaaaaaaccgagactcagtaagggtaactaaatggcccaagatcacacacacgataaatagaagtggatttgaaccaagttgctacgctctttccagtacacgacactgcttctcattgcttgcttcctatccctggctcccaagctcacttcaatagcaagaaatgcaggggaaatttttaattttttttagatatggtctcactttgttgcccagtctagtatcaaactactggccttgagcaatcctcccacttcagcctccagagtgagtagctgggattggaggcgcaagccaccctcccagcgaaaattttgttctatcaccttttctttgtgggtaggggggctatgggacttagcatagttgcattgtttttgctcaagataagttcatggttctgaaactttgtttttttttttgtttgtttttttgtttttttttttttgcagaagcttagcattcccatactcgtagttgaacccaggccacctgggtgaaaaaccaggaatcctaagaccatgtgggagatgactctaactcctaaagaattccatgactcttataatagttcttaccaggttaacaggatatactcagctttcagaaccaactaaatggcttgtattcactttattgattcatacattctttcattgaacaaacaagaaaaatctaaaatgtgtaaggcattcaaactatgtattgtttgtcttcttctcaaagggccctgaaaaagaattctatgatacctcaagcaccaaaggaagtttactttcatcatcctcagtatagaaatttccaaaaagaagtatcagctagtgacccaagtactccaaatgcactatatatataaagaagatgccacttttgctgatttcagtaagtcatacttggataatcatacatcaggaatgttaaggaagattcccacactttagggaggttgaagttgttaatgaaccagattcgcttttatgctaagatcctgagacagaaaggctactctatctcagtctctctctctctctctttctctttctctctctctctctctctatatatatatatgtatttttttttctttgagttggagtctcgctctgtcacccaggctggagtgcagtggcgcgatctcggctcactgcaacctctgcctcctgggttcaagcaattctcctgcctcagcctcctgagttgctgggactacaggcacgtgccaccatgtctcactaatttttttgtatttttagtagagatggagtttcacattggccaggccggtctcgaactcctgacctcaagtgatccacccacctcggcctcccaaagtgcttggattacagatgtgagccaccgtgcccagccagaaaggctactatattatatagctttgtggtagactcctgtgggcctcttagatttaacaaaggtaagaattcccacttaattatttgaaaaaacatttcacttttattaaaaatactgctgtttgaaaaaggtgcttctccagtggcattcagtattggtggcctggcatggtgggtactacccaatgaagactgtactatatatttataggccatacttatgaacacgtgtatatatatttatataagatctacctatctaggatggaaactcgggtgaaaataaaatagggtgaaggtaaaaagtacgtagcacttccagttgtgagccaagattgtaactagagagcagccaggagcttcctgtcagtaaccatgttttcaataaatactctttcatgtacaacaaataaataaaaagctgctgctcatatctgaaatgttctcaagtgaaactgatgtcaggaatttattttcccttgcctaatcttacaggattaaaatttgggttattggctgggcgtggtggctcacgcctgtaatcccagcactttgggaggctgaggcgggtggatcacgaggtcaggagagccagaccatcctggctaacacagtgaaaccccgtctctactaaaaatacaaaaaattagccaggcatggtggcgggtgcctgaagtcccagctacttgggaggctgaggcaagagaatggagtgaacccaggaggcggatcttgcagtgaaccgagatcgtaccactgcactccagcctgggcaacagagtgagactctgtctcaaaaaaaaaaaaaaaattggggttattgcaactttcccgctgatactggataggctagcagtggatattagcctatccaatatcagtgagaaatatattttattttcatataactcattttaaaaattaataaatactataaatgctctaaagaaagacttcctaaggcttagaggtcaccaacaaagctagccaactagtaccaagagtatcccgtggtatcatttactttggttgatttacagagctcacagtccagtcctcagctttacaggctcagaaatttaattttgttagtgcactaaagatgacacgtctttcaggagtgtgcccatatttactggtgcatagatcataatgtttatgtattacttctgagagaaaagtaaaactgatatacagaatatgacttattggaatcagcacacctggcatcttctctccctatttcctcctagcttctgccatactatacactcatatttttctccttcatcctcctctattacctgatcataaaacactgaatttttcagagcttttttccctctaagcctattcattccattctgtacttactctcagataatttctacaccctggcttcagctactaaatgccaatatttgcaaacgtacgtctccagttcagacggttccttttaaccacctgcctacttgacatttctacttggatgtcccattgtgacctcaaacttaacatgtattaaactgaactcaccaactttctcctccagtgttttcaatttcaataaatggtactaccatttatttactcagtgacttataccacaaaaccaggagtcatccaagacccttctcttgttaactaccagcattcaattaccaagccctgttgatctgcctcatatttttttttacttttgattgtgaaaatttccggccgggcatggtggctcacgcctgtaatcccagcactttgggaggcctaggcaggaggatcacctgaggtcaggaattcgagaccagcctggccaacatggcaaaaccccgtctctactgaaaatacaaaaattagctgggtgtggtggtgcatgcctgtaatcccagctactcgggaggttgaggcaggagaattgcttgaaaccgggaggcggaggctgctgtgagcccaggtcgtgccactgcactccagcctgggcgacagagtgagactctgtctcaaaaaaaaaaaaaaaaaaaacagaaaagaaaaaaaattttcaaatacacaaaacggcaaaggaaatgtcaagacaggatatattcattgtcttgattgcggcaatggtttaacagatatatacctttgtcaatatttatcaaattgtacattttaaaatgtacagttttgttttgtttttttgaggtggagtctcactctgtcacccaggctggagtgcaatggcgtgatctcggctcactgcaagctctgcctcctgggttcaagcaattctcctgcctcagcctcctgagtagctgggattacaggcacccgccaccacgcctggctaatttttgtattttggtagagacggggtttcaccatgttggccaggctggtctcgaactcatggccttaagtgatctatccacttcagcctcccaaagtgctaggattacaggtgtgagccacctcacctggccaaaatgtgaagtttattatatgtcagttgcacctcagtaaagatgttttttgaaaggaggaaagagggagagaaggaggacggtaggcgggtgggcaggcagtcaggcaggcaccatctagaaagccctgatgaagccaatgacttaacaaacatcaatgaatgctaaaacaattagataaaggataatagggaatattatatcaggccataaccacctataatcactagtcaaccttagtatcattaaaatgagacaaccagacattatgtgcttcctgatgtgatgtgatgtgatgtgaagtataaagcaatacatgtatagtatttttgtcaaaaattttaagattttagctgaatcaaattgagtcttcagatccaacttccaatctacaggcaaaacaagaaagagaaaatcaagctaaaagacgccaggaggaagcaattgactaaatccagaacacggaacattctgggcactgggaaggacaattgcttttaggccttccttattttgaggcatttttaataaagctgtaaaataatacgtttttaaagagagggaaaaactcatgagttcccactgatatatccaattctaatttgaaatttaaagatttcaattctctgattttacatgtgtgtttcatttcctgtgtgtgaattgttaacacaaccttagctcaagccatcgtgtcctcctccctaggattcttcggtagtctcctaactggccttcctaaatttactcatgccattctccgcagcaaagaatggattttttttacactgtgattttgtattttgaatttaacctacagtttatacaagagatttataagacatgaacttggaaaacagaacaaaatgtaattgaggtataagagcacagtatgtcatgtttcaataaatataattcaaaatttttaaatgatcaaatagatgagccttgcgttttactaaacccatgtgaaatatttgtttcttgcatgggaggtagagaaaaactgtattccttaatgcaatcaccacaatgtttatcataacattgtacatcaccaacaaatttttaaagtattaactattttgatcataatgagtgtttgcaatagttgcagaaagatatttcacttactgccttcacagactattaagttcagaaataacttaaaagctaccgtattggcataacatcatcaagataaacaaatatttcctaaatagatgcataaaaacatatattttattgtcctcagcccgtagctcctaaaggtatcttaaatttagccaatccttttagctcttgcattttaaatatgctatgcttcctttatttttatttatttatttatttattttttgagatggagtctcactctgtcacccaggcaggagttcagtggcacaatctccactcactgcaacctccacctcccaggttcaagtgattctcctgcctcagcctcctgagtagctgggattacaggcgcccaccagcacgcccagctaatttttagtagagacagggtttcaccatgttggccaggctgctctcgaactcctgacctcaggtgatccaccccacccgcctcagcctcccgaagtgctgggattataggcataagtcaccatgtccggcacttcctttatatttaaggagggcatctatagttgagaaaaagtttcccagatttttttttgtcacaaatagaatgaaatgcaatgaatagaacagaataaaaatgactgtcttcttaacccagaagcaatacaaaatatccatgcacttttcttctaataatggaaatgcatacatatcccttgataagaaaagaaaaaaagtcttaagctctaaacatttaaattattcagttccacagcttataatacagcagttacgttccttgttgatagcttcataaaaactactaagtagtttcaaatgcatagtaaaagcacaattttatcttaattttctaaaatgtccagtcatgtaaaataaagagatcaaaaacagaggaaaaaaatttcattacaattttttccttcaaaaaaatcaaaacttaattccaataaatgagaaggaatgttagctgacaaaaatgaaaaaaaaaaaaaatggctgggagcagtggctcatgcctgtaatcccagcactttgggagtccgagtgggaagattgcttgagatcaggagtttgagaccagcctggccaacatggcaaaaccccatctctactgaaaatataaatagttccagctacttgggaggctgaggcaggagaatcacttgaacccagaaggcggaggctgcagtaagccaagatggtgccactgcactctagcctaggtgatatagggagaaaaaaagaaaagaaaagaaaagaaaaagggacataatattaactttggggctggtgtttagtttgtggggatagtttctgtctcctgaaccctggagggaaatgcaacaaatctaaaaagtagtagaataaccccaaaggtgtgttcatgaatgtttaaccatcagctcccaggaaaaaagaccctgattttcatagtggggcctagattttcatggcaggatggaatgaatgaatactcccactatggccagcgtagagctaccaaaatggggctaggaagaggtgctcacactcagctcactgggctacaccattccagcaaacactgcccaggccacagggtacaggccctgcctgatccaaacccaaacttcttttgagctcctccatggtattcagtggccttttttgaattccttaaactcttccagctgtttcttttctcaggctcttcaccacattctgccttctctacttagaatactgcctacctagaatactaacctcccctaagtcctcctcatcctctagatctcaggtttctgatatacacacacacaaagcgagaaagcagatcgcaatataagatgttaggggtttttgggggtgttttgtttttgagacagggtctcactctgttgcccaggctgcagtgcagtggtacaattatggcgcactgcaaccttaacctctgggtctcaagcaatcctcccacttcagcctttcaagtagctgggatcacaggtgcatgccaccatgcccagctaagtttttgtttgtttttgtagaaacacggcctcattatgatacccaggctggtctcgaattcctagactcaagtgatcctcccacctcagcctcccaaagtgttgagctaacaggtgtgagccaccaagccccatctaaaatgtatttcttaaccagatgcagtggcacacttgtagtcccagctacttgggaggctgaggcaggagaattccttgagcccaggagttccagcctgcacaacatagcaagacctcatctctataaaaataattaaataaaataaaagcatttattatagttcatggccaaaaacaagcttttaaagaccactgccctagacactgccaagatatgcattctcctccagactttgattttatggatttcagattggcaatccccatccacctctgtcattaccacattgtctcacatgtgctaatttattctagacctggaagccagtgaacctgctttcctgatgactacatacctctgctctaaaccaggaaatgatgacttcatagtttcactcacagagggttgtttttccccagttcttacatgttatacgcaataccttcaagcctcataccagcaacacaaattatatttcatttatttccagtgttgctattgtaacgtgatctggagtaatcattcagtaatcattcagacttcgaatactttaacatccctctgaaaaaagaatgtacttaggacatgaatccattggtcagaaaaaaaaaaaaaagaaaaaaatgaaagaaatttttaaaaagaatgtacctcatatctcaaccaagtcattgaaatacaattgaaattccattttaaagcgtcattaaagtcattctaatcaccttacaaacattgtctttaaataacagggtttatttatatcgttggtatttatttccattgacatcattttcaagaaagcactatgaaattctccaaggccatgtacttttcagatacctatttctctttctctcttgctcttatctctcctctctccctctctctttctatttttgaaaaagctttttaaaatttctttaattaacaaattggtacctgaatcagaataatggatctgtttttgtttcctctttaactttgttactttatgtcatgtaattattgaatactgaatatcttttctatatctaatcatgctttatcttctctttaacaactatagaacaattagaggatctaaaattaaatttttatcccctaaactttcaaagttcacagcatatgtaattttctgaatgccatctgttagggctttattaagcaagttgttaatgttatgtagcaaacatgtagcagaaatgtcactaacattttaaattgtgctctaaaatatgtgtaggcattataaactagtgatgtcttctttctcattactgtcctcacttatttctaatactgcaatcagagtcgtaatgtgtctcttttactttcagttcctgccatttatttctggtatgatcatcttgatttactattattagtatgattgggtcattat

SEQ ID NO: 535 - DNA, 3123 bp, Homo sapiens
cacaacgtgtgttgctttccgctcctcggaacatccgggagagttgacttccggcggcttgtgggagtgctggttctgtcctccttgcgggtgcggagatggttgtcttggttacgggtcctaacggtcccctgccttgaaatcccttgttgagggcctgcaaccttgtgcttccgaccggagacgcctttggtccctcggtgtctgcactggctgctggtcaaggcttcagtgtggagtaattgacactttcgagaatattaaaatcaaattagagaagaaaactgatccataataataaaaatgtctcgaaaaatttcaaaggagtcaaaaaaagtgaacatctctagttctctggaatctgaagatattagtttagaaacaacagttcctacggatgatatttcctcatcagaagagcgagagggcaaagtcagaatcaccaggcagctaattgaacgaaaagaactacttcataatattcagttactaaaaattgagctatcccagaaaactatgatgatcgacaatttgaaagtggattatcttacaaagattgaagaattggaggagaaacttaatgatgcacttcaccagaagcagctactaacattgagattagacaaccaattggcttttcaacagaaagatgccagcaaatatcaagaattaatgaaacaagaaatggaaaccattttgttgagacagaaacaactagaagagacaaatcttcagctaagagaaaaagctggagatgttcgtcgaaacctgcgtgactttgagttgacagaagagcaatatattaaattaaaagcttttcctgaagatcagctttctattcctgaatatgtatctgttcgcttctatgagctagtgaatccattaagaaaggaaatctgtgaactacaagtgaaaaagaatatcctagcagaagaattaagtacaaacaaaaaccaactgaagcagctgacagagacatatgaggaagatcgaaaaaactactctgaagttcaaattagatgtcaacgtttggccttagaattagcagacacaaaacagttaattcagcaaggtgactaccgtcaagagaactatgataaagtcaagagtgaacgtgatgcacttgaacaggaagtaattgagcttaggagaaaacatgaaatacttgaagcctctcacatgattcaaacaaaagaacgaagtgaattatcaaaagaggtagtcaccttagagcaaactgttactttactgcaaaaggataaagaatatcttaatcgccaaaacatggagcttagtgttcgctgtgctcatgaagaggatcgccttgaaagacttcaagctcaactggaagaaagcaaaaaggctagagaagagatgtatgaaaaatatgtagcatccagagaccattataaaacagaatatgaaaataaactacatgatgaactagaacaaatcagattgaaaaccaaccaagaaattgatcaacttcgaaatgcctctagggaaatgtatgaacgagaaaacagaaatctccgagaagcaagggataatgctgtggctgaaaaggaacgagcagtgatggctgaaaaggatgctttagaaaaacacgatcagctcttagacaggtacagagaactacaacttagtacagaaagcaaagtaacagaatttctccatcaaagtaaattaaaatcttttgaaagtgagcgtgttcaacttctgcaagaggaaacagcaagaaatctcacacagtgtcaattggaatgtgaaaaatatcagaaaaaattggaggttttaaccaaagaattttatagtctccaagcctcttctgaaaaacgcattactgaacttcaagcacagaactcagagcatcaagcaaggctagacatttatgagaaactggaaaaagagcttgatgaaataataatgcaaactgcagaaattgaaaatgaagatgaggctgaaagggttcttttttcctacggctatggtgctaatgttcccacaacagccaaaagacgactaaagcaaagtgttcacttggcaagaagagtgcttcaattagaaaaacaaaactcgctgattttaaaagatctggaacatcgaaaggaccaagtaacacagctttcacaagagcttgacagagccaattcgctattaaaccagactcaacagccttacaggtatctcattgaatcagtgcgtcagagagattctaagattgattcactgacggaatctattgcacaacttgagaaagatgtcagcaacttaaataaagaaaagtcagctttactacagacgaagaatcaaatggcattagatttagaacaacttctaaatcatcgtgaggaattggcagcaatgaaacagattctcgttaagatgcatagtaaacattctgagaacagcttacttctcactaaaacagaaccaaaacatgtgacagaaaatcagaaatcaaagactttgaatgtgcctaaagagcatgaagacaatatatttacacctaaaccaacactctttactaaaaaagaagcacctgagtggtctaagaaacaaaagatgaagacctagtgttttggatgggaagcacctgtagaccattatatactcctgaagttctttttctgatggaaaacaaaattcagcttaatcgtgtactcagcattttttaaataacaatgtttatttgaactaatattaaattaacaaattcagtgtaatcaaaatgtgtaaagaacaatcaatatactttatttttttttctattttataaaataaatatatatgctatgctttaaattttggagctttcataaatgttcaatgcattttaagtgtgtggcttataaatattttggtgagtatttttctatactacgtaaattctgagtttaaatgtcatacacaaatactaagacactttgcatttttaaaaattaagaatcatttgtgaagtccactacgaggtacttcaaaagcccagtaatggtggtcagataccatgtagatggatacagattgttgactcttttgaagttgtttttttcttatattttatattaccattaaccaataaaatctggcagaaagtctgctattccattggtaaagtgaaaa

SEQ ID NO: 536 - protein, 749 aa, Homo sapiens
MSRKISKESKKVNISSSLESEDISLETTVPTDDISSSEEREGKVRITRQLIERKELLHNIQLLKIELSQKTMMIDNLKVDYLTKIEELEEKLNDALHQKQLLTLRLDNQLAFQQKDASKYQELMKQEMILLRQKQLEETNLQLREKAGDVRRNLRDFELTEEQYIKLKAFPEDQLSIPEYVSVRFYELVNPLRKEICELQVKKNILAEELSTNKNQLKQLTETYEEDRKNYSEVQIRCQRLALELADTKQLIQQGDYRQENYDKVKSDALEQEVIELRRKHEIASHMIQTKERSELSKEVVTLEQTVTLLQKDKEYLNRQNMELSVRCAHEEDRLERLQAQLEESKKAREEMYEKYVASRDHYKTEYENKLHDELEQIRLKTNQEIDQLRNASREMYERENRNLREARDNAVAEKERAVMAEKDALEKHDQLLDRYRELQLSTESKVTEFLHQSKLKSFESVQLLQEETARNLTQCQLECEKYQKKLEVLTKEFYSLQASSEKRITELQAQNSEHQARLDIYEKLEKELDEIIMQTAEIENEDEAERVLFSYGYGANVPTTAKRRLKQSVHLARRVLQLEKQNSLILKDLEHRKDQVTQLSQELDRANSLLNQTQQPYRYLIESVRQRDSKIDSLTESIAQLEKDVSNLNKEKSALLQTKNQMALDLEQLLNHREELAAMKQILVKMHSKHSENSLLLTKTEPKHVTENQKSKTLNVPKEHEDNIFTPKPTLFTKKEAPEWSKKQKMKT

SEQ ID NO: 537 - DNA, 205388 bp, Mus musculus
  misc_feature (1)...(205388): n = A,T,C or G
taattcttctgcctgtatgcccccaacattactgttcatgttgttaagacctaacagaagatcatggatgcacatggatgcatgtgtacatgaacgtgtgtgtgtgtatctgtgtgctgtgtgactctgagtcatatcagagttttagacagtgattcctctcctactggattgcttcactaacagaaataaagacgtagatagacaggtgtcttctctgtctacagaaagctcttgttctgtggatttttttttaacttcaattacaatggactgaactagtttggtttgactagtatttttttgaccaacaggaaccaatgaggtctataatagagccatttctatatccagtccaagaactcacaaaacactaaacagagcccatgtgatttgggtcctgacccctttgaacactaactgatccctgatctctgaaaagcacctcaccttctttcttggagagtcttctgacttagctggttatctggcaagcacgttctaacttttaggttgggaggacctgtttccctaaagacaaatttcctggtcatactgggacaatgaatgaagtcaggaaagccagctcatagtgcgtttaaagcttctcattgtgcagagttgatagactgcttgatatcactgtgatcaaatggtaaagacaggtacaacccgagccccttgttttgaggacaagtcagttctatagtctaatcttttttttttttaataaatcatttttatttatttcatatatgtgaatgtgctgtcttcagacactccaggagagggaattggatcccattagagatggttgtgagcccccatgtggttgctgggaattgaactcaggacctctggaagaacagtcagtgttcctaacctctgagccatctctccagccctgtagtttaatcttttagttacatctttttcattatttttttttaatttttgatcttttggactagggtttcaatatagcccagattgacttcaagcctacaactcccctgctccagacccttgagtacccgaaattataggtcacaccccaatacttggcagttatcacagttctagagtatgaataatatttaagtctttccccatatttttaggagaacgaactgagaccataggaaggttatttctcctgttgaatatagttagtgggagattaggtagaaattctctgcccaagcagaaagacataaagaaaaccataaatatgttgtaggggaaaggagagttggttatttttggctttgactatccttactaaaaatatctttctaggaaaaatgtcctctttattttgttcatttcactgagcttcagggagagaacttctgtaaacacaggctcattccttctttcccaggagccccaatagattattttaaagctaattctagggtaagtccctttgatgtcattgctctcacttggagaattacaatatggctgcccaattccggctgtaatgagagaccctgagagaaagaaatgccttaagtttatgtgaataatttgagtgggatggtgtaaaattcttctttaggttcaaaaagaaaaggaaaaaaagaagaaaagagagattcagaaacgtcttaagatctttactgttggcagaaaataacccactgctctttaaattgctggtttggccccatgttttgaaagttgccatctcagttgatctcttaatgacatgtctgcccatccagggggaaggttgataagaaacaggagcttcttgtcttgtctctcgcttcttggctggctaaccattcaatagaattcgaagatacatttaggaaccctgccctagtgctctagggcaaagcacccctcctccacaagctgccctgagaactccaatctgcctgctgatgggggaacgcacctttcgaagttcttcatgggcttcctggtgcttgcatttcccctatttccttcatttctttttttttttttttttttttttgagaaacaattttttttattaggtatttatttcatatacatttccagtgctagagaaacaatttttttttattattaggtattttcctcgtttacattttcaatgctatcccaaaggtcccccatacccaccccctcaatcccctacccacccactccccctttttggctctgacgttcccctgtactggggcatataaagtttgcaagtccaatgggcctctctttccagtgatggccgactaggccatcttttgatacatatgcagctaaagactgcttctctcccttcccaggctttcatgtccaaatacagaattgtaccttcctgtctgaatacctttatgtaagggctgtcaacaccataatcctctcatcgttaaccctgaaggatgcttttttaatgggttgacatggagtaattagagatgggatcattataattattgttatatatattataatctttatctactttctagcagtgattcttgttagttaggctgctagaaagcacaagaaatgcacatgtgatccggatgttagctgtctgtgaattcacaagggcaagcactgtcatgagcaatgatcaggttctataaaaatttgaatgattttattaggctaattcccactgtcgtctgctgttttcaactctgcccagtaccagatccctcatccctttgccctgacatcattcagtttccttccaagaagtttcccatcctattcatcccaagtcctttcaatcatactcaacgcatatgtggcgagaatcatggatctaagatacactcctgatgtaccaaaatgttttctaacagagtcaatctgtctttgagaacccagaataatgggataaccaatatgggcaatttgccctgagggacactcagcagtgagtgtctgaagacttttgatgggtacatctacagggactgtactgacatttggtaggaataagaaagggaggctcctaaatagcctacagtatccagtgtaggattgaccctccgaacaaagagttatctagttcccattgtttttaatgcttctatcaagaacccctgcagtaatttttgcattggctgcaataataatcagaagttttcttttctccttttcttgtttcttgtttttgattttgttttgagacaggtcttctgtggtagctcaggctcgtcttgatcttactacatactcaagtataatattgaattcctgcctttacctcctacatgctagaattacaggtgtgtaccactattcctggctaatcagtgattttttttgttcttacactagacacactttgttctgtatattgagttataaatcaagaaccaaccagggccgggcgtggtggcgcacgcctttaatcccagcacttgggaggcagaggcgggcagatttctgagttcgaggccagcctggtctacagagtgagttgcagaacagccaaggtacacagagaaaccctgtctcaaaacaaacaaacaaacacccccccccaaaaaaaacccaaccaaacaaacaaaaaccaaccagatacctggctcagtcaggaaatcaacaacatcaagtggggaagaagttatgcttgcataaagaagatatatccaacttagccagaatttgccaagataggtttaaggtttctgcaaggaaagaaagagcagccttcaggagaaatgcaggcagataaagaggagatgcacattttatgtttcaagggagaagcctggggtggtggtttgaatgagaagaattccatgggctcgaatctcaatacttggtcctcagttggcagaattgctcgggaaggattgagaggtgtgttcaagctgaaagaggtaggtcactccgaggcagctttgaggttttaaaggactggagcaacttccattgtgctcttgacctgctgcttaccgtttgacacttgatctctccactgttcctcctgccacgtctttgttccaccttcatggacgtagccctctgaaactgtaggcccaattaaatgctttgttttgtaagttacattatattggtcatggtgctttattaccataatagaaaagtaatctaatgtagaagtctgaaccaggagtggggtattgatcagacagacttttaccatgtattatttatttttcatggcagactttggacctttagactagaaaagcagttgaatgctagaaactgggattgatgagccatcctaccttagaagacagtgctgagagctatgcagcctgtggaggtcctgcttagcaggaaaaggaagcaaggatttcaacagtccaattgcactagaggtcaactttgtgataatttggcaagaaatttggttgctttctgcccttgatctaagaatctgactgagactaaagtaaaaagtgatagattcatttttcttttgacagagtagatttcaagtcagcctaacgttgactatgttgcatgcttattggtaataactcttaatgcagatctacaatggaaaggagacgatgaagcaaaaggaaatataaaatgtacagttaaagaagaaaagaagctccgagaaaacaaaaaaatacatggttatttaattgatggggatagtggggtagaactatgtgagacctatattttagcaatgttagactatttctgaaatctagcagaatgctgaggaactgaatgaaagaagtagcaacggtgggaaggacagagtccactggaaaaacaaggaaaagaagattgatggaactcggaatggggcagacttgcagaggagagatgcagtgcagcatcatgccacaaattgtgagctctgtaccgtccaccatcacagagaaggaggaggaaattgaagtttgtggcatgagatgcaaagtcaagtttgaaaacatttgtgtcatacaagttttctcacttacaaaactaatgtacaggggtggggtggggtggggatggggacctaggtatggtggtgcacatctttaatcccagcacttgtgaggcagagacaggtggatctctgagtctgaggccagcctgttcttcaaaatgagtttcaggatagccagggctactagtaatagacattgttaagccccccccttgtttactatgtagtaacattcattaatttcaaaaatattaacagttagctggtcttgatggcacacaattgtaaccctgcaatgtgaaaaactaagacaaaaatcaggagttcaagtccagcctttgctacagagaaagtttaaggatagtctgggctacaagatattctgcctcaaaaatatattcctgatttaagatgctgcattaagggaaaatatatatatatatatatatatagtatttttcctcctagaaatatatttaatgaatttatatatttgtaataggggcttactaagttgtccagtctggtctgctatttctggctcaaataatcctcctgctctattctctcaagtaggtgaaacccaggggcactcacctatatcttgctctttgtagtatattttaagcctctttctgtgtcattgactatcttatgtttttttttaatgatggcatggtatctaactccagggaggaacttctatctattctacctcctcaattaggggaggtcttgatttctttgggattctgactttgaaaccagtcacacaaaggttctcacagttgattttgatttctctagagagtggagcaaattgtgattattttatggtgcaagacaggagcaggaatcagagctggtgaaaggagtgtgattccatgggtaggggaagctacatagaagcttacacaagatgagtaaatcaatcaaccccaggatccactggagaagaccaactagccttgtccgtcacaaggctgaaaacggacagccgaggttttctgtctgaattcagtcagtagaggagacagctgctctgagaaagcatggccccaggtgaggctgcttctgcggtagaggccaacctaggatgtgtgacagctggaagcgtcacacatcctgatgtgtgaccatacttcccagtgttgggctgcaagttttcctaaaaaagaaggtttgggtgggacatgtctgcatccgttgcagatgttcagtctgtatttgtctttaggatgcagtcccttaaatagaccatggggatttttagccatgtgtgtaaaatgagtttctagaaagattgtggccctcatttcaccaattaaatgaacattgcatcccattgctaatgcatagaaaacagtgcaactatattgcttgtttacttaattttttctgtagcccaggttggcctggggcttcctgccctccgtcatcagcctcctgagtgctgtgactaaaggtatgagccacaagctctcctctatgttttctaaatattgaaaagtaccctaacttttcttggacaacacattttctgatgcttaactttttaaactatttaaacatctcatcttgttttgtgtgcctgacctgagtgtatggctgtgcaccatatgtatgcaggatgcttaacttttttattatgtttgtatttgtgtgtgtgtgtgtgtgtgcatgcacacacatgtatttcagcacatgtataaaggtcagaggacaacttacaggaatctgtttttttcttctgccatatgagcttccagatcaaattcaggtagtcagccttggcatcaagcatcttttcctgctgagccatctcactggtcccagatatttaatttccatgaaataatgaagcaaagaattatgcttaggtgttctgagtcgtcaacctgctgccttaactccttaagatgagccgtggctggtggccaagttgactttaaaccattttcatggttctatacttcttgcaatatcttcatttgaacaagtaaaatggcatccccactcagtaggaaaattctgtatgtgaaagcagatacgtgtgctcgtgtgcgcgcatgtgcgctcacacacacacagtgtgcccaaaagaaaagaatacctcttttgtggtatgtatactcatgggcttttacaaataccatcatatttaattgttttataaaacaatcctttcactgggcagtggtggtgcacacctttaatctcagcacttgggaggcagaggtaggcagatttctgagtttgaggccagcctggtctacacagtgaattccaggacagccagtattacacagagaaaccctgactccaaaagccaaataaataaataaattaaattaaaaaaataaaatgatccttttgagatgttactgtctccacacttctcagacgatgaaactggagatctggtatctgataacctaagttgttctgggtcccaggcctgtgcacttctcatcctgggcagctgcctgcagagtgaaacattgggctctgcagcaatgtattagttgcttattttcctgtgagaaaacaccatgactaaagcaactcatgatagtttattttgcctcagggtccataacagctagggaggctttttaaccacacccagaagacagagagacagagagagagagagagagagagagagagagagagagcacaagctggaagcaaggtgaagctgtaaacacccaaacccagctcccagcgacatacttctccagcaagcctgcacttcctaaaggttctatagcccctccaaacagctggggaccaagtgttcacatacttgtgtctagggtgggcatttcttgttcaaaccacttgtgaccacaggaggcatttcagatagcatgtgcttatataggaatcctaagaacttcctgtcccgctgcactggcaatactgaagctctggtattctatgtatttcagtatgatattttgtgtctttatcagggtggtagctcacacttgtaatttcagcactggactggccaaccaaggtatggggattggcatgaattccaggccattatagcctacactaatgagggcttgcctcaaaacatcaacccttccctcgctcccttaaataaaaccatttcgcgttatattaagtttttacttcatgtttgccaaagacagcagttttgtgatagagaaaaggagagaaacatcttcctgttttctttaaccatcccactctcctctagggtttggcctaataagagtgtaggcagcaggcagagagggatggtccagtcagtggcctcctgccatagcaagaataatccctgaagtttgtcagccagctcttctaagcagacccagtgattacagcaggccaattaaaaaaaaaaaaaaataaggcttcgggataaacagaaaccatcaccccaatccagatggtcttcattcacaagagcaagtgggttccaacccagcctttagatctaacttccaggaggcaggaagtactgggagagaaatgtggtgaagacaccacaaagaagccataagacaaatccagaaggcaacttgtttctttcaacacacgatgccattccaaaaaaggaagaaggggcttgaggaggaggcccttctagggtaaaaaatccgcaatcaaacggaatgcagattctctgattgcctcgaggtctaggtaagtcagctgcaaaggacgctttggcatcctagggaaatccgagcccggttgattagcaattttattggctttatttagttacatgtgaaaatggtctatgatattgcaggatagtgttcgttaaagatgaactgtatcctgggatatttagagctgaaatgtatcctactttaaacctctctatagtgagataagcccaagtgctaatgatcattaaacagaagctaggctgtttccgtagacaagattctctgccatacgtttgaaaatttctttaatcacacacacacacacacacacacacaaagaaaaaaaagaaaaaaaaaagaaaagaaaaaaagaatgaaatgttgcgtctcctccagaaaagaagggctgatcttatcttcttccataggtcaagtaccctggttggagcccagagagtccccagagtttccttggagagatcgcggggcattggaccacctgtgcactttgctggccaggccccgagcacttactcaaactctctgctcactctgaataaccagtcacctttgccacaccacgaagggtacaggttttgattctccgggggagggcgggccaatgtccagaactgggccaagcaggcaggagaggtgggagaaaagccaagttccttcggttcaccgtacccttgaggcgagaggggaaatgaagccacaggtcttccccacggacccacctgcgatcgggggaggagcgacgccagcccagactaggggaccagccgccagtgcccaggccggtaccctcacctgcggccggaagccggggcagtagcggggaccgcgcagcatctgggaccggtcagcgagctccgtggagccggagggtagtggcgtggaggcctggtggctccgcgtccccgcgggggaagtttcttggcccggaaaggtgcaattgtgtgcagctattcctggtatgtcaggccgcaggcagaaggggcgccgcctcccgagagagcccgggactgggaaggcgggtagaggcgggaaggatgccggctggggcgcatctccccgcccagataattctgaccagagaggtggctgcaaggaccctggcgaggggcaaggacggaagctgggaccggcccgtagggggtgggccggggcggggctactgtcgagggcggtgacagcgcttgcgacttttgaagttcccaggagtcccggctccttctgcacaccgcttccagttgcctcttcacctcctcctgctccagtcaggctgaacttgagccgatttctagagtttggagaaagcaactcctgcaaattcttctaggttcctgaactcaaactgcacgtcgctacaaagggcgggggacgcgtggcgtgggagctctgggtcccggcgcgcacccactgagctgctcctctccctctcttgccctagacatggaagggatggaggacgccgaggccgattgctctgttgcattcgcagaggctcagagatgggtggaggtgagtgtcttttccagttctttacagatgaatttacactttccgtgcctgagtcttcttgggtttcccaccaatctgagcttacgtccgtccggtgacctaggctgagtaaagaggcagttttgggtacagtgcaaaatttccctctctagtcttctgatgcctagccctcctcagactttcttgcagatctcccagcgcttgtccaccaggtttgggtatcgcacttcccaaaaagcggggcacagagctaggctggggacctcgggcgcatttcttcgggatgcagttgcttatcacgcacctgggtagccagtgtattcagcacggggtgtgagcctagagagttggggggctgccatccttccctctcccgctctcttcctctccagttgagaaactaaaatatcctaagctcctttacagacggcttgttattcttccagctgtgcctcacagacaagatcttctgttccttttattgtcacgaaggagagatagtctctacatggtcgccttcggactagcctgttttattccgttgctgaccacctaggtgggttgtgcttgtgaatgaactcaaggcaccccacacctgggctctagtaccgagttacaactctagacttatgaggtgactttccggatgggtcaaaagaatccttcccaaagtgggactcagaataactgatggttataaaattgttgcccacaccaaccctgacgtcattttggagttagtggtgccacatgctgttttatccaacagctagggaatttaattcagggcctgggacatgctagataagagcggctactcctgaatcacgcctgcagcccctcaatctacctaaaaattcaaattaggctactaagaatataggggaagctagttctttaaaagtcattttattttatgttttaaagaaatacatgtagggtcccactagcttgaggacctgcttttgggtctctagcacccgtggaaaaaagccattgcaactccaggacaggcagggctgctgaggcagaagtattcagtgtgacttagccaaaatggtggcttccaagtatataccccaacccccatcggaatctacatccacatacatacctacaaacacacacacacacacatacacacacatacatacctacaaacacacacacatacatacctacaaatgctcacacacacacacacatacatacctacaaatgctcacacacacacacacacacatacatactcacacatacctacaaacactcacacacacacacatacatacctacaaacacacacacacacacatatacatacctacaaatacacacatacacactcacatacatacatacctacaaacacacacatactcacacacgctcatacacacacacacacacatatatatatacctacaaacacatacacatacatacacacatacacacctacaaacactcacacacacatacacattttaaaaatatcatgtacttatgaggaaaaaaaataaatgttaaatgttatacttctgtatagtaagagggcaggagatatgagtgacctcactttctagatggtagaagtgtctcagatggtagcttttggtgtctttaaaggctgaaactttgagctgtgccaaggtgacttggagagatgggaggaagggtatggaaggctgggagaagttacaaacactgcattcagaattgaaatgagagtggaaaaatcccagcaatggagttaagagaaaaaataactttgctccttcataaacctggaaaaatcaaggctttacctgtaattttccatcagtggtgtttgcgctgcatggtttcagaaagcaagctgaagtcaccattcacttttttcatatgagtgtatgggatggaagggggaaggggccatttccattcacaccccctgagtctgggtggtattggcaatttggggtcattcacagtttataggtggtgttgcaagacttatacttgtttctgaaactgtgcatagcgttcttttcttacccaggggttagtatctggatcttaagaaagtcaatactatttgtgtatcttagcacgcttacagttgtgtaaaagttctgcgaacaatttgcatactatgacctccttgcaagtgtgatggtctgaaagataatcattatgtgtgtgcatcttctccctcagtcccagcctgtggaaaggcttagcagcagtgctttgacaacttggtatgttccttatttacagagagtacagagtttctaaagctactgtcagattcctttaatatagttacagaaattaaaattaattttttttactcctcacactagttggactactgttaaatgttcttgaagatatttgaatgggttttgtattcatatttgtttatttattcacttatttatttccagacatgggaggcttggatatcctggaactcgttatgtagaccaggctggctttgaactcttggagattacctgttctggttctagagtgctggcactgaaggtgttcagtatcatgcctggcctcatgttcttatttaaaaattttatcatctattctttaggaggaccctgggcatttgaagtcatgctagttggttctcttgttagggtttttgtttgtgtttgttttgttttttcgactaaagcacacacatattaaagacattcctttgtccaaagagcagaatgtctgactttcattgccacacagcccattgctttcaagaggacccttagtttgaagataaagtgttaatttcaaggtattttctgaagcattttggaccatgaatgagatagtatcatacagttctcttgtttgttaatcttctcttctttgttctttctgtgagttttctctacatggcttctgattcatttatctcacgtgtttaggtatgtacatgtgccataacctgtagtattgcagagaagatagcctgctgtctaaatcgtcacctaaagttttatagggaactatatttttctactgtggtgtggcgggggactaaacatagccacctcacgtatgacataggtgctcatccactgagctacctgcctcaccccttcagctgcagttttgagtctcccaaggtccagaaactccaataaccttgtacaactttaaatgatgaccggacttcatgtcagtctgagcttcccatttctcaccagtgacggcaaatgcataacgtgctattcttcacacaaaaaattgatgtagttaaagtttattttgaggggatgtatggagcaagtgggatgtgatgactcttgtcactctactggtttctcttttgcttcatttgaaattatacttcgattcttaagaaaaaaaaatgaagacactaagcaggtttgtccactcgggaattaattctgcagtgaaaacaaatgtggaactggatcccttctagatattgcgacagaatgacatcagatgattatctaggtggaaatgtggtttggaatattaataatgtagcagggctagtttatgattaaacattggtttaaaacagcgtgagcagtggtttgcaggcaaagccctcctagcaaggtcatagagtagatgatggagtggttgaaaacacagcctagactcactaattttagttcgcttctgctgtgccttttaatttcctatacctaatagtttcctctgtctgcttagggacaaacccttaacttaaacagataaagtactgatgagattaaacaccaggggtgcagttcacagcttgatcactggtttccaggctgtgagttctttttgctctctaggtatgccacttaggcagagctgtgtttatggctcacttgattcgctgcttccttgccctgctcctcccccacccccttcctgctatctctgggtttgagtctttcagtatcactatgatcttgtaaaagcacagaagggtgccagcgtgagtacatcgccaagtttggcatcagaataagagccctggctctttgtttacttcccattggtctggtcttctacgtgtcctaagttttatccttcaaagacggtctgtccctagggctctttggcttgcctctgtgcagaaggagtttagaaaagtaaagaatcccttggttttaaacaatggtactttctgggtccaccactgatataagcacagttctacccttcatcctcactaaactgtatcctttctatccatggctgtggacctcaggtctgtaagataccgaatgatcactgaacaccagtgtagtctatagggcaagagaacactcttgtatgtgtgctgttgcttttgaaatatagtgacaaatattcatttggaaacgtttctaaattcagaggagcatatttagtaatacatgtaatttcctttctttcttttcttttttctttctttctttctttctttctttctttctttctttctttctttctttctctctctctctctctctctctttcttctttccttccttccttccttccttccttacttccttccttccttccttcctttcctccctccctccctcccttctttcttccttccttttatcctctctccctccctcttccttccttcttcccttttccccccctgctactcctcctgctggtagaagaggagagcggagtcggcgatgtggcgagggcctcgtggccagtttaggtgtcacaattttccccgtctcaatagtacttacagcccatccacgctgtacccgcccgtttccgaccctagtgttttattcctgaataacgatcggggggagagggtatgggggagcaggggaagagggggaggggagcggaggagagggccagggagaccgcgcttggagcactggggtatgtcagcacactgtaagcacaaatgcttgcttgtcgattctcttgtcgggaaccacccaactcgccctatatactcttgccccctactcaaccccattcaccgcttcgtgtctccgtcctccccgttcccccctctcctttacccatctctccaccccacttttcatcccgcttccacaccggatatcccccacgcgaacgacnnnnnnnnnnnnnnnnnnnnctcctcctcctcctcctcctcctcctcttcttcttcttcttcttcttcttcttcttcttcttcttcttctggatagggtttctctgtgcagccctcactgtcctggaactcacactgtagaccaggctggccctcaactcacagatccacttactgttctgccttccaagtgctaggattaaaggcatgcaccaccaccaccacctggcaatacatgccattcaactgccaagttgaactgtaacgttttttggtatagtgaacttaatgagatatgtaagtggagtatacttgtaacaaatagctgtgtctgagtcaatcactagcagcctactgttcaagtcatgttcaaataagatgagtgccaggtataaccagtggggctgtagctgttcttcacttctatttcctacgttgtttcctttcactgtctacacatgtaagtaagtactcatggttggtggaacagaccccacttctttaagtctatatgggttaccataaaagccacttaactcaccatttcgtttgtcactgctcagtcagagcacttaagtataagtcccaggtcacaaccacctatagctctagccccaggggatccaataaacttttctggccatctgtgtgacaatggacatgcctcccaccccatgcatacatatacacacaaagatatgtatatacatacacacctgcacacacacattacaaagaatgaatacatacatacatacatacacacacatgtacatacatacattacatacatacacattaaaaaatatatacatgcacacacatgcacacaatcatacacacatgcatgtacatatttaaaaaggcacacacttatacacacgtgcatacacatacatacatgcacatgcatacacctgcatgcatacattaaaaaggatacacacacacatgtacacgtacattttgaaaagaatgcacacatacacacatgcatacatatatacatatacacattaaaagaatgtatacacacatgtatacacatacacatatgcatatatacaactaaaaagaataaaaagtcacataggcagttcttatactggctgttttatagaaattttctccaagtatacacctgatcttaataattccttactttctgggaagtcatatgaaaattatttactttcatttttataaatgtgtttagtgaaacaattttagaggccacaatccttaccatgtcattctttgtcctctgccttacttatttatcttatttttctgtcattttcttcctaactacttgtgcagttttctcccatcaagcccctggtgtttgtgcagttaaaggagatattaagtgaaaagcattagtgctctctaagagtgcctgtatctccctatgcatacagcacagttccttccttccatgttggcatttagggaccagcccgttaccgagaaattcctagtttcttcacatttaggctaaaccacccttatgtgaagtctcttcagttagacttcacttctgccgtttcgtcccttttcccatggacatcaccttcttcttaccgtctggtaccgtaggatttgcttttccatcagagacaagtcgccgagggctcgaaggtattcttcccttgagtatttggaatgatgtctgccaatgcttgccgagcacaacatgacaacagtgacagatttaaaatgtcaagctttaacgatcagaactcacctctcccaccattggagttgggtagaatctgttacagtcattctgtgaggactcactgtaggcctggatgccatttgagtgtctgtgtgtgtaagttgtggattcattcaacacgtcctcttggccctgcccctgctccgcatcacagactcattggtctgcttcctgtcttctgctcagtttctttcagagagtcttacactaagtcattcagggaaccagtactagatgcttgcactatgccgggtaccggccattgtgattactttagttgacaagcctagtcctttccctgaacctttccagagaggcatgccgtgagagacatgtgaattgacagcatgtccaggtcactgctgtaaagccacttacacactgtgatggcaccaagggacagcccaggtaggcctactgagtctgacaggacatcctttgagacacagatacactggtctattgggctggggcggggcggattttaaacagatgaggtttgcatgtaatgtaacttcagggcgtggctcatagcagacagttctttccatgaaaatgttgtatatacagtgaaacacatagacgtttgagtgcacacttgtgaggctgtataatgcatccagagtacatcagtcaaggtacagagtgtgtaccttttccactcaagaaagctctagaagtgcccagtgggctccacctctctagtgaggtctagctgcatagatttctgtttttgaatagccaggaaatgttctaattatatttcctcctctccctctcctttgttgagtgacattccactctttcttgaacaaagtatctgtctggcaaataaaaaagccaggtggtggtggtagtggtggtgcatgcttttaatctcagcccttaggaggcagaggcaggcagatctctgtgagtctgaggtcaccctgacctacagggcaagttccaggacaaccaaggttacacagaaaccctgactctgggaaaacaaaaccaaaacaaacaaatagcacacaacaaacaaacaaacgacaaacaaacaacagctcctgggaaggagaggggtggtgccaggccaggaattcctaaaattcttgtggaggtagggggcagattctgaaataggaaccagggcagcaatgttaagagaataacccgactccaggaagcctaagcagcaaggtcaagttgtgaggaatggaagggtcccagcacattcggattcttctatgggtggacgaaaatctagaagtgggtgtgctcataaagtaatacaaaggtcaacctatatcttcagtgtgatggtatcacctagagagtggaccccttgggtcaaaaggtgatgagcaccagcctggagtgaatctggtacccacagcagaatgcggatactttggtcaaggttagaagtcagtgttggcttctttcgtctaaataagcagatgagtagatgccctttttctcagaacactggttatcttaaccattcatgtcatagttgactccttgggttttctccagcgaggaaggtgaagtcaagacaaggcgagttgcctcatttcagtgatgccacaaaaggctaatgtgaatcacacagttggtggcacttcttcagccattggtaaagcaagaatatcctcacgtctatctgctcttaagccaagtgaagcattgtcctttgcagtgtatgtggcagggagggcttagatcaactcagtgagctctgctactcctcccacatcctcctcccctggatgcccaaagcacgttcagacttgacatgtcagtgtttgttgtcttgccctacaagttctggacagacagatctcaagtgtttgatgagtgaatatttgtgtccagtcagaggctggcttatttaattgttgtttttagatcttaagcctgttacctatctagagtgtgtcggagcctgaagaaatgataaattagggctcgttgtgcttactctccagtttccgaaggtaattattgggtgtgcttctttaagaacatgtttgatgtactgaagcttaataaggataatagctgtcatatctgcaaaacagcgaaccagagttactcagccaatcagctcctttactaaagagatgaagctaataggaagcctagagatgaatcacagcagccaaactgacaactttttcaaagattatccaacaccacagacagcatcctggaagactagttctcactcctgggcacagcatgttcagcccagggcttaggtgtctcttgatcatggtgtatagtaccaggatactgtcttagtcttcaagctctgtagagaaggaagagcttagaaaagtcctgtctaggattagtgagtgggcagaggttgtaaaagtttgctggtcacgatgagagagtttgagggccatcacagcatgcagcactaattgtcactgatagggtcacctccactttcttgtgcatgcaagttgtgcacttgagtgtaggtgacagtggagaccagaagagagcaccaagtctggagttggagggagttgtgagcagatcacatgggtgctggcaactgaactagggtctttgcaggagcagtactcattcttaactgctgaactctctctccagccctatctatctatctatctatctatctatctatctatctatctatctatctatctatctattacagtttcctacatgtgtctaatacatcttggttgttaccctcttacccctctcaccattttcctgccagtgaaagtctccttcccaacaagtacccacctattttaatgtctttaaaaagcccaaatacttatttattgatttttatgtatatgtgcatgtgcatgcatgtgtacctgtgtgtgcatgtgtgcatatacacatgtgtgcttgtataaggcatgtgtggtttcctgtgtatgtgtgcacatgtgtgttagtgtataagtgtgtacacagtgtacatgcatgtgagtgtgtgtatgtgtgtacatgcatgcacatgtgtgtgtatgcatttgtgtttgtgtgcatgtgtgtgcctgtgtatgaatgcatgtatctttatgtgtgtgcatgtgtgttagcatgtgcttctgtgtgtttatgcaaatgtgttttgaagtgcatgtggaagtcagaggacagatttcaggagacaattctctttgacaggtgcgttctagggactgagctcaggctgtgaggcttattggcaggcagctctacctgttaaacaatctggttcatctctctctctctctctctctctctctctctttctctctctctctgtgtgtgtgtgtgtgtatgagaaagagagggaaagagagagagagagagagagagagagagagagagagagagagagagagaatagagaatagtcttgggaacatttttatatggtgacattgagttcttctttgagttaaggtatgatattaagtcatatctaaagaatatatctgataagaaatctcatgaaagtgttggtatataacctacatttatgtatcttacatgcttgtatttgatcatacttcaaattatacagctgtttccaacctcatagtaaactttggctttgtaatttttttttctcatgagagcttaaagttttatttcatatacaaaagaaggaagagaaaacaaaaagagtagaccttgtgtctttactttttgacttggtgtctgatcaatttcttgatggggagaaacttgttaatttatggaaagcatccattagacttcattcacgctgggcaggcacctaccctctgtgcttgctacatttcagttctaaatcccagctttgaaaacagaagctccaggaccccacatgatccattctcctcttcctgcctcattccttccaacctcctccataggctcttcgtactcttcctcaaatgtgaaaagagggtttttagcttagggtttgtttcttccagaggacatctgcctctctcggtgatgctacgttctcatacctttctttccctctatgcttgtatgttcatgaccctcaccaggacttggttttgcactttgtatgtgtttgttagtctctagagtattaatgtcttatgtgcaaggacttatttctctttcaagctccaaatagtgctaggtatttaatatgtattcaataagtattttctgggcaaacagaaaggtagattaaagaacacatgtcttttaatgtttaatacttgaaacctttttagcctgtgatgtaactgacttcttggctctgcttcactcaacaggagaagttaactttgtcatgttgggatttagtttttttttttttttcgttctcagctcaagattgagcaagttctaggcgtgattgttaaaaagcaagttcaagccatgaaaaattgactctgctcagtcgattctaaacatgtccccaaagaaacaagcagagtaaggaaaaccctgaaggaaatgtgcagggtgaaagcgagtcttcttagctgataccctatgctagggacagaccatcatcatgagaccgtgggaatctgtttatgcaaaagctctcagtgatttcagattgtatgatagcgacctgtcttagttacttttctgttgctgcaaacagacacatgaccaaatacaacttatagaagagtttttgggggcttacagttcagagggtgagtccatcgcgagaatcatggcagcaggcaggcaagcatggtgttggtggagcagtacctgagagcttacatccttatccacaagtaggagtcagagtagagaaagctaactgggaatagcatgggtttttgagacccccaaatatccccactattccagatacctctctaacaaggccacatacctcctaatccttatcaaacagtttcccaactatgaactaagtattcaaaatatattagcctatgggggaccattcttattcaaaccaccacacagaggagcagaagatgccttcactgtatctagagataaaagaaatgataccctgtttggtgatgcatgcctgcaaccccagtaattgagaagtacagacagaaaagattgcaagtttagtgctaccttaggccatatctcaagattccctttgaaaagggaagtaataaaatcatgggacatttgagagcagcaaacagtctccttcctgttctagcacacgcaccaggactccctgaattttgtagtgctacactttatatgcatttttagaggaattgttctgaaagactacatacaaccaagcatggaagatttcaaaggagctttgttcaggagcgaagggaagggagatctgaatacagatccttgtccgcgtctgggttggtacaccctgactttctctcattgtgcctttttattattcttccaaagtgtgacataaatgaaaggctccttgctatcacgataacttctttttaaactggcaagaagaggagagaggcccagagatattgagcttctttttaagacctcctacggcacactgctggcagaactgagctctaagcagcatttgactttagcctcaccgttggaaaggtcacggccggtgctcatctgctttgttagtttgcattttctcctctcttcttgcccacctgctttctggtgtctttggtagcagcacctgccgaggtgacatgcgtatctcctgccatcttattggctgctcctgtatgtgtcgctatcttgctttcttttcttatttctcaaatggagcttaatttaaagatagaaaaaaacaaaaaaacaaaaaacatcagttgtgggaatgaagatgtagaccagttggtagaatgcttacctagcacacatgtccccagagagacataaactgccctctgaaggtggaagcaggaagaacgcaagttcaaggtcatcctttgactctgttgcctctgggccaggagtgagttggaatatcatggtaagagtcatgtaacagccgggcgtggtggtgcacgcctttaatcccagcactcgggaggcagaggcaggtggatttctgagttcgaggccagcctggtctataaagtgagctgcaggacagccagggctatacagagaaaccctgtctcgaaaacccaaaaaaaaaaaaaaaaaaaaaaaaaaaagagtcatgtaacagagcagagcagctcacgtggtggacaggatggggcgccacctataataagacacacacctcaagggaatctcacaccctcaacctatctcttctagccaaggccctaaggtttccaaaacctccctgaatagtgtctccaggtgggcaccaaaccttgaacaataaatcaaaggggcatttcttttcttttctcttgaaaaaaaatttacttaattttacttttatatgcattggtgtgagtgtgtcagatcccctggaactggcattgtgaccgtatgggtgctaggaactgaacttagatactttgaaagagtagccagtgctcttaaccactgagccatctctccagcccccacaggacatttcttgatttggattgtaacagcccatagtgcataaggacagagacctgagctttgagaagtgctctgaccctctgctaggacaggtgaaggaagataggggatgcagtgggccaccagacctagagagaacacctgactgttagctgctgtgaggagctctaggtacatgagattgttgtaggaaaagagaattttcaacagtgttcaggggcgtggtcgtgaaaatttgcaagagcattatctcccatttgttaaaaataccatttgcgagtgttggtgggaccagcagaatcttcacaaaagcctttgtagtgggccacagtccaggcacagaaactttctgagagaaaagaccgaggagctaagataccaatattctctcaagaaagaatatttatttgtgttaacaaaatcatccttacctcagtttacctttctgggtatttggaggtccaaaaggattgtaatcaaaaccagcaaatctgtggtttcaagttgaaatgctaagttggagggttggagttgagatacagctgtagttaagcaatcccttcttctacactgaagtccccctgaagccactttcacctcccctgcccttccctccctagtcagggagtaacagttcttccttccagggattttagctcaaaataattttgtgaggagacttttagtttcaaattttggaattactgtatgtaaacgggtttggttttgagactctaagagcttcaagtcatattaatcaaatttaattgaggactagacaaggcttttctaacatagagattcagagttgctgtgcaaataaaggtgtattcttttggagtgagaaaagcagggtagcttataacttacaaagatctgcttgccagaggattagagacatgtgaggccaaagctgactatacaaatatgagttatggggctggcgagatggctcagtgggtaagagcactgactgctcttccaaaggtcctgagttcaaatcccagcaaccatatggtggctcacaaccacttgtaatgagatctgacaccctgttctgacacgtctgaagacagctacagtgtacttatttataataataaaaacatctttgggccggagcaagcagggactgagtgagcagagttgactggagtgagtggggccgatcagagcaagcagaggtccataaaaattcaattcccagcaaccacgtgaaggctcactaccatctgtacagctacagtgtacttataaacataaaataaatatataaatctttaaataaatatgagttatggtgaagaatcttctatacactcttgtgtgtgcatctatgcctgtttgtatgtgtgtgtgtgcacatgtgcataaatatatgcagagatgctaagctgatgccgagtgtttgcctctagctctctctgctttatgaggctgagctcagggctcaccctttcaggctactctaactagccagcttgccatggggatctgcttccaaatgctgggatttcaggttgctgccacgactgtctgagtttgatgagggttctagggctatgaactctggttttcatagctatcattttatttactgctaacaannnnnnnnnnnnnnnnnnnngggagaggggagtatagggtgtgagaggagggaaagggggggaggggggggaggggaagcaggggaagggggatagaggagagggggaagggggggaggagaggggggaggacctcctcctcttccccctcctcctcttcttcctcctccttctccttcttcttgattttatatatatatatatatatatatatatatatatatatatatatatatatatacatatatatataaataacattgtctctttagagataccagaattgggattcagacccaattacagatggttgtgagccatctctccagcccctcagtgcaacttcttaaatctgcaataaaataaccatttaccttaagggcttaaagttggaaaggaccaaaaggcaagagcagtcatcttgcagatagatgttgcttttcaatcttcctctgcttctcctccctggcttcattctgacgtggtccctaccagttctttcttgttctgctttcttactcctcttgctactgttacaatatagctgacaaaagccacttaaggaactgctcattttttggctactttgtgtcatggtggcatcagtgtgaggtaggtagctggttgtattttttctaccaccagggagcagggaaagatgaatgctagtgttcagctcaccttctaaagaatcttggatccgatgaatattaccgtccacattcagaatgggtctttttactcctcttcctcctccttctaattctttttcatttttaacaatttatttaattatgatgtatatggtgttctgcctacctgtatgcctgtacaccagaagaacgcaccagatttcattacagatggttataaggtgccatgtggttgctaggaattaaactcagaacagccagtgttcttagcctctgagtcatctttccagcttccttctcctcttcctcctccttctttggtttttcaagacatggttcctctgggcagtcctgaatgtcctggaactcatgtagaccaggctggccttgaactcaagagatctgcctgtgtgcgacacacacacacacacacacacacgcacacacacacacacacacacacacacacacacacacacacacacacacacctggcctcacttttaaaggtttaactcttgctggacacagctagacccatattctaatggtgatttaaatccagtcaagttgagagttaagatgattgactacaagcttggagagacttaggtttcatctcagcccaaatggtggctcataaccatagatgactcgagtcgcaataaatctcaggccttccagcctccttttgggccataggtgcatggtgcatggacagacgcgcagcccaaacactcataaacataaataaaaatcaatacatctgaaaaaagtttttaaaatgatccataacacccacgaactgccttataaaagatgagaggctagttagcttacgggggactgtttacagtggaggaaatcaattccacatttgtctcgctggaaacgcttttagatgttcttactttccgtgattcttccttcttaactggcatcaagtaagatgaactgggtgtgtacactcatgcattaagggttttttttttccaaataaattattttttaatgactttctacaggcatttatatgtccgtctcagctagtctttgttctttatgtgcctttttcatcctctaagttacctcttatgtgcatgtatgtttgagacacgcatcctgttaatttaccccgtctgctgtattcagtctggaaaagacaattgccagttcttctccaagaaggacgctttatgatgttcttctaaaaatgagcccttttagaaaagaagacaacttttatagttcatgaaaaagggggagtgcatttttaggtattttattcaaaggatgaagtttatacaactgtctattttgaagccaatctgcaaacattttttagacttggaaaatgcttgtcagacctgaaaggtacaacttgccaagtcgctgatgcttttgaaatttggacttaggtctggtagaagaatgtggttgacagccacactgccatttacagtaatgctttttatgtaaggaaatgactcctcttggcttaataatttccagatgtttttctggctccttgatgattgcccaagtcacttaaaattcaggtttccatatccagcttactgatggcaaccttcacttcttaggacgtccaatgcgatgttaaagtgctttgtaaaagtaagcacttttggggaacttgcaacttaggtgggctgtcgggggggggggcacaagcttaagatgtggccagtgtttcagcgcttggcctgtgactgaaagcttgcccagggtctcttgcttggggcatgtccaggccttaaaaggccccgacttgaagaaccatgcggaagtcttgccaacaccataaagaactttccccaaagcccatcgatttgtgagggaatcgggaatgctcccagctggaactgtaactgcttttttataaggtgcttccattgtttaggggcttgacgatatcaggtagacaatgtgtgtctctcatgctttttcccaatgtttcctacccttttcctttgttatgattgccattcaggtcgtagcgcccagtgatttctatatttcccccattcctgcattttctattgtacttagctgttttgttctcattttcctttcaaccttcatctaagttgcaagcctctttgaagcatctcgtggtttggtcccctgtcttttattccgtgtagccagtcgagctcttcatatgatgttgctgtagaaggaccagtggtgtcagtgtcttaagttccagtgctgttgtttttggtcttgaagagaaatgtgcagtgtgttgacagtgataatttgaaagcagaagctgatgtgtgtgtgtgtgtgtgtgtgtgcaagtgtgcgccccgccccccccccacgcctccatgaacacatatgctgatgatggaacttagcatatactgtcttgctgaggacaattctgtagctcaggaattggtcttgttaaacctgtgtgtgtgtgtgtgtgtgtgtgtgtgtgtgtgtgtgcgtgcgtgtgcctgtgcgtgtgcgtgtgtgtgtgtgtgtatgtgttgaagtgctccttcaaaaaagaagataatatttattacaaatattgaatgctaagttagggtacttcaaacactattctctggccaagaaaactggcagtcacgtgacagtcacgtggcaatcacgtggccatgcaatctgtctcaggaaaaaccctccactacagctggactcaggtatggttcggtttcctcagcagcatatgcgcttctggtggtaactctccttaaatgagattgacgtggccctccacttactacgatcaattacttctctttgcctcaagctccatccaaggaggtaccatagcagcctgtacagagccttcaggaaatcagactacaggagctcgggactttgcaggtcacatctttacgcttacatctttactcttttcactgagtgggatgagactcagtgccttagatgtgttacttctagaaggaagggaagagatgctgaataggcagggggaaaatgccacctggacgagcgatgcattctgtgatgggtttgacattttggggttaagcagaataaactctaggtctaagatcatagtcgactaattagttttctgttattctgataaagttagacgtcaattctgataccacactgcacggatgaggaagcactagctgttatgaagattagaagttcttgtatcaggatcaacttagtaaagattcctaatcacgtaatgtgtaactgatcttagagttagaaaataaaacacactggaccgtggtgacccacgtctttagtcagtccccgacttgagagacagaggtaggcagatctctgagttttaggccagcctggtctacagagagagagagagagagagagagagagagagagagttccaggacagcaaaggagtcaaggttaccctgtcttgaaaaacaaattaatagaaaagaaaagcagaaaataaatcgctaaatttcatttgtctttttctttgtagcagtagcgagtagtgtttgctcatggaaaacaaagttaaattgtaaactagcaacaaagtggtttatttttcgtataaaaaagtccttttttttttccttttttcttttttcttttctaatcaccactagactctatcctctaagctttcaccaaataagaaacttgggaaatatatcagaagtctagcaggaaatagatgacaattcacaagcttcccatgaagtcgctttagaggttgagtgtgcagtgcaatggtagagagtcctggtatgcatgaagttctgtgtgggatccctaactccagccagccagccagccagccaaacaaacaaacaataaacaaacaaacaaataagttacccagggagggaggaaggaagtagggggagggagaaattttaaagaaaggtagctctaataaatggacaggaagaaatagaggagcaacaagggacctagagggagtggctggggagggagtgagccatctgactgatcggctgagtatggggaaaacatgatgctgctgaaactggacaagcagatcttggttctgtgaagccagggtgctgactcttggtccctgtgttccacatgctgttgggaagtagctccagagtcctgcttccctagatacccaaagactgtgcatggaaccatgggatcaggcaggtgctcggcttggatttgatattgagagaggaagtatgtgtgtgtatgtatatgtgcgtgtatgtatgtatgtacgtatgtatctctttgtgtctgtctctgtttttctctgtctctttctttctctatctttgtctttctctgtctctgtctctctctgtctctctctctgtgtatgaatgttgatatgttgattttattgttggggatagaaccaagtgcctggtgtatgctaagcaaatgctttactcctgagctacatcttaacctggaactttataccaagtacactacaacatcccattgtgctgaaaaaccctttagaccttttgtaggtgggttgtattgtctgaggaccagagagatggttcagcaggtacagacacttggtgctaagcttgatgacttgaattcaatcttctggacccacttggtggagggcgaaaactcctctgaccagctgtcctctgactttcacacatatatcatggtacatgtgcatgcatgcacatgcgtgcccacacacacaaatgaggaaattaaatgtagtaaaaatgaaagattatattatcttttgcctgtttctatccaactatacaattggctatttacccttgaaatcgtttttaaaaatgagcaattttcagtatatacagagatttttctttgttgctgttttatgatttcaaaatgttgggctgtaacactttctcttgaatgatggttttggaatggatgcctgccttgtgttgctgaggagttgtcatggctgtggtttctgagatgccatgtttagcctgtggccagtggactaaaaaaggtttagagttagaactagtggcgagaagccaggttctgttttcctataaactatgtggctcttgcacgattccgtcaaccctgttgggtgtgcaaagatttgtttcggagacggggaccagtagcttctatcctgtagcagtgccagtctacgggagccttcatttcatcagccttgcacagtgagtcagtcagcccaatggcgatgacccagtatcattctgtgatgctgtcactgatctgcgttcctctaaatgatgttttgagcttttaacttccaccatttcagaatgtgaccggtttggaaattgtcttcttagcagtaatcaagtgaaagcgaggccagtcgtatggacattgactgactggcatcctcatgcagaggctaactttggctgtaacatcggtcacctgtggtcctgcagacatgcagagtttagacgtctaggctcgagcacagtgtgacaactttccatgagtccaagttgctcgcttgtgctgttgttaacagccctagccaactactgtcctctctgtcacccatattatctgacatgatgcttcttctgtttagtcctgtgggtctgaaatagtttgtgcatgtgtgtgcaatgtgcactctcatgtgttagggtgatgtcagccctcgagttagtggtctggcaaaggaacagttaaagtgttgtttgctctgacattcctacaggctttgaactacacaaactgggaatttatggtccatatccctgccaggcagaagagagaaagagtaccaacctacacagtgaatcagatgccctgtatggagtgacacagtctctctccaggcctgtctgatgctgttacaacaggcatttctctaattaaagatgaagctgagtatctctttatacaccaccttgtgtttctccgtctcatatccgtgtcccgctggctagtagatttcttacacagcatatacagttatttttcagttttattttaatgtgtatgagtattttgcctgtatgggtatatatgtatgtgtaacacatatatatgcctgttatcagagaaggaaaagatggggtagattccctgagattggtgttaaggatggacataggtagtcatgtggatgctgaaaccaaccctgagatctctgcaaaaggagacagtgctctcaactgctggcccgtctttctagtcccttctgtagcatacttttagctataatcttttgttatacttagatgttttaagtctctttggaacgtcttcatttatactttttaattctatttagtttcttcttttgatcagtgatcccttactctgatgtcatagtcgtctgatctttttctggttaccaatgtcatggttctttaaactataaaggcattgttccttttgatacctttatttttaatattcatgttaaagtaacgaagctacattttatgtttgcctgtgatatgaaagccagctttgttcgctggtgtctccggtgctcctggcatcgtacaccgaatctgtcctttcctgctgtgctatttccaaagactgtacttggtccatgtggacacaccctgtctttcttgcttacttagaggcaaaccaaatatcagatggtatggatatctttagtggttttgaaattgacttagttattttgtaattatgtttttctttaattgcttgtatttcaatctatatgggccttttatttcctaccatactgcattctgaaatataggagaatatatatatatatatgtaagtttatatgtatgagcatcttggctgcatgtgtgtaagtgcaccccatgtgtgtctggtgtacacagatgaaggggtggtcagatcctctgaaacgggggtggggatactgacagttatggattccatgtaggtgttgagaactgaatccagggtcctctgcaagaacatcaaatgctcttatctattgaggcatctctctagcctctagtagaaatgtttaagttaagtcttattcttttcggctggcattgaaaaaaaaaagtattgaatctcattctggcgtcttcctgcgtgtgtgtgtgctgttatgcatctttgttctaattcatccttttgttgtttgttttaatgatccttccttttttaaaacaaggttttactgtgtaggccacaggggcctcaaactcctgatcttccttcctccacatcctaaaattatagatgtatgcttggctttaaatttgtgatttttccattttctgttttatgatttgtctggaaagcttttcgaacaatcttgccagtatcttcttaaaaatcacttgactttctagactaacttggggagagttgacatctataccatgttttgtcacatctgtgaacaaggtctgtttccttagttttcaagttttgtaaaacatttcctttatgttaaaaaaaaatatggctaaagttgtaatttaccaggttaaatctagagagccgcagcttttgcttgcttgcttgcttgcttatttatttatgtcggtggtaggaactgaacccagggccttaccctactaggcagataattctgtcactgagttgtatcctcaactctataagtgtctctttcatttcagcatagaaaatgctattgtgaatttatgttgtattcaggaacccaattctccagttgggcaattagttctaattaagaatgattgttttctcttggtataaccattatttctccaaataatcacgtaattgcttttcttccagctcaccactttttcgtgtctcatccatttgctggcatccccagttttgcggcatctcttacttgtgtctgtataaatgcaaatgaaccacagatttctgcttccagttatgttgtgctgggctatggttttgttattagtgctttaaagggaatttatgggccctttcttctagtctcggttttgagagtatttaccacaattagatattaaactatataccacagtgacttttggcttattaaaattgcttgaattctttttctctaagcaataaatgtcgtgacatatactgacagacgctttaatgttaaggtggccttttctagaataaaccctttgacattataaattttagatacatgcttttagcctttattgatacttttctgacgtttttctcattcatattcactaaaatttccctgtccttttggggagagtgcaattgtttatttagaattaaggctttagaagcctcaaaagataaattgtgttgttctttcttgccctagcatatgcataaacctttaagttggctcctttttgtgtatgcatacgtgtgtgcatttcttacgattctggaaacatccgttttattaagattctcaaatgttagtttataatgttcttctaaaagcgactgtaaattactttaaaaatagttatgaaatgcttgctgtcttactattcagatcctggggctatagcaacacaaacaagtagcccaaaatacataaccctaccaggtgcagtggtgcagtgccagaggtagaggcaggtggagctctgtgagttccaggccaacctgctgcacataggaaattccaggacagccgggactacatagccctgcctcagaaaccaaaccaaaccaaaccaaaccaaaccaaaccaaaccaaaccaaaccaaaccaaaccaaaccaaaccaaagagacaaaaactaacaaaaaatataaaaaaaaatcaaacaaacagaaatagctgataatgtatatacaaggttttaggtttttttgcccatttcaccacttttctccgtgttgtgtagtatgggtccacgtctgttttctccgtgttgtgtagtatgcatacacgtgtgttttctccgtgttgtgtagtatgcgtccacgtgtgttttctccgtgttgtgtagtatgcgtccacgtgtgttttctccgtgttgtgtagtatgcgtccacgtgtgttttctccgtgttgtgtagtatgcgtacacgtgtgttttctccgtgttgtgtagtatgcgtccacgtgtgttttctccgtgttgtgtagtatgtgtccacgtgtgttttctccgtgttgtgtagtatgtgtacacgtgtgtttagatcctgacagatggctattgagaggtatgtttttgaattttccatttttgttttaattatatctgggtatgcatgtgtgtaaatgcctacaaaggccagaggtgttgggttcccctggacctggagttggtggtaggtccgagtttatcggtgacagtaagcccatggcagaagaacctgatccaccgggtgcgtcacagggcttgaactcaggtcgccctggacagcaggtgactttatgcatttaaccggccctatgccactttgagaatgacttgtaataatgcttaatgtttggaagatgattgtgtgagcaatggggtttatttggctgccttggattcagtgtcacactggtggtcaggagcttataaactactttcctgcctgtgtcatttaactcttctattcctgatggttaggtggagtttacagatgaaagaacaaaagctgatgaaggacctttttagcttctcaatgccagtgctaagatactttcatttttaagttttaaaggaaattattacttatttttgtgtgttatgtgtatgtgtttgcagatgcacacatgtccacctatgtatacctgtatgtgtgtgtgtatatatatatacacacacacacacacatatatatatatatacccatatatatgtatatgcatatgtatatatatatatatgtatatatatatatatatacacacacatatatatatatattcctcacctcaagaaaccctttcatttttaatcatgatgctttttatacatcaagtgtactttctcataggttattctagttgttaattacgattaatacattccaattgttaggtcaaaataatatacttaaataaataatatatttaagtatattttgtaaaatgcataaaataatatttttaaatatatttaaagttcggtttgagtatttgttgatcatttttctggtacatgtcaggggaaaggggagaaatcccccctctgtgaagaaaacaagcagctttggggaataaaatcaagtcatgacccatttacaaagcaggaactctccttatcagtagctccctgctgctcttttccctgtggaggttttctgagtttgattcacgctgagagtttaaggagagtggaagcatccttagcagcatcacatctggaaaggggccgacacaccacacttttcatttgcattcaatgcacatgttaatccagatggcagaagtcctgagggcgtcccagagcctcagaattgctctgtgatgtgtgcatcttccaggttacttgattatggtgagtgtttcatgtcggtttagatttctaggtgtgggacaggtgtcaaaactcttctctgagctttgcattaacttaaaatttagatttgtgaaacattcgcttactaaattaaaaagtcaggcgtaattcttattcctgttatattacattttctattgttcaaaagaaatttgatgtgacattgaaattttggatttttttccagtgtattttaaactatcagtttaagaaatgtggatttcctttaatcccagcacttgggaggcagaggcaggtggatttctgagttcgaggccagcctggtctacagagtgagttccaggacagtcagggctacacagagaaaccctgtgttgaaaaccaaaccaaaccaaaccaaaacaaaacaaaaaaagaaatgttgatttgaggggctcagcagtgaagagcatttgctgatcttcctgctgtcctgggtttgattcccagtaataacattagcagctcacagcaatctgtacctccagttccaggggttccagtgtcctcttctggcctctgtggtcacacaagtgctacacagatgtacatgtcaggaaaaacacccaaacacatgaaatgaaatagtaaacaataaagaaatgtgggtttcatgtagtgttcatattgaagactaccacttttactcctgagtttattaaaatgagggttgggattagttggtaatgactcttgccaccaagtcttaagacgtgaattgaatcccccaaactgacatagcaagaaaacggacttctgaaagttgtcttccaacttcccatatgtaccctgtggcacccacgtttacacacacagacacacacacacacacacagagacacacacagagataaacacacaaacccacccacacacacacacacacacacacacacacacacacactatgtaataaaattaaataaaaatagtgcttgagactggggagatggcctgggagtgaaagcatttgctttgcaagcaagaaggctaatgagatttaggatccccacaacctaagggaatgtcaggtggacatagctgcctgcttacaagtgcagccttagaagccagaggtgggggatccatggagcaagctggctaaccagagtagtcatatctctaagctctgggtttgattgagggaccttgccttaaaagaataagataggggctagcgaaatgtctcagcaggtacaggtaagttctttctgcacaaatctaatgacatgaattcaattcccagaaccactataaagatggagagagagagatagagagagatagagatagagatagagagagagagagagagagagagagagagagagagagaaccaagtccataaagttgtcttctggcctcactgtctctcccccatcagacacgcatgcactgataccaaaagcagacactagaggatgattccctccagcctccacaggaatgtgcacacagacacacccacttacattctaacatgcgtacatatacgcacatatgctacactcacataggttaaaaatattatcgtgccatcaagtagcctgacatcgagagacagaattatgaccgattttgttttacattcttaattggttttaatattttcaattctagaataagggtctaacttctccagttagataccaaagagttgaaatgcgtctgtttctgcttcgaagaccgcttatcttgtgtgtgttcttgacattgcttctgtctgtttcccccccaggatttcccttgtttgtatttcttccccttttcactattcttttccctttctttctttctttttcttctttggtttggagacagggccttatagtatggtccaggttggcccagaacttgctgtgtagtcctgatagaccctggacttgccagcctcccgtctcagccttagattaggatcatagctggctataagattcttttaccaaaggtgctttttgtcatctttcctctgtgcttttcggtagtatttcaaattttctttaaaaaaaaaagttttaaatatgtaaatgacatttttaggatagagaaaagtcaaactgagaagtagactaagaaattaatgagctggtgagatggctcagtgggtaagagccactgactgctcttccagaggtcctgagttcaaatctcagcaaccacatggtggctcacagccatctgtagtgagatatgacgccctcttctggtgtctaaagacagttgcaatgtacttacatataataaataaaatctttaaaaaaaaagaaaagaaattaagtagctttctatatctgaaaagatgccatgattttaattttcttattcagattagcttagagaatcttgttatgtggccttttctaaagttattaatctgttttccattggtaccacgaagttcctgaggctctgtagtacatttttagaaatgagatttattttcatctcaacatgggaggtcagaggactaagcatgatactggctcaggcaaggccccactagctgcatgttactatagtaatggtgtcctggctagagtctttcaagaagagggagccttaattgagaaaatgctggagatggtcccggctcctatagaaagcgggctgaataagccacggggagcaagccactaggcagcatccctccatggcctctgcatcagtgactgcctccaggttcctgctctatttgagtttctgtcctgacttcctttgctaatgaacagtgttatggaagtgtaagccaaataaactcttccctccccaagttgctttaagtcgtggtgttttcgtcacagaatcagaaacttaactaagacaaatgacatcatgacacatgtgttatgtgtgacttgaatagattatgtgtggtcatccaggaggccagagagtggggaggggtcagccttccttgtttattagaaaaccatctgcggaagagctaaccagggtcctaggaaaactatcttacttccctttaagaacagcagcccaagaaccagcgacttcctatgatgcttcatttcttaaaggtccatctacttctgtcccacagctgtaggggaaatcagatttcctaatacacgcaccattgggagcacacttaaatcataagcaaattatactagtaaggctttttactcacgataggacttcagttttaccttgaagtattttaatattttagaaagatgtagattatgtatgttttgacctcctacaaccttctacagagcctaattcttttcttaaaaaggacgatgctactttaatcaggggagtgagcagcagttctctagcctgggatgtgctaactgaagattaagttctgagaggtttctgactcctctgcggaatgcaagggcagtggtgggagctttcctgaagaagggctcatagcacccatcaggtattttagaagattcctggtgtacaaatggctaaatatagacattgtaccaataggaggtagaaagagaaccagaaggaaaaaaatattgagcctgcacataaggatttcagtagtagctagtcagagggtggaggagggaagacgaattggagtctactgaggagttaatcggagacgcagaggtgaggacaggcagggtagagttctctttctggaagtctggctgataaggagagagggagatggcttgatagaggggggtaagattaggaggatgcaggcagagccccacctggtctcatctgttgcagccactgccatcctatcccctaaggcttccgcacttagccttgtggcccatgaaaagccgctctgttggaaaacactagaggcttcctgtgtgggcgggcatgccttggtgcagggtctctgattgcagagtgggtatgagccccctaagaatggcgtttccttttgactgcctacttgctgttctttcttcaaggcactcttcatggccccgtgcttttgtaagggctcactctggctcattggcaccggccgcaggatacaggataggacaggatctggttggtggaaacagcggtcttggtgccaagggcgagagaccatcgctgagtcccaggtttctctttcagctcagtctgagcagttggatgtccctgagggccgggggtgggattgtagtctgcgtgcactgcacatttggctccttatcacagagatgatgggcattaaaaggctttgctcaagagcatcggggaagtacgaacttctacagctacagtcacataatctctttcctccttcccgtgtgagactgtttccctgctgggaaagtggtttgcttagctcatttatgggtccattttctattgccgtaactgaatattgttgactgagaagttaataaagaatgaaggttaactcattttctagatgcgagggggccagaagttttgaggttgtatctagggaagcgtacggatttggttaggatggctagccagttctgcttacccggccggggctgggattattgtaccaacagctaccttgccagttcatcccttgtgcttttcagcctatggcaagagcgaataagcaagcaagcaagcaagcaagcaagcaagcaaacaaacaaaacagacaacaccaacaagcagaaacaaacctaagtgagcaaacaaacaaaagtccagaacctacagttagttgaatgggtgataaagctactttggatgttagccttctcgggcttttccttgaagatttagttcagtactaagttccaggacagcctgttgtaaggtgtggctcacaatacctggctttggagtcatcttctgtgctttgaaattagtctgcttgacattccctcaagcagaaggcactatctaatgtattccacaccccccacccccaccatgtctccctaccttttcacatgacttacctatggcagacgtcatgaactacccatacaatgcctcttctctcctctgtaccatctataccctaacgtttatgagactgccagtcaattcagatgttaaaaccatcttcacaggcacttgctgctagcagtgaccaaatgtcacaaagtccagtggatacgatcatgacctcagaagagccactgctttgctgttgaagagggacagaatgctagcatctcctttggtcatacttggcctttttcatgagagcataagggggcaaatgtccagaggccaccttgtgattctgaggttcaacagtctggtgttcatactgtcaaaggctgatatgctaaggacaaaaggatctgaggcacccagggcagggcgtctggggttgtttcctattgtgaatgtctactaactgggccagtctcagtcttataagctacaatttacaatttctgtttttcttacttacctatgtatatacatgatgctatttatatactatgttcctgtatgagctgtaattgaaaaagataatattttatgattataaagggaacacgtgtccatagaccaaaacacagaaatagaaagtcatagttattcatacttttgtgtcttataacacatactgtattacatttttagttttaaaatttgagacagggtttcatatgtcccaggctggcctcaaactcactgtctatctgagaattacctttttttcatacgttgccctactgcctctaactcccaagtgctagcacgtatagcacgagctttggtctgcatagtgctgaggttgcaccttgagcctcatgcatgctaggcaagcgttctgtcaactgagcctcagccacaacttgtatgtacgtcttagttttaaattattattttattattattattaatcatcattgttgttgatgttgttgtgtgcatgtgtgtttgtgaatgatgtatgtatgcnnnnnnnnnnnnnnnnnnnnnnnnnnnnnntgcatacatacatgacttcagttggatgatgaggatccaactgaagtcattaggtatgcactgttggacagcaaggtcctttacccactcagctatcttgccagtgcatttgtgtctttgaatacttgaatatctatttgacattacctatttcttaaattcattggtaaatcaaaagaaggttggaggtcagtagtttcctctttgattcttagttgattttaaattttgcactttgaatttttatttcagagacaaaaagttccctgtaaaatggcccattcaatatcaaattacagttttctaaatgtgaatgcataacttccttgtggttttgctttcttgaaatgttattttgaaaactttaataagcaacaatagagggaagtgtccttaacaaaattcacattgttattcttaaacattaagtctgaaattaaggatttttttttgtgtttgtgtgtgtgtgtgtgtgtgtgtgtgtgtgtgtgtgtgtatttctgactctatgtactgactgacctcaatttaagaaatcttcattctgtaaaataccttccaatcaatcaacagcattaaagacttgcttcatcttgataatttgcaaaaactttagaaagatgatcatgaaaccaacatgcaacatttaaatcatagtctagcattttgggaccaggaagacactatgaattacagggtcataggcactaacatggatgccgtgcattttattgaaaggtataattgaaattgaagcatgagaaaagttccagtttctggcagcagaggtcagagtgcttctgtgtatgtttgctggtaaagtccaagcagaaggtaaaatacactagaagtgtgcaactgaaaggaagggctgaagttttagtttttacttgcaatgagttgtccttttccaaattgcctcaagggtttgggtagccacaaaatgaccttgaaatatgatggcactttaagccaaactgctctcatttggatactcgcctggtttttgaatgggagaagcaaaactctaaggaaatggaatatactcattcaaattaaacaatattctgattaaagttatacaatagtaacctttaataagccattgttgtatagaaaatacagctgatgatttattgaaatgactgcagtaaatctaccagcaaatgtaaatattttgcaatgaacatcttgttctagaattcattcaactccctgtcctggtggtgtctgtctgtctgtctgtcttttgttgtggttttgtttttgtttttgttttgagacagtgtttctctgtgtaacagagccctggctgtcctggaatcactttgtagaccaggttggcctccaactcacagagatccacctgcctctgcctcctgaatgctgggattaaagccatgtaccatcatgctggacttgtggcttatatttttaatctgcctgttaaattataataggaaaacattcaacagttgtattcttcatttccttgcagctataaaatcttttgtcatacaaattattatataagacaagtgttttcatgaataatatctaaataaacttgcttgggaatttttttttccaaataggcaccccgaccttcatttttatgatgtgtttttagttgcaagaggaaatcagatacattgttaggggaagtgctttgtctccaacagtactggtagaattctgaaccaaaaaaggtacccctatgtcatctttgttgctataggcaagctcacggtggtgagtgaacttctgagagaagacgctgtatttaaatgttaacaactttaaaggaagaataaccattacttattaagttagtcaaggaagtcgatcaatgacaccaaatgctggcagacatgaaattgaagaagagcttataaaattgacatactattcatatgtgtactccctccctcccccctcccccattaacttagaagaagccgagcaataattaagacttgtggggaaaatttagaaatgttcccacaaactacacacacttgaaaaggctctctacaaaatcaagtcacagaatagttgtatttgtgtaaatgtaagtcatactaaatattaccatattcctcctgaagatgctctcagcatcctgccctgaccacagtggacactgagtaaatttctcagttggcttctttgcataagtatgagtactttctaaccatctttgatggcaggcagcgggggaaggctcctctgtaaacagagtagcaggtaaggtaacaccccagagggagtgagggtttcttgggtgttgattctctcttgaattctgtgaatgtctctctctttgtatcagtccacacctgaagattagggttgctcagctttggataaaacattccttatttaatgcattccacagcagctaccagagaatgtgagtgtgaaatccaaacctcctttcaggagctaacaaagatgagaatgcgttgcattattaaaagagcttttagccacggagaggggtgctaggtaaataagttgagaatagcctcccacattccttttcaaaccccccttcccccttctaaaaaacaggagcaaagaaaaccttttgtaataagatggtgattctttgatggctgtaagctttcttatggggcttttaaccgatcaaatgctgggactgtagctcaggattacagttttaggtctgtaacggaagacgctctttctgtgagaggcatgaagcgctcctttgggatcagatactgatggtgcaatgtctgtgcctgagataagaacagcttacctttctccttttaggaaaggcttttggaaacattacatatggtatggcacgagcccatcattcattccttacaactttgcttaatttagaagggacagagatcactgggctgacatgaagcactaataaagaccagaagatctggagccatgacttagttgttggctggagacatggaccgtggaaagtcttctgtgaaaatctaacactttttggttaattattctcatctatttaatggtcttttaaggttgtaggtattttctggtaaaatgtggccattgccattcaatttggaccagtatttgtaatcacaatttaataaatgatcataggctattgggatcattatattgagaattattatattgagaatattcactcattcattcaacaaatacttgagtatatattatgtcctagtgatctgtgtacgtgggtatatgagtgaaaaaaaatatcagacacatgcagaataattagtgagtgttaagatcattttgaagtgataagagaaccttggggtgtctttgagaatgtctgagcatttcttgaagagttaaggtcttagaaacttgatggccaccaaagccacctgaaatcaatggcttttgggtttactactcctcctcctcaactaatttgtttatcttatgtgtgtatgtgcatgtctaagtgtatgtgtgtgtgtgtgtgtgtgtgtgtgtgtgtgtgtgtgtgtgctgatgcctacagaggccagatgagggagccgaacttagaggtgtttgtgatctgtcttctgtgggtactgagaactggacctaggttcttcttagaggtgtttgtttgtttgttttgtttgttctttttgtttttttcaagacagggtttctctgtatagccctggctgtcctggaactcacgttgtagaccaggctggctttgcactcagaaacccttctgcctctgcctcccaagtgctgggattaaaggtgtgcgccaccaccgcccggccgtagaggtgtttgtgaactgtctgctgtgggtgcggagaactggacctaggttcttcttagaggtgtttgtgaaatgtctgctgtgggtgccaagaactgaacctgggtcctttgctagggcaacagtgctcttctctgctgcttatgctcccttgacctgcttttggggttttctctaaagaactcagtcaatgaaattcatcctctatagagggggagttttagagaaaaatgtattatagatggttcgttcataggtgggggagagaaatggggagggggagagaaaagaggttgtgtgtttgtgagagggagtatatgaatgagagagaggagggagaggaggcaggggggagagggagggagagggagagactcctgtatagaagaagggggtactagaaaatagggtactatgaagcctggaaacttattaaaggttttatgatacaaactgaggtgagttatagggaggggtgaattgggcattccaactgacctaaccaagggttgtccatgtgcctcttattttcagtcttgtagtcataatatcctccaggctgaggtgtgcattttggaaatagcaaagaaatgtggacaggcactccctctggctgtctccggcctccagcaaggacattcttggaattgctgctttgggtcccagctctatctgatcagtttctatctcttgttctcatcaataatgtagccccgcttactaaggggctgagaattttagggtagaatcccactagatctagtcctgaaagctttatatctattctcagaaggtttttctttttttctcagtttaagaataattatttttaactatatgtatgtgtctgtgtgtatttatgcacataaggcaggtgcccacagaaaccaggggtatcggatgcccctggagcaccccgataggggtatagtatgtgtgcttagctgagccatcgtcaatccagctccgtaacttcttcctcttcctcctcttcttcctctttttaatgcagagacacttctttttttgtttgtttatttatctatgtgtctgtttgtttgtttgagacagagtttctctgtatacactcttggctggcctggaacttgctctgtagaccaggttggtcttgaactcacagagatctgcctgcctctgcctccagggtgctagaatcaaagacatgtgcagccagcacccctgtaatgttattcttgagaaattcgccttatttacctatctattctcatccatgtgtctctctgtgtctctctttcatctatctatctatctatctatctatctatctatctatctatctatctatcttctttctttctttctttctttctttctttctttcttccttttctttttttggagacagggtcttatcatgagctgcgtgatgggtggcttggaactcaaaaatatctacctccctttgcttcctgttcctgggattaaaggtatgcaccaccatgcctgtcatgtaatatttctttaaaattaagcatgctgtgggccagggcagtgaatcagctggtaaagccattttccatttagccttaggatctgaattcaactcctgggacccatatggtggaagcgaagaactgactcttgaaagtttccctctgacttccacactggagcctttgcacttgcatagtacacacacacacacacacacacacacacacagaataaataaatacacgcaataaaaagttaaaactgctgaagcaagtttcaagtgggctgatgatcactgtgattgtcagaaccttggaaattattattattattattattattattattattattattattattattactttgtactagaaatttgttttacattgcttcagggttccataatttaccatttgttttcaatctgacttgtgttcaactattaatttgtttcttgtctcgccatcttggtaaacttttttacaacatgaagcatggttatctaaacctataactcttagaactgaaagtctagatggagcgtaggcaccatctgatattttatatgttccttgtatgcagcaccttttctgagagtccgcgggactctaggtctcagaggcagactatgctctgtcttagggatcgatatccattgcgtttgcttttttcttcctttcttttggttacaatccacccatgcagcttcattcagaagacacacactgagctcctttggtgtaagcattgttgcgatagagagctgagagctgagagctgtgacctgtcaggcatctttagtgaaaagaagcgagagcacaaaggtctgtgttgtccagttttacaaatgtgtccattgccaagttccccaacttgtgtattttaggtgctctgctaagacgatgactcagactgacctgtttcctgtgtcttgctcatccagagacaacagggtagggaccagagttccaaaagatatacataatacaactcatatggctaaagctgctagacattgggatggattgagacagacagacacatggaggaaagatggtttcatcagctttgccatagcagatctcacaaccactccaaagtacagtcattaaacttcctcaccagaatcatccacatatctattaaaccacagagtcctagcaacctggacccacagaaagaagtggagatgagaaatattaagtgtttaaagatagttcgggatttgggctgtagcactatattggaaggttctaggttcaggcccaagtccctaaactccaaacaccacaagaatggtgtctactaccagagtctccccaaatccccaaggacaaatgctctggtgattatccatgctcagtaatgctgctgccgaaactatgctgcatttctgaaaatgggaaagaatttgggccctggtgtgtgacagaggcagatttactctgtataatcaatgactagtcatttaaagaactcaggctggaggattccaagccccttttcttgaagaataaattttacacacaattaaagagtgaattttaggaaggagttttcttataaaagaggacctaaaagcaagcaagcaagcaagcaagcaagcaagcaagcaagcaagcaagcaagcaagcaagcaagcagaactcctatatggcaggaggggctcccaagaaatggtcccgctgtggctctttgtctggaatttgtaaggctttgctgggttgaggcatgctgggtgggctggtctgttcagctcaaccatgagctagaccttcccatcctggttgttggattgggattcctacattcaccttcaggggccaaggaagtatctggttgcacagagcttccaggcaccggtgctcttggggttgctacgggcctgcagaagtgagataacaagaaatcagacatgaaccagtgtgctgaagcatctttggcacttctttgctttggcccaggcagaaccaaggacattaacagcttctaggtacaacagtactgactgtcaagggcaagaggcagatgcggttgcttaggagtttcattaattcttcattagcatgtggtagaaacagtgagtggcattaacttgcgttgtcttaatgactgtttgttttgagcattttgcattctctgctggaggaatttatggaaggtgagacaaatgtctgataggtaccatggctatgaaataatgtttactgcatagtaaatagcaaagaattcatctggagggcccagattttgtctggagtaaggatgcgaggagcatagggttgttcagaatttattatcatgggtgagccccaccacctgaatttagtccttgggatctacatggtagaaaacaaactcctgcaagctgtcctctgacctccatatacaggcccccaaaggcttggtggcagtcacctttacctgctgagccaccttgctggccatatatgcccatcttttaaaatgcattgctttaaagagttctgtgttttggattagttcttcatcagatatgttttgcaaacatttctcccagtgatttcaatttgcatttttttcttgatatcttcaaagagaagttttcatctggaagaaatacatatttttctcttttctatattctgacattagcatatatctaatatatttttcctataacgaaaaccataaaggtatttagtccttaaaaacaaaaacaaaaataaaaaacaaaaacaaaaataaaaaacaaaaacaaaaacaggttctttgaacagtgtcgcatgtacccaggctgttctcagatttgctctgtagctgaggatggcattggactattgctccttctgtccctgcttttctttttcttttttcttttctttctttctttctttctttctttctttctttctttctttctttctttctttctttctttctttctttctttctttctttctttctttcttttctttcttttctttcttttctttcttttctttctttttctttttttttttttttttgagacagggtttctctgtatagtcctggctgtcctggaactcactttgtagaccaggctggcctcaaactcagaaatccacctgcctctgtctcccaagtgctgggattaaaggcgtgtgccaccactgcccggctctgcccctgcttttcaagttctggggtgaaaagtgtgtaccaccatgcttagcttccctaatatttccttttggaagttttaagggttccaatttaacaatgaatgaagttaaagattccttgggccttgtgttagggttaggtgaaaagtaggggctgatgttttcctttgcctatttttcatataattgcccacttgtgtctcagcaccaattattgctactttctgttatttattttttgagacatggtcttgctatatagtcctagctggcttggtacttgctatgtagacaaagctggccctgaactcatcatggtaattctcctgccatgatcttcaagtactagaattacagacatggggcactataccatgtattgctattatttaataaaagctcatctttatatttccctcctcctcttctttctcctcctattccttcttctctttctgcccctctcttctcttctcttctcttctcttctcttctcttctcttctcttctcttctcttctcttctcttctcttctcttctcttcactttatacaattttaactctgccaggtagaaagtcttactgtgaagaagtaggagttggtcagccttcttgggaaaagccaatgaaataatgagatgcttagcagttctctgtgtagttggcaagaggtgaagctaaacctggactgatggggtaagcattgagctctgacgtgaactggagtaagtcttgagttaccttagaccactcattgctgtctatcatcccccacctcctaagctgatgtggcttcctggtcttccttatataatgagttatcctttctggggaactttgaatgtctctccaaggtttgttcttggtggccattgagaattgtcgggttactatggtagtcccactgacatttaataatttgtaatttattgtgtggaagcagtgatattgaaaattcaaaccgttctctgtaagtcactagcatgctgggaatttccccagaatttgttagtaacaagaaaaaaaccctttgcctctcagcatcctctgatttataattttgtggaatttgccttgatttaattttgcttcgaggtgactcagtaaacatcctgttaggggtggacgtgaacttgcagtaacccggtctgcagtttctgcgagcactgctggactttgggaatgaggctgcccagtcacaggttagagcatttcccccttccagctctagttgactcatgcctgggtacagggaaaggaaagtggagcttctcacccccactactgtcttctaaaaggatacagcgggaggggaccagttggaagatgaaagtctagagatggctttttcatcttccgggcctgctccagtggcctgcaggcattgtcactaagaggcagcgaaacctggggcaaatttacttggatttcttccagactctgctgttccttgtttgtatcaaagttcctcctggaagaacatgccgacgtgaaactttgttttgagaatgagtctggaacacatacttgcagaggtcagttataggtgtggatctagtagagagggccccaggggagactttcaggttcttgtatcctggaacaaggagatagagaaagaacacatggctagtgatagaaatggagtttgtaattcctgttctgggctatccaccaccctttcacacagacgtacaatcaaaacccaatggtcatgcagcaagcaaattcaagttgcttctatgttaagcttctcacatgttaattatgaggtcttctcctctgatagaatagaagtcaacgagacgggagaaatagcttttcacgtgctgaatttttggctagaattagtggttggaatattgccttagcctgtacaaagtctcaagttcaacctccatccccccaaataaacaaaagcttggaaaaatggtggaggggagaataattttctaccttctgaggattttaccactaaataggaaataaactgacagtaactacgaagattaacaagagacaataaactgatcgcagggtggcatcatggaaagaagaagtgggtatctaaatacccagtgagattttgatgcttatatttattctaaaaggtctgtagaagtagggtgaaggcaactcaggggacagtcctgtccttttggaaagatgagtaggccctccaaatagtaagtgagagcctgtgacaggcctgtctgggtgtggtattacacacttgccttttttcctgtttacagcttccctagttggtgtcttagggagggtccttgtattctggttttgtcaccgaacacctgggggaattagatgacagaatacccggggaattagaggagaagcttatgtaggttcacagtccttgaggcttccatccattggaagttgttttgtaactttgagggttctggatgcatacaggaaaggtgataaagaatttttttttctctcactctccgatgagcataatgtggggtgctagggtcttggataaaccacaaccaccaatgcaaccccaagcctgaggcttccaggcccattgtcttgggaactggaagaatgaattttatggacaatagggagggtgagttttatcatagcaatgagaagagaagatagaactggccaggaaaggcagtgaccccaaagcaggaggcccttgctggaggcagagaggccagagagcttcaggttccccttctcctaaagcagccgttctgcctagaggcaaagactgtgggactgacactgagaggtggcccatctcaaggatgggcccgatggaatgaccatcttgtatccttccaccagcctcactccagggttttccataagtcatgtaagaagcccccagactaatagcttgagggtgccctacctcctggaatcccttctgctctttaggagctttgaaagccctcctctgcccacactctcatcaccgagtctacagtaagctttcctaaagctcatggtctttggtccttgacttctgttcttcacagttctgagacaagaatttgaaagctactggcttgggggaggttttgatggccaatgagtttccgagatcctaacttgccagagccaatctcacatcagcaaaggtccattgttaaagatatttttacgaggggggggggtgggtgtccttccacaatgggatgctattaagtttaatagtctagggacattttgtaggactcatgacagaaattagggtgcagcatgaggaggtggttagccctgttggcccacccatgaggtctccaggtttgggtgcgtcctcacacgcagcctcttggacatgttgctttgttaaggtgctgcaaaagaggaaggaaggtatagcagaaaccagagtcccattttgaccaaaggtaagactcagaactgctgctttctagacctctgccttcaattacgtagtagtggtcagccgaggaaaggactttgacacattgacccttaggagatatttcggaccaaaccatgttaaggcttatgacagctgggttcctatttggaggctgtgtctttggctaagtgagaaaatcttaaagaatgacccttctcttcagttctttgttattaattttcaaggtgtatttatttccttttatgcatgtgattgcttgcctaaatgtctgtatgtgctcatgtgcacacctggtgtccctggatgtcagaagatggcactggtgacagatggtcgtgagccttatataagcgttgagaactgaattcaggtcttctgcacgaacattaagtgcccttggtcttttgtgtcaacccctacctctctgagtgttactggagaagggatggaggacagaccagagggcaggagatagcagctgcttctgagagcttgtttttagtttgtttaccttgacgtgttcttttctgagcttcaacagtgacactcaccatcagccataattatgtaccgaaaacaagggaagagtatgcacatcaaacctaggcagaaaaatcatcacttcctttatactaactcactgaaaataaagttcaactggtccaagcttttcagtccacctcttataggccctaaaagtggccaaatacattgaagttgccatcaggagtgtatatgatcgagagcctgcgcatggtagcctaaggacatgtgtacatgtatacatgactatacatgtatagtcaatgtttggagaatgacagaaagccagtccttgcagggaaccagggcaaaggcatgcaaatgtaaaacttctgtctagtcagcttgggctgttgtaacagagtgccagagattcgggtgttttaaacaatttatttctcataagtctgaaggctgggaagtctaagagtaagatactggaagatttattgttggataaaggtcagacacctgattcttgcttggtacccttttgctggctccttacccggaagaaagggcaggagagatgagagtggatgaatagttttttgtttgttttagattaaaaatattttaaactatcagctaatatatctatagtattaggtttcattatgatatttccaaacacaatttattttcactgattctcctcttaactcttccccatccctcgacactactacttctcctgacccaggagaaagaaaaagaattggggaaagctattgatcataaaaaagaatttggataaattgggagaaagccctagtgagggacaggccttccccaccaccagagggcagtattcatccaacctctgttcattgtattctggagaatagcaccgagatctgcgcatggcaggggtgggggtggggtgtgggggtgaaacaccataatccactttaatcttatagctcaagctaatcgctctaagtggctatagtgatggagcccaaagataaacaccaatgggaaggactaagtgaaactacaagaaaggaagattccctccagtgctgatagtaggcacaaatttgcttgggacacaaaannnnnnnnnnnnnnnnnnnnnnnnnnnnnnnnnnnnnnnnnnnnnnnnnnnnnnnnnnnnnnnnnnnnnnnnnnnnnnnnnnnnnnnnnnnnnnnnnnnnnnnnnnnnnnnnnnnnnnnnnnnnnnnnnnnnnnnnnnnnnnnnnnnnnnnnnnnnnnnnnnnnnnnnnnnnnnnnnnnnnnnnnnnnnnnnnnnnnnnnnnnnnnnnnnnnnnnnnnnnnnnnnnnnnnnnnnnnnnnnnnnnnnnnnnnnnnnnnnnnnnnnnnnnnnnnnnnnnnnnnnnnnnnnnnnnnnnnnnnnnnnnnnnnnnnnnnnnnnnnnnnnnnnnnnnnnnnnnnnnnnnnnnnnnnnnnnnnnnnnnnnnnnnnnnnnnnnnnnnnnnnnnnntatgtgtgtttgtgtgtaggtatgtatgtatgtaagtatgtgtgttatggtgtgttcttgttttttcctctcaatcctattctctctggccaagcagagttataaaattgagtacataactccttacaacatttgatacgtcttattttttaattgaaacattttatttgaaggtatataaaaagtaatcaatggcttttaacactgttcctacaagagtccattgcttcccagtaaagatttaataattacctttatatatttgatgtagttgtttgtaaagccaatatcatgtgagggcctcttggcactttgaattatccattataaggggaatcttaaaaacaaaaagtcaggataaataccacccagctaagttaaaatatgaagtgtgtggctgccaatgatggaaaaatgaagtgacctatcacttatgaatattgtcacttgaccctcatttgtgtatttagaaaccttatatagagaacagagagtggcatttccttccctttacaacaataagcttaacactgtaaagaacgatcccatgctctaggcttaatttttttatttatgtcgattttctgacatacttcacaaaagcagaaagaacttttcagtaaagcaagctttctcgagccacgggttgtgctgacaaatgcaggccaagatgagcgccttctctggttgctgttgttggatttccatttagactttgcctcagcccaaaagaagatggaagttgcttaggatgtgaacaacaaaaactctcctcacggtttcagcaccctctctgtgcagtggagaatgcagtgggagccttctccagctttccaggagctcactggtctgagtcccctggcccccggctttaccttagctcccagcctgctctggagtctttgcttcagtgtctgacttaagagttcttgtttctgtttcctcagcctgtctccggcttcaagagtttgggtaaagctccttgctctggactttgtttgaaagtccatggactacctcttgattcttcagtttatctctctagtactttctctcctcccaagcttgaggttggaattttattttgtttggaaggttttttgtttctttgcttttaattcttaaaatttactccatatttaaggaaatccccaaaggattctcgggttagtcactttttgatggtaggataaagtgcctatgttaaaccaccagagggaagacaaacttatctgattcacagtttagaaggctccactctcatttcctggcttcatcacttttgtgctagcaggacagcagagaaatcacagcaggaaggctatggaggaggagtgttattttcttcatggttgtaaagaagcagagagcaggggaagggaagggcctgggacagggtatacctgcagaaatttccacgagtgtcatagtttgcccaactaggctcaatttcctaagagcccactcagccaagaattcaccagtagctttaagctccaatcatatcttttctttttttttttaattgggtatttatttcatttacatttccaatgctatcccaaaagtcccccacatcatttcttaaagccccccaggagcctgagagggagacttcagtgtgagtccttggggtcatttacattcaaatcacaggggctttcttcatctgcataagcacgggctgccttttcagctccttttggagagaaagctgggattagatttctactcattcagtctttatcttcctgttaataagggctccgtttgtacaattctgtacaacattatttcttttaggccaggaggaagcagcagaggacatttctgaaggttcaagagaacattcttagaaaggtcaccttcacctgggggtgggactgccagactggtgtgtgtgtgtgtgtgtgtgtgtgtgtgtgtgtgtgtgtgtgtgtgtgtgtgttggtgctaggcagagttcactataactatactgtgtaaaaatgacgtcaggacgtggggctaaacactctatctagtctgggtaggatactaacttactgacatttctatgggttgtggggtgtgacatcccttggcaggtgggccctcgctgtgtaagaaagccagctgaacctgagccccagagccagccattaggagacagacattctgactttcagggtactctccagctcctgccttcacctttttaacccaggatggagcttctgggagctgaaataaaacctttcctccccaggctgcttttgcttatggtgtttatcacagcgacaggaaagcaaaccataacggtaagaaattgtttatgagttatatttataaatagttattttaagttgcaagtaaagccaaagcctgaaatttcattttagatttcatgaatcccaagttttgataaatatatcttaaatagactctaagcaaaaccggtagatttttagaaagtcagttactgagaaaaaagactttcaacaaatcccccccccccccccatttctctgtgtatccctgactgtcctggaactcactctgtagaccccactgaccttgaatttagagatctgcctgcctctgccttccaagtgttgggattaaaggtgtatgccaccgtgcctgttttaaataaaactttaagatattaattattggcagtgaagcttagttgttgagcatgtgcataatgcacagaaattcttagttcaaaccagaatagcaagggaaaaatatttttggtttagatagtatctatggctctatctggcagaccttcctgcttctagactgcatgtttggagtgtcaggcatcacgctcaccctctgatgtgtcctgtgtgtaatggatgcttgtttggtttaacgtaagaatgcactgttttagtgtagggatagatgcagagcctgtgtgctcttggctccccttagcatctcagattgtttactgttaaatgtgtttactctcacccggggccgtccttgcagcaagctaatgtgtgtcagccttagtggccacccaagagaaggggtcttagtcagactggttgatacttgggctcctgttgccacttcacctgcttccaccctggattttagaataattgattgaggtaagcttcccatttaccttgttccttattttatttatttattttatctatctatctatctatctatctatctatctatctatctatctatctatctatctatctatctatctactgaggcagtgtcttatatgttgctctggctgtcttggaattcagtatgtagatgaagctggccttgaactcacaaacatcgccagcctcttcctccaagatgctgggatcaaaggcctgggtcaccacgcccaactcagatactctttgtctttttgagaatccaaggcttctgtgttgcctgtagtctttccaacttccagagggcctatgaagtctagaagcttctaattccatgacttttgcttcaacttcagctacgttcttctgtgctctagttggctgtagtcatatcctagagagtctttcccatcattaaatgattgcgttgtcccctagcttgactcaacagcttcgtcttcacagtactcagctcctctctactgtcttccttccgctccgtgccgtggtttgcccaagccaggagtcttcatgagaccattctcagatggatttttttgtcctcttacgtcactttgggaaatctccaagtgtttttgatattatttgtgtctttgtaggttattaattcaaacatttttttaatttattatttttgacactttattatgtgtatgtgatgttttctgcactttcatcctgcatctcccccaccccccaacccttccctccaacaatgcccctgacccttagtgaggggttgagcctcatgcacctctccttcatgtatgctgaaatggtgatgggccagtcttgctcaggtctcctgcaggaaaccacagctgcagtgtgttcgggagggcagtggtcacatcgtttgtgtccagaaaccactgctttgtagcactcaccttcaacctctatcttcagttttgttttggggaacaaggctagcttagaagtcattgtccccagcttcccgagtgcttggattacaggtaggtgcaaccatgcttggcttagactaggtcttgaatgatctcagaagcccgtgtgttaaagatgtgctcaccagagtcctggtgtttggagaggtcattggaggtatgttttagagagtcattttggcatactgactccttcttttacgttctttgcttcgtgactgtgaggagagtaatttgacattactataggctccttccttgttctgccttggcacaccccaaacaactggggctcatgggtaatggacaagaccatctacaaatggaagccaaagtgagccttccctcattatacgttaatcatctatcgctaggatttcactatggtgatggagcattgatgaccatcttgtttggtttatagaagttagagtccacaggttgcagtgtatattcttgtagaaatctctctgcccatcgtgaggattgccagtgggttgtttttgtttagttcttctcatcatggtggtgagcagtcgggatcatttagtgaatgtagttataatggtgggtcaggtgcatgcttagccttattattattattattattattattattattgtattggaattagtacagcgcaccttagggtccaacagcataatattcatattcattatataaactattatggttctcatctcttactggttttgactccacagcttttcagacttgccgtattgtacaaatacaggcgagtaaataatgaagggcactatgaggctttgtgcagccctgacatttgttctatttttaggctatttctggactccgggctttcatcatgccgctattaggaaattcatcaaactttcatattgcctgcgctgggctccattgtctgtggctgccatctgctccgctcggggcggcctgatgattatttcatgtgctcctgcaaccctcctgtcttcgctgctcttcagcctcttcagctttttcgttctttgcctctgttctctgttcctgggtgtaggagaattgtcacttttctgaggaggagggaaactttagtgaacattgctgtaggtctttgctctctctctgactattgccaggttttcccttgtctccgtctctcttttgcctgagccaaattcaaatttttaaggacttaaaagatttaaaaatgaatcacaatcacttgttgcacatgtactgtggtgcgtgaagatcacctgacacctcatggtgattcctgacttcagtaaacttttggtctaggacagaaaagagtggccttaagaatgatgaattaaagctattgtaattcccgggttgctggcttagtaactcagagtctcagaaggtgctgggaggaaagggttgactcaggaacattggtctttgtggaggccgtggagagaggccgtttgaactgtggaaatggactaaggaaagcactgagcctttaggaaggtcagagtttatgggtcgatgtgactttgggaaagccaaagcaagatggctatttttaaggagtacaaagtagagttttgaaaagtattcaagagacaaaagattaaggccgagccatgcttccacccttccatccatccattcatccatccatccatccatccatccatccatccatccatccatccatcgattggaggagcctgtgttcatatctgtgccaggtgcagaacctgagtgggtggggcatgtggccgcggagcagcgaggaagggcagagcctctgaggcttgagtttaagcaatgcagaaaatgtaaatcctaggatttcaacagaaagtgaggtgtgcatggctctctgaggactgttcacccaatcgggttggagacgaggagtgaggcaagattcttctagatgacatactcagctgggagagtaaagttgaggcagaaggatccaaggacaggccagagctagatgactaacaccatttgcctctgtgagaaacatttgtaaggcaggcgaaccccgccccagagtttgacacaaagagtggtttacggccagggtgaagcaaatcaccctgttagagctttcctgattaacccatgccctgccgcttcccatccagtcccaccctgccacaggcccgcccagttcggatgcatagtcaagcgaggatctgaactgcctgccacatggtaatgctaggccggggaagcagatctctgtgtccgtgagccccaggaaagtctcctgttgggggagggaaattgtcaagaggactgagaagactctcagaagtcttaagtttggcgtctgaacacttcttaagtcagggtttctttctgtaaaaatgcatatacatttgtagtcttgaggattgaagccaggcctacacctatacttggctagtgttgtggcattgagctatctgtcaggcttctcttagaactacggagggtcatagatctacaagtaaactgattctctactttaatatacaaacttttacgtacaaagtgtcaaaatctatccgagtgaaccaacaatgctcctgtgggaacactctagaagccttcgtatacttagtaaaggctacagttttgcagtattataaaaatatttctcactttcaccaaatacaaccttatgttgtgttttaaacctcacaatgagctgttttgttgaaattctttttagtaatgtgcctggatccagtcattaatatttagactcctgcagtactgagaacataccagacagtggcagcaaagaacagagacggatttcaggctttgtttcgtttgtcctctaaggaagagtactgtggaggtgacagtttggtgcaaatttgttctctcataaggaagcccgaagtacctgtttaaaatcaaacacataccagaggaatccaggcttcttggcaggtcctaagtccttcccatccaaacagtttgtcttgtagtcatatctcagtgacacacagagtcagaggagaacttctaggccagcccaagacatttgaatcagaatcttccagagaaaggcctacaaacttggctgtgtttcactaactctgcagacagtgagtctctacactcagttaagagttgacaagttagtccttcctatggagcatcatgagtctatgaggtggtgttcacaaaccaggcaaggagacaaagggcatcaggaacatccctccacacggctgttcatcactcaggaccaggcactcttggttatgacgtaatgctgtccggatactgttctccattttcaaagagaacttatagttctcagcatactgcgtcagcgttgctaagggaggtcactgggtttcctgaagaaggattcctaaggccatcagtatttggggaagaaacccaattaatcaatgtctatgggttaagtatacggtacattatatgtcttaagtaagctccaaaatggtgtttaaaaattattctctaccttttaaacaaatcaccctagtaagtacaaataaaactagttcttggtcaaggatattttaaattagtaagttaaacttttgaggtgaactggaaacgtgattgagatctcctaaggctcagaaagagtctaaaggaaagagcttagcatctgagttgcttgaggaagggatttcttagtagtcctgtagttggaagtgtggctcactcacagaagacagctagtggaagtttgtatacccaagagctggggccccatttgttatacttttaggtatgttttagatctcgtgtgttgaaaactaacaaaggaagttatggaaaagataataaatggactgcagagatcttaattctgtggaattgttacccacaatgcaaaggagacacatcatgaccttttttgtcgggcttctttccttctgcctatttccaagaatcatccatgctgtatcgtgtatcagcacttcaatatttcactatatggttttaattgtagtcaatttattcattgattgattgataagcttttaggtggcacccacttcttttgcttaacatgagcaaggctaaataaatataaatgtttgtgtctgagatttcatgtggaaaaaaggttttcattttctttgagatcaaagtagggatagaattgtaactctctccttgcttcctggaattccttgttgagttggttactgggagcttgacaagtagattcctgaagaactgtgtcactgttgatcagtgccacagacaaccttaggagtagacatccatgaagagtcgttgagtgggatgtttatgtcacagacatacgaactccgtctctcgatgccaaacttacactgaagagtgaattgtatcattgtcaccaaagggtagacctctcaatttgaagtccatataggactaagtagtgactcttcacctgaaactgtaatgtagccacaccatttctaaaaatgaatgtttcccacagtgatgactctcacgggaattcacggggagctaggcaggccattgttgagacttgttcatgtgtgtgagacatttctgtacaaaacaacagcatcttttgactcttgaaaacccatgattatattaagcattataactatacttgaaatattctgataatggatgctcacatccacttacgacttgtatacccactacttaaaaacttgttgatctggaaaaaaataactcatgcagtagtcagggctttggggagactttttcatgaatactttctatccacttgcaacagtttaaattggagtatggacctatgtttggagacaaaatttaatctttataagtagtaggtgctagcaaaatagacgtgtttaagaggaacacatttgggggtttgctgtctccagagaccttaacttgtggctaacagggctcatgtggtcttggttttgtgtcccaagcaaatttgtgcctactatcagcactggagggaatcttcctttcttgtagtttcacttagtccttcccattggtgtttatctttgggctccatcactatagccacttagagcgattagcttgagctataagattaaagtggattatggcgcttggggtgtaacttgtcctgcatcagaaattattttacttcttttctttgctcaaggaatgtagcctagctggcatttggctccataatgactgaatgagaacctcaagtgtttagactgtttcatatttttgctgtttctttccctgtgtgggcccgtgcctgaggaacttgcattgggaggtgtaattactacacccactcttagaggaaggtcttgaagagggcaatggctttggaaaaatttttagacttgtgaccaccatgaaacattgtattctgtttagaattggtgatctgtgcaattctgatgaccacagacttggaagacttgtgagttggctttggttttgctatcagatgatattagtattggcagaaatagctctggtacattccagaatattatgtagtacaatgccaaggtttaatagaggctagtgattggggaatcatgcccctcaaagctatgttatttgctgaatatacaatatcatttcaccaattcacatgctacaactcagagacttaaccacagttcacagaggtgcctagccttaaaataccattttgcccacacatttcaaaacagggttagactcttaaaggggaaatgaatttttcagtttattttttattaatttttcagtaaatggacaaaataatttttttaaaagattttatttatatgtaagtacactgtagctgtcttcagacactccagaagagggagtcagatctcattacggatggttgtgagctaccatgtggttgctgggatttgaactccggaccttcggaagagcagtcgggtgctcttacccactgagccatctcaccagcccccaatttgtttatttagaagacagtttaacagggaagctagattctagtccaggaaaactttcaaattaacaggtccaccatggtacaagctctggtttaaagggttattcccacctaccaagggtgtatcaccaaagtgtcttagttatggttactattgctgtgatgaaacacaatgaccaaaaacaagttgtgggggaatgagtttattttgctcatagctcaaggcaagcctatcactgaggaaagtcaggatagttatggaaggaggagaggacctggaggcagaggctgatgtagctgccatggaggaatgctgcttactggcttactcccatggcttgctgagactgctttcttaaagaacccccaggaccaccatcccaggggtgtccccacccataatgggctgggctctctcccattggtcactagttcaaaaataaaatgcttcctagacttgtctccctatagcctgatcttccagatgcgttttctcagtcagcgtctcctcctctcaagatgacttctctcagatgtcaagttgacctaacaagccagaacaccagcgtgacaccagtgttttcccagaccttgatttttaatccttgagcaactggcagatctaggatttgtttctcacctgtgggagttgtgggctatgtgagttaagtgagccttggaatgaaagctgtgtctttctccaaaacctaagtcacactcttcccctggagatcaacctcatgtaacccaaagctttatcttcttgcctggatgtagtcctaggaggaatacttggatttcccatgagtgctgagcacgcacgggtcagctgcatcttagccagggaggagctgagtgacatagagcctgtggtagggactggggagcgtgaggcacaggagggaggatcctctctctacttagaggtcaccaaattgaatgttcaaagcttgctgacccaagtctcaatgtcagtaagttttctgtaacttacttttctttatttgtaaacttgggtatattggttacttttctgcttgttctgacaaggaagaacaacttaaaggagcagggatttattctgcctcatggtctgaggggattctcttcatggtggtaggctgtcaatgcaggagcttgaggctgctgatttgtaccttcgtagacctggaagcagagacaggaagcagggaaagctacaaatgcaaaggtctctcgaagtcttcacttctcctggggaggctgcatttcctaaacagtccacaacttccaaaaacaacatcatctaaggaccatgtgttcaaacacgtgagcctatgggagactttccacattcaaggcataaagtcagggagggtgatgggccccaaagcacagagtgagaatagatcagcattaaatgtgcttggtttgtcctgagggagggagccaaggtcaggaggaattaggatgcttcttctcattgtccagggagtctggggcctcccatctctgattcctattgcttctttggaaggcaaaggtgctctttgtgagcataatttacaagctaagacatatcttgttttggggaaaagttagcttttctaacacaacaataaacttcaataaattgactttaaaaaaggaacgaggtatgaggtatttgaattatatttttgtctaatgtgtcctgtgagccatcatccttgtatttgtgagttttgagcatgtgtagttaaagagatctgtcaaaattactgtattataaacagcaatagattgatatgattcctggaccgtcactggaaaatgagttgttttgtggagtcatggggatatgcagtggttgcttccaaaatggagagggggtggggttggactctttgcaactctagaggcgactgaaaggctagttagctccctttgtacctagaagcctgcagcttcttcttgtggaagggctcatctccttaggaggtcattcattgcatgcaaacattctgttatcacccaaatggagaatgaagacacatctgtcttttgtgaatggtttcatgatgtggttcctgtggcttccaatgccaaatgctcattggaattgtatcttacagggccataatctagtagcggctaagtcagttgtgaagtgaagatttgtaatcagctgttagcggaagtgaggctcatagccttgtgttggccagcaaatgaccccctcctttccctttctaaacaaatgcatacacaccctgttttctgtagccttgacttacacaaaaacatagagacagacttcgggattgtagacacttttcaatggcaacataagatgatatgaaaggtcttaaggtatgagcttgctgccggacatttagtgggtgttttgcagataaccagacagacatgaaatagtctttgagaagtttctagaatgtttgagtttaagttctacggttcatatggtcagaattagaactcagctatgaaactttggggcaagttgttgctcaaagttggcgagaaatcttattcaccgaaaggattacactaagcccatcagccagactagaaaggtttcaaaaggtaaatttgttgaatttagacatttcgtaacaaagcaatgctggttttgaatgcttacgaacttgacagttgctgcctctgtcattagctaatattttcttccacaagatttgccctttaaaaactccctattaatggctttggaggctacaggttgctagacaggtttgtcagcagtgctgtgcagagcgtgtcctggcgccagctctgttcctcctctactccattagcttaattatgactttcagcaggcatctcacccaggagccccagcttggatctgtgacatcgtggcttccttccagcaggatggccacacagcacatgaggacacatgccgtcctgcaagaaggaggagcctgggctagactgggtgcccttgtgctctaaagcaggctaaatgttttcaggcatcttttgtgcactgtgaagaagtgagagcgcatgtatttctttccttttgataatcaggtgtctgagctgtcatttaatcaggaccatgtggtgtgatgtgagacgggtctgagtttaaaccctgtctttgaatgaatatggcctcaaattatttaaggtgatattgacttgagagagagagagacagagacagacagagacagagacagagacagacagagacagacagacagagagagagagagagagagagagagagagagagagagaaagagagcgagagagcgagagagcgagagagagagagagagagagagagagagagagagagagagaggaagagagagaaagacagagagagattgtacagaatggaaggtgtggctagccacaaggggatcacgcctgtttgttttgacttttgataacttaagtggaaagcctgtggtctctatttacttaatcctgtgaatcacagcctcattacgtaaaatgtatcacaccttaaatagcttactaatgagtaaggttcacaatctttgaagacccaaaggactaaaactgccacacaggtttttttttttcagaactctaatttcttccaaatattttttttcctaatgtaacgatggaatctcatttgaaagtataatttaatttttagaaacaaactgccttcaccatgctatgagatgttttatagatcattataatttttacaatgtttccagatacggaattgatttagtagctttggagtcagattctttctttaagtaaggaatattatgttaataccttgcaaattagacactcattttctctgggaaagctttttctctactgtggaaggctctctggctggctagcaactgcagtaatagctatgtgggactgctgaaccagaggagggctgtggatatcgtgtgtatcatcttatttaattcccagcctgactccacaggacacatggatacctttcgtttccatttcacagatgagctcaaacagggaagcagtatctacagtcgatggtaggtactggcagggcgggagttggaacacaggctcatgggtgccagaattctgacctggccttacttgggcacctggagatgttggaaagtgactttaaggaatgcagctcaggtggtctcttgtattgaaagaaattcttactgaaaatatctgctttcctttgttttaaaactcgcagagttttgtatcattttgctttagttctttaggcagggttatagctgactttacttttatatggttgtacaaattgctgttttaaaactcaatcagttttctttgggtttctgagatagggtaaccagtaatatatatatatatatatatataatgcaagctttctttccttccttctttttccattttttgggggcttttgaggcagggtttctctatgtagtcctggctgtcctgaaactgtgtacaccaagctgaccttgaacttggagatccacctgcttctgcctcccgagtactgggattaaaggtgtgcacgtccactgccttttctaatagtcatagaatacttagagaaggatcaagtattcaaaaagaattctcattgtataaaatcttttctatcagcattttattttcattctctctcatacacacacacatgtacacacacatgtacacacacacacacatatgcactcaatttgtgttaggacaatgcatctcgttgaagtcagacgattaaaacctttattttttttaaagatttattattaattttgtgtatgtgagtatactgttgctgtacagatggttgtgagccttcatgtggttgttgggaattgtttttttttttttttttaggacctctgcttgcttcggtcaactccactcactccagtcgccccctggctctggtcaactctgctcactcagtctctgcttgctctggcccaaagatttatttattattttacataagtgcatcatagctgacttcagactccccagaagagggcgtcagatctcattacaggtggttgtgagccaccacgtggttgctgggatttgaactcaggacctctggaagagcagtcagtgctcttaaccgccgagccatctccacaactccataattaaaaactttaaagtaaaaatccgagttgctctttatgctttcaacacgtaggaattgattttgaaggcgtaatggtgacatacatcaatttagacttgtaaagtctaagtagctggaacacagtgaattcctcattgtttatatctgcccaccacttcaccatctgatgcacctgtcaccctcactggacgcccaggagctgctgttgggttttagagtctgttgtgttgggatgcttttttgcaaagttcagcttctgtgcttcacatttcttagtggtaaaatagaaagaagaggaggaggaggaaggggaggaggaggaaggggaggactgagttaatgagctacatagatatcgagaaactacccattgtaacaactggtgccttcctctgccatcttctgtgacatggaggaaacccaggaatttgcctatgcctgatagagtccaacttctgttgacaattgctccttcaaaatcaatttgttcgttacagacatcaatgattgttaaagatatgaagcaaataaaacctaaattagctcttattccaccacttatgaatagttgctattggcctcgttctgctctatttgtacgatgctttcttatagaattatagaaaacgttttaaggattgttttcaagagataaatctacctttattatatgagttgaaattttgtgtatctttcctggtgtgtttatgtatatgttttctatcatgttctaaccaatctcctcttgctgggtaatttaagatgtttgcagctgtcatttatttctatgatgtcatacaacttgttttgtatgtcctgtgtggtcttgtcttagtgtaagttcctaggtctgctcactccggtctgaggctgtacagtcagtcttcagacgtttaagatgtgtgtgtgtgtgtgtgtgtgtgtgtgtgtgtgtgtgtgtgtggcgttgcagggcatgtgctctttatgcatactataatggcctgcatgtaaagcttcgaggatagctgtgggagtgggttctctctttccaccatgtgggtcctaggcatcagactccagtcatcaggcttggctccagtcacctttacccactgagttacctgtctggctccagctttaagacttctgatacacaaaacaaactggctttggggatgctggccttctttagttactgagcctgctagatttccatgttctcgacatacagattattattaaaaatctttgactgggggctcatgacatggctcaacagatactcctgaggggacctgagttatactctcagcactcacatcagtcagctcataattacctggaagcctaactgttggagacctgacactctcttctggcatgagtggacacacacacacacacacacacacccatgaacatatacatacataaatagaaaaatgtcatcttgttcatatagtcaggctatatttttataagtgtaatataagtaaagtatggctttatcattgtttaaatttatgaaagattgagtgcattagtattttgccgtaggaaaaggggcagaaatcatataagaattttgtctttctgtaatatttttttatgttcattaacaaattatgtgtgcatgttcattcaccatgtgtatgcaggtcctgtagaggtcagaagagggcactggaaccccctggcactggcgttacagatggttatgagccaccatgtgggtggtgggaatcgaacctgatcctccaggaagagcagctggtgcaccttaaccactgagccaattttctagctccgttttgatcatctttaaaatcagcttctctgggttggtggagtttctgagtagctctattttcagtacctcaactttattcaatagtattctaggcataatccagtctggctaggtcttaaattattggagtaccgacaagtggtaaatgcaggattgaatcatgtcatggacaaggtgtgcactctttggctactgtcactccataccgtaaaagtgggcaggtaatttgttttcctgtttcagatgaagagacgtgagtgacaggtggtttcatgtgtctaagatcacatagctcttaggtagtggaaatggggttgagtttagctatgtgtgactcgaaccccttccctcctttcttgggacactgctctctggactggcccatgcactgtggtgacttctatccattggtctcctggtgtttgcagctcacagcctttctttcttcaaggcctccacttcctgtctaggttggcttgagagtgtcatggccgtcctatgtttctgaggggttagctttcattagagacaatgatcctgactgtgttcagcatctcatggataggagaattcctaaagagtgagctgctgcggggtttttcttacgtgggtccaccctcactttgagtttgtttctgatctgtttgtgggggaatatctggaattggttgcataggttatctgagctaatccttgggtgggctgctcaaaataattcccaaaggagtacatcattctctctaagccaaatgctatgcctttacgtctttacttacctgactgagctcctagtgggaagagttatttgttttttattgttaatctttagcccagtgttcccagcaggaacagacaccaagctcatgcatagttgtctggttctactacaggtgattgctataggtggggaggaccctctccttcttcctgggtttgaggctatcatggcctggccaggctcttatgaaaccaacaaagtaaatttctctccccctctctctccctctctccctccctccctccccccctcctttcctctctctctccctctctctctccctgagtatagacccacaccaccatgctctgctctggtaactttgagtaaaaagggggctgtggttttgtcatctaaggattcagaattaagagctctcggtggactgcaaaggcagcagcgacagtgggttaggtggagcgtggagaacatcccgccatcatgtgcctgatccctttagctgacctgggatgcaagagtcatgactttcaaattcacgattccaaaaaatgtatttttccccagaatggcaggtaggacaagtattcctgcggccagctgctgaacacttgtctgggggtgggggttagagatagctgctatttagctttgtaatgaaatgaggaatttaaaaatggcattgaggagctagagagatggctcagtggttaagagcactgactgctcttccagaggtcctaagttcaattcccagcaaccacatggtggctcacaaccatctgtaatgggatctgatgccctcttctggtgcagtctgaagacagtaactgtgtactcatgtacataaaataaataaatcttaaaaaaaatggaattataatcaatgatgcatatatataaatgctatttcaagtttataattgtgtacatgtactcttagtggagcacccattgtttctttttttaaatatactggaaattcagtttagtttttaaaaattatttattttttgagattataatataattccatcatgtcccccttccccttttctcccccctcctgcatacccttgctacttttgaaattcatagcctctgtaacttttgcttaccatcctacaaaatgattatattcgaggcaacacttgctgtttctgtgtgtttgttcctagtaagaagttgtaacacagactcatacacaatttcctatgaagaatagctttcggtgctacgtgcaaatcgtcagattaaacattaaatgcttgttagtcaataaaattgtacatttgccttgtttcttagccccatttaattagtactcacatctgtctttcaggctgtaactgagaagaattttgaaacaacggattttcgagcctctctagaaaatggtgttctgttgtgcgagtaagtatttcaggcctgctccctatatagtcacagccttcttagtccaaagtgagatttgatccctgcaagctgacacctctatggtgtgagccagtaaggaaggggttatcggtttagatatctaaagattgtgtcggtaatatatattatttttaattagtaaataagcaagagtctgttattgctttatgggtagatcattgaagaagaagctgattatatctgactataacttacttggtatatgattgcctcattataaccgatccttttcatccgtaagacatgatggtcagagtagctaattcacccttaagtggagtcactgcattacctaagtcaatctgagtcactgactatttattcagttaacaggtaccattgtgagcaatattctagactgcgtttaccagacgctaaacgggctagtgccctgattgacagtatagggtccaccttgtttgcttgtgcttgggtctacagtggctgcttagtacagttaaccagataggttacctttgtcagtaagagcaggcctctgagggaaaaaaattaaatcccggaggaaagaatgagttgcagaagtgagcaaataaattataagaatgtacttcagaacccacccacattctttgaaagcacttgataattccaatctagactcttaacccacagatatttatggaatctgtctgcatggaaactctgggagtggactactggcacctagatgtgttctttcttgtgtgtgtggggggcgggggggaagagaagggttcttttgccggtatgtcctggcctactggctgcatagatgcttttggttcttctccctttgaagggcgctgtttgcagcgaaggttccaagggaaggggttagattccttttccaccctggacattcacacgagtgactcaatttttattcacacttacaagtgatttctagtgcttgagcctgactttcctcatctgtgaagtagagatcctggatttccatctgcctgattcctggagctgccatgacacaaactgtcattgacagtttaggtttgcataagctacggaagttggtataggtataagttaggaagatggccacgggagccagcgtgttgctagttgtccaaactcctttgtttgagaatattaattccttaattcactccatatgacatgactggaattaaagcagttgtgctttatagaaatgtcaactttctgtggtttcacccaggagaagtcctctcagggccacagttgaggttgaaaggacatttctcctcctcactctcccgtgtgctcacaatccttgttgagtaatatttaactcatttaattggcctgctcaagtgcttggcagagaggaaatgatcttgatttaaaacttgtgtgatttaagtgttttcttatgtgttcaaaagatagaggagagaaaatacctgtaagtgtgtgatcgaacaccgcctttgctctgagtctagctgcttcagggttgacaggaaagcacccatctgtgggtgcgaggctctgcagtcttgcggaggaactagatggcattgtgcagaatgtggagtcttgtttagattttcgagagtaggtagtgtaaatagatgctctatttaaagaagtcctcttgtaggttacccatttctaatgattagccattgctcagaataacttaggaatctatcctgttgaatagggcttccataagtatgtgaataaacatgtttaatggtggtacctcttgtgctttttttttgtttgtttatttttttgttttttgttatttttacatgcgtatgtgttttgaccaagtcttttccctagtctctcatctctgactcctcctaccctcactattctctcctaatttcatggcttttgctttgttgttgtttgtttttggttttgcatcccgatgttcatctagtgctacctgaatgtgcatgtgtgtaggattactggagcataggtaagctctgaggagtcgcatccctgaagaaaacagactctccctttccaagagcatcatttgccaatagttcctcagccagggtgggacttgatgaccatctccccactccatgttgggattttatctggcttcagcttgcaccagtcttgtgtatactgtcacagcggttgtgtgttcatgtgagcagctactctgtagtatttccacttctggaatacttttttgcccctcttcttgggtactccctgggtctcggaagaaggagatatgatgggcatgtttcatgtatggctgagtctctgttgcagtctcttagtctctcacctttgactggttataaatctgttcactgtaacatgtcttctgtatttaaccacaacttatgaccagctctggctctgagtgtttggaaatgatttccaaaagctactatttatttctccccaggctaagatgagcctggtaagatatatatcatcacaagggaaaatattcagagttgactagaaacactgttttaactcaaataaattagagtagaaataatttctgcattgatccaaactaatacaaagtaaaataaatttaattcctaccttaatagtgacaacaaacagtttacttcaggcatatacattataaatatatgctgttaataagggatatatttatataaatgtatatatgtatatgtacgtatgtgtgtatgtgtgtatctaattgctatttttagcatcctcaatttttaccattagtaagtttcttactattttatctagtattttcagcagtttttatccttcaataccaaattgttttccaactggcattctgagacttccaagtcaggagttagaggagatttttttttttaactgcttccacttaactgatagtagactgtcatttcagactcaagttagaaacaacctctgcactgttgtttcaggcagcaggcctatttgagtagcacacactgccctgtgcgttattggcaggctgatagaccattggaatgagcctgtttgtggcagtaatttttgttctatcaagtttgactttggtacttagtgagttgaaagctgaaagtgtgtgtgtgtgtgtgtgtgtgtgtgtgtgtgtgtgtgtgtgtacatgtactcgcgtggacatgtagaagccaccaacatcggctactctcttgattactctccagtgtctttgtatttgtttgaatctggagttgactgatttggtgaggctggttagacaatgagttccatggatcccttgtctctacctcccatgctaggattaggaggctccaacacctggctttttgcatgggtgcttaaggatctgatctcaggtcctcgggcgggcgggcaggtaggcaggcaggcaggcaggcaggcaggcaggcaggcaggcaggcaggcaggcaggcaggcaggcactttttcaaccgaaccagctcttatactatttatattagacatacattctcttggctttattaacaatgaattgggcacaaaaccaacccctgtccctttagaaaaagtttttgctaaattaatgacaaaaattcactagattcttaggagatttcggctttttgagtcttatccacagtatccatacagtctctcatttcttttgtgttggttattattcataaggactactagaaaaagttgtcactacataaatatctgcagccgccatttgctctggctctggcataattatttctgtgttctgaacacatagcatctaggcattgctatcagttagcaatctcccggtgactcatcttgtggtggcagtcttggaagtcatctgaggaaaatattctttcttcctctgtgaagtaagaaggtttgtttgaagatagtctcactgggtgtgtcgctggttactcagtctatagttcccctctttggaatggtcccaagtttctgctctgccaccgctggccattgcttacaacttctgactttatgccttggtgagcacatggctcatgtcactgagaagtttctcacagtgttaccaggtctttctcccgaccccagtgtcctttgcttgttgcttggaaaactggagcaaaatgtttacctgttgctgtgagagggcctggctgtatttatatttcctctggaactctcttcctgtctaataggtccagtcttgaaagatccattcactagaataagaataagacagttatacagataccactcttagcagagggagaatgacttctaatgcggtagacaacatagagaactatgttgcttgtcactaatgtttatagaacacgattgtttgctagagctgaggacttctacagaggccagagactagggaatccctaagacatctatgcagtgggcctgaggaggaccacaggttttggtgggatggaaaaggtgttttttgtttttgtttttttcctgctgtttctggtcttgaatttataaaggaggaaaatgactcacaagcgactccccaggtcgacaccacctgctgtgatgagcaactttctctagaggccaacattcttcaattacttttggctttaattacttagttttggcttctcattgtgtgacaagttccctaagaaaaagcaactggaaagaaacaattgcatcctttgcttcagggcttcccatccaaggttgactctctggtctgtgctaagctatggtttcctagcagcaagagggaggggctactcacttcctggtcctgtccagagtgccaagcacagagtaaaaggaggaggggaccagatacattggcataggttagaccacacctcctactcatcatcacttcctgacaatgtcatcatgttaagaatccattgagggattaatccagtggtcaaaccaaggctcccaggattgcagttattgcactatatagcccattaacagaccagcaagcccaaagtgtatacctatagggaaataatttccctttcaaattataacactctcacaaaatctaaccagacttttccaatacttgtcattatttcagcacttacatagaataacaaacaggcaagaacaggaaaaattctgttaataaaatgtattgaaatcgcctgccctaatattataacacatgacaaaatcgtctaagtacaatacttttaatgatatgcatggtaaatggataaaataaaggttcagcaatctaatctcatgtataagaatttatgttagaagagctgagagtaagtggagacgaggtgaaccagtcagtttgtggcatttgggtaaacggttggctgtgagtcacttaaaatccttactctatatagggatgtagtatgtaacaaagtggtaaaaaaaaaaaaaagctggctataactctgggataaactagacagtttgaaattttgagtaagcaaatgaggcaagattgtgaccaaattcttgacaaatgagaagatggttatttgtaaataataacatctctaccttcattggtgagaattagagtgccacgtgctccttttgctgctgtttgttgaaagtagtaaataatgtaaatcattgttaaaatgatggctctatctcagaggcacagctcagtgggaaagcgtgaccttaagcttgagtgccaagaccctggatcccagccctagtgcccctaagagcaagaagatggctgtgttgtagcatcaagctctctagctgaaaaagaacccttggatagaaacttaaacaagtctcagagaaacaactgtgcaacacctatcaaataactttgtgctattttattaacacaaataattcatttatcacatagagaatattttcccagtaaccattcttttttggagtttgactacggatagaggaagagcaacattttaaagccttctcatgatagaaaatattaagaacaaatacctgaaacataaaattggtaaaaattgttcttattagctgggcgtggtggcgcatgcctttaatcccagctcctgggaggcagaggcaggtggatttctgagtttgaggccagcctggtctacaaagtgagttccaggacagccagggctacacagagaaaccctgtcttagtaaaaacaaacaaacaaacaaacaaacaaacaaacaaacaaaccactgactactcttccagaagtcctgagttcaattcctgtgtgggagtgctgggattaaaggtgtgtgccaccacgaccggctctagtcagtgctcttaatccctgagccatctaatagtacaatatatacccctttcagactggtttctttcagttactaatatgaatttaatttgcttccatatctttacattgccttatagctcattttggttttggagcaaatgttatcccatttttttgagtgggccagtttatttatttagcccaatttacctaatatgagaggatttcataatggtttaaagttgttgtcattatgaatgagacttctctttaaggttagcctggtctacagagcgagtttcagggcattcagggatacacaagagaaaccgagactcaaaacaacaacaaaagacttctataaacatccacatgcaattgcttgtgtggccacacattttcaacccatttggtaaccactgaggagtggtactgctgctcatatggtaccactatgtttagttccataagaatctgccacactgtcttccaaggtgttacactgctttcttctccctccagcaacgaatggccattcctgttgctctatgtccttgccaacatttgctggtgtcaggatactgatttgggcctttcttagaggttagtaggtgtgtagcagtaatgctgtttccagtttccatttccctgctgacattatcatgtggaattttttttttctcatagttattttctgtgcaacttatttgctgaaactgttaaggtctttgtttctattttcaatcagtggcttgttttgtttaaacttgatgagttttgagaattctttattaattttagtttttggactcaacagatatgcctcttgaacatatttttctctcattctgtcttttcattctcctgtcaacgtcttttggagaatgaacactttgaattttaatgaagcttagcctgccagttgtctcttacagagatttttttccccctttcgttctgtgttgtctcttaggaataaaaggtgtgtgatccatgagttttctttgtggggtctgcgtctaaatgttatttgttctgataaggtatagaaaagtccctggtgttcaatccactagcctgtaattcacgagactgttcagagtcggaagattctacggtcaggtccctaagctttgcagcatgcccttgtaacactttaatttcaagttttttatcatctccccctcttccttttccccttgcatgcactcccagttattccttcttgttctctttcaaattcatggcctgttttctttaattgtatatatatatatccttagctgttcttagatagataaatataactcagcagaggaacaggaagtctgctgtgagattgcatctcttagaaatgtcaggaaagctacacccctgaagtctcaccaacattcctgcctaaacaagacagctgaaaacaaggatgacgtaatagatatggaaaaagggagagctcacagggcctggaccctagcaagggactacaggcaattaaggactgctgagagcacccccccccccatattggttatctaataccaaatggtgagccctgaaaacatatacattgcatgcaagttacatgatttagctgtttcctggactctaacaggtttcaagcttactgacgaggctcagtacaagtgccataatggagaaatgacacctacattggtttttgacttgctgttcttccacatggttacccacctaagcatttgttgttaaatttttacttatgttaaagttaagcatagctttttaaaaatcacttatgcttgaatacactaatgcagtcataaagtttaatagcaaatgcttttatacttttaaattttagatgacaaatgctggttatcttacctatgagaatatggtaactatctacttgacgtgcgtttattttaaaatatgaacgtagaagaagctattgacttataatcttgacacctcctgaaagtaactaggtcagatgactgtatcttgtggcttactctccagatcacctttgacaattcaggagagaacaatacagtttgttgtacctggaacagagaacagacagaattggttttgttggcttaaaaaaaaaaattatgagccgggggtgggggggtggggttctttttttctctctcttttctcttttcccttcttcccttttcctccttcccccctgctttcccccctcccctctcccctccacccctctccctcccccttccttccccccgcctctctctcctttcaccctctcccctcctccctccttcccactccccctttctccctttctcccactcccttcccctctcccctcccctccctccccccctccccctttcccccgcatcccccccttccattttccgcccctcctcctgtaactccttttccccatatacccctcctcctccccttcctattctcctcctcccccctctccctccttcccctctttcttactttctttggttttgttttcctttttcctttttcccttttcttgtccccgccctcccccctctttcccttccctctcccccccctttctcacccatatttcccctttctcccttatccccctatttccccctctctctcccccatctacccctcgatcctccctcctccctctccttttctcgctccttcaccctctctccactctttcttctccattcttttctgcctattttctccccttccttccccctccttcccccctctctgtttttccccttctacctctttccctccttatcgattatttttctnnnnnnnnnnnnnnnnnnnntaaacaaccccccccccaaattatagcattgaagcagagtgattttctttttttcttttcttttttccaaatcgacttctttaaagaagacacagattttgaaaatgttgcaggaaccaaatatgtgtacacacacacacacacacacacacacacacacacacacaccagatggatttcagggctttgctctaatcattcatacttatgtgcttgctctgtggccaagccctgcccagggctgtctttagtaagcattcaaatgtttaatgagcagaattcctgtctggaataaaagtaagcaaataaagcaatactctatcagtgacagtcagtcagtcaagcaagcaacaaaagatattagtgtcttcagttagtcttcagttaggtatcgttactgtgccttcttttttttttttttttttttttgggttttctgagacagggtttctctgtgtagtcctggatgtcctggaactcactttgtagaccaggctggcctcgaactcagaaatccgcctgcctctgcctcccgagtggtactgtgccgttttaaaacaaaatgtggcatggagataatagcttaatgaatagagtgctcatcttttctgcatgaatgtctgagttcagtcccatgcactgcttcatccaggtgggctgacaaatcagggaatcagaagagtaaagtcacccatgggtgtgcagagcaagttcgaggtcagtctgagtgagctacatggaaccttgtcttagtaatcataaaaattaaaataatcataaaaattaaaaacagtagacctaatcataaaagtgatgtgaaagatacacatttgcatctatgctgttagaacaacattggtacaaactgtaacaactaacgtgagaaatgtgcttcttgagtggatggctaataagataacccataggtcaccaatcccttccatgtatcaatacattcttccatgaatggctttaatttttttttttaatctttgaagacaggaagtaaaaaagatatcccagaattttgtactttggataaagagctttctgatcaagggggaaaatgaagtttgatagaacttttttttttcttttttttttaagattagccaacagtagaatgtcaattcaagttcttaaaacctttcatgtctgagccatgttaagttttatagatggctttctgtgtgtcacacctaagtagggaagtcaggatatatctacagagagaaagatctgtgaaagaagccaatgttctagtgtaattctaaggacagtcctttgtggggagggggacagtggggagggatagataatagcaagggatgaaggaggaaatgtaggcatcttgagacagagcttagtccatttgggctacagtaacaagtaccggaacatgagtagcttgcatatagcaggaagttatttctctcagtgctggggcctaggaagtccaagctcaaggccgctgcagactgggtgtctggtaagggcccacttcctttataagttaacgtcttgtcctttataagtgctactttgtcaccacaacttcccatagtagaagggcaaggcctattgactgaaggcactagttgcattcaggaggttcagagtcatgatcttgccacctcccatagggccctgccctctacttgaactatgggagttttaggagagtcacaaacactcagaccatagcagtggagaagctgagaaaattacttaggtaaccgtgagagtaccccaagttattttgtgttctagttttaatccttcccaaaagaacaaccctctgatgtgctaagcaagcagtaattatgtttgttcctccatagaagggaaggcttgagagggataaagatataattctactgggctggagggatggaacagagggttgcaggccaagaacacaggccatgggagcatctggaagtttatcctgtaatctgattcttgcttcagagccagtgacctgaagtcagtgtccctttagaaagtccacatgtgaaattcaagaccacgtactatgcaaagcatttctgtttgtaaaagagagcatttccatacatgggtacttgaatttcctttaacttgaggccctgcctgtattccattaagtgtgcttaaattcatggaattatttttagatctcacagaacatttttttttatccttgcaagagaatatcctcagagttcttccttgagaatcataattcataactcaccaagtgatttacatgctcggtatttgtcacaactgtatgctcatttcctcctcagcctagtgtttataactgtgagccttgtgatggatgaaataaaacagcattttcctccagtgactcagagttttcgagagtgagtgtgtgctctccagagtgctggatttttccttgggagtagttccgtgtttgcacatgtacaagaaggttgaggagtgggaaggggaggctaatccattgtgtatatatcctctctaagtcatccctcaggccagatctgccaatgggggaggagttggttaatttaccacaaggtatctgtcttagctgtttacttaccctgcccctttgttcactgacagtcatctgtttgattgttcattccagaaactgaatagaaaatgctcttgaaattactgacactatatgtcagaagtgataaatcgtgtcaacgtgtaaacagagaccaggtcaccagtgactcagtgggtgaggcaggggtttatgacccttccctctgaaaggacaacggtgcttagcctttcccgagatgctatgtgactcctgttcatattagcttcaacgttatgtcattgaaagattacagtctcaggaaaacactacactaaaaaaaattaccactgtcaagggagtggcgaataactaaccgtagagattgtttgaatgactatgtcagaattgtgttgttgtcaagcaatgtgtcatgtattagctctcctaggcactgccgacagccatagaaatgcagaaataccagtgttatggaagcagtcagtcaagagggggaaactcgagggattaatatatagttgccatttgttattagtctgtttaattattttctagctcctcagttgttgaatgaaggaaagtggtgtggtcagagaaggaaagaggcttcttaaatggctcacaatgcacacttcagaagttaggactcacagagtcccagctgaggggctgacttaacgctgaggggttggggctgcagtatagctccagagtaaagttctcccctagcacacttgaggccttgagctccattcccagacacccggccccaaagccaagggggtggctgtatctgcaactaagttgtctacagatctttatgtgaacaggctatgaaaacagaaaagcaacttttgtttgccaggctcaatcttcataagccagtgttccgtaattctgaatcccgtcgagcaacattctgaaggctattaagttgagactttttgtcttttttttttattctcattcttattcttagcatactcggatgtatatagaaatctctggaatgtaggaggagtgacattccataggacacccccaccccccacccttccacaataagtgtccattgcaaaggagataccagggaagcagatgattttatttgcatttccttctttgttttgctgttggacctcatcacagagtaaagaattgcttgcttgggggatgaattgttaaatagaatttttttttcactatttcaaaatactgctctgtgacagcgattaatgattaattacccaagcttgcattaatgggaaaacattgtagtattaaattattacgctgtctggcattgtattagtgaataaaaagaatgaatgcatactggtggagatttagaagcagaatcgcagaatcatatcatcagcgtgcttgtcaaagttgagtttcttttctattgctttgttggatagagacatttctaatgctttggtggacagagacatagctagctatctctgcagtgtgtgtcctattaactgaaaagtgctcagtattagattccagggtaatgtgaaggagttctggtacatttaacttccacccagtcattccactctggtaacaaagcaatcagtcatgggcacgaatgagttaccagtaagaaatagtcaattatttggttgagctccttggcaccctttgtatgtgaaacggtatgggttagaggccatctttcaaaacaaggacccagatgagaaaacaagaaaaatccctttgagaattatgaatagggaaaaagtattcttagggccaagtgaagggaattgggatgaagtggttttttttttattttttatttatttattttttattactgcatgttgaaatggaaccaaattgtgcctctgtttaatacatgtgaaactacttctaaagcagtgggctttggatacagaagaaggctgatccaaagaacccttccacccttttgttcagagacgttctttattttgtctgtctttgtttgtttgtttgtttgtttgtttagttgtttgttttctcacgagcctctagctcggtatgacacatctgggatcagagctgtgttcctcaggatttttgacactgtttcagagaacactcttaccacagtgacatctttgtaattgcctgtgttatttgtttatttgctttcagcttgattaataagctcaaacctggcgtcgttaagaagatcaatagactgtctaccccaatagcaggtttggtaagtaatgcgttaccttcaaaactagttttcccccttttcattttagttttttaatcaagaagtgacagctgtacatatttttgggtgcagtgttgtatcaccctcatattgtcatgcagtataatggattatatacttcaaaacacctattgaaatataagaaagtagctaaagaaggcttctccatctatagttactattgctttaaaaggagtaacaaccatcttttttttgttgtcgttgtttctagattcctttattttttccttgatattttccttatttacatttcaaatgttttcccctttccaggtctcccctttggaaagcccctatcacataccccttccccctgcctctatgagggaactaccctacccacctacccactactgtcttcctacactggggcattggatatcctcaggctcaagggcctctcctcccattgatgctcaacaaggccatcctctgctacatatgcagctagagccatgggtccctctatgtgtactctttggttggtggtccagtcactgggagctccagtgtgtgtgtgtgtgtgtgtgtgtgtgtgtgtgtgtgtatgtgtctgtctgtccggacaaccatttttttaagtgcccttcaacacttccttctgtttcagaagctgttgttttaacttgtctgactttgttggtttcgatgcttcagagtctgggtagcctttcccgccttctctcttgccctaggttgcttgggagctgcttctgttcttcctgcaactcaactctgcgtgccatgttttttgctgaccacagcagctcccgagagtatcaggagctccctggctgttgtgtttctgctgcttcgggctcatgtatcaggctcacttagcatgcggttcataagtgtgtctgcaggataatcaaggctcgccagccgtcttatggtgtgccatgtttcctattgatgtacggcgtctctaccttctgtgtcagggtcacatggtgtaaagaagcccgggggattctcaggggcctcttgcctttatttctattccgattatgttctgtggtgctagggatagaaccaagggcctttcactttctaggcaagcattctaaccctcagcctaactttatattgaagatttatttttttaagtattaagaaatattacacactttcatcatgtggttatttagatgtttaagacaccgtggacactaatgataacatgagccaatacctttgtgaaaacttctaatgaaataaaattgatgaagaaatttccaggatttaataagcctcgtcaatcaatactggaatactggtaggatggagaaatggtctagcagttaagggcacagggtcccagtgcccatgacaggtggctcacaatcacctgtacctccagctccaagggctctgatgccctcatctagactctgaggatgcttgtacttctgcacacctatcccctaccgcataattaagttaaaagcaataaaaagaaatctgctgacagaagtcagttaaaaagatctcaaagtatataataactggaatgtaaaaccaaactaattatctatgggttattcgatgctcttataataatctatttaatttatttatgtatttttttgtctttcatgaatttacatctgtggctaatggcctgggtaaccacagatagctatgttgcagttccttggtttattggaggtatcaaaagttcactaaaaccttgacagggctaactttggccaagtatttattattggaaaatatctgtctgggagcaagggagtgaagtgttgagagttctttgaaaattaggaatgcatacaaagttctcaggaccactgattccagtactgacgctttctctctataatcaggttgcctctagtctagatagatctatcatgaatgtgaagctgacccgtaatttgtactgtcttaaatttggttaggtaaaaatcccatctcacacacacatgcatacatacacacacacacacacttactctctctcacactgtattagtcagggttctctagagtcacagaacttacggacagtctctagatagtaaaggaatttattgatgacttacagttggcagcccaattcccaacaatgattcagtcgcagctgtgaatggaagtccaaggatctagcagttactcagtctcacgcagcaagcaggcaaaggaacaagagcaagagctagactcccttcttccaatgtccttatattgtctccagcaaaaggtgtagcccagattaaaggtgtgttccaccacacctttaatcccagatgaaaggcatagcccagattaaaggtgtgttccttaactcggagattcaatcttctggaatccatagccactatggctcaagatcttcaaaccaagatccagataaggatctccaagcctccagataagggtcactggtgagccttccaattccggattgtagttcattccaaatattgtcaagttgacaaccaggaatagccactacacacacacatataaaattttatatttttccaattattcaaagaataacataaaaggaatgtgtccctcaagtctttccagaaggaaatgatcagtttagtaaaataaatatgctttatatgacaacgacttataaagcaacctctacaataataaatgtatgaattgtattgagttacactatcttttccagggacccgagttattcttagatagtttaattttttgattttgaactttcatttcttggatcaattacaggcattttaaatgaaattagcctttgatctccaacacaccccaagaacctggaatgcttgaattgtggtgtttgttgctgttggctactgttgggtttattcagttttaagattgtatgattagatgcaagcacaaatgcattttatttttaagccccaaaccctctccaagtatttctatttcaagcatcaaaaattctctccagtttggattttatctttagaggccaagatggaatgcatttcctctgtactaaatagaatgcgttcctaagctaagcacaatgcagtgagcactttcactgggctatgggtgtgcaagagtgacatcagcaacagagtgggctaagcccaattgctttgaagccagcatggtgcttcatctgccagctgagacttgtcacaacggttatcacagaacatgtgcggtagagccccagcgtccatctggagaccatgaaaggcatgggcaagagtttgataagtgaatcctcagtgtgtggatgttctttctttgaacagatgctcggggggcctgttgggctgagaatttttctagcatggagtgttgtaagagaggacagagttgtatggactctgactttcatatcagggaaggagagccacacagatcaattaattagcagatgagcaagaaagtaccccaaggcgagtgtgcgacaggattaacacccagcagagcgacactgagctgctccttaaggagtttcttagggaagaggccggggtgtttggcatttggacaagaatattgagtaatccaggccagacttttcatgtactgagatggatgttcaccggacccaacacagtgactgtcgaatacaggagataaaagagtttgttaaacaagtagtgaaccatgttttcattgtagaatttaacaggttctagaatttagtctttggtggagtaggcctacaggttgaaggggcattgtccctgcccccaaagacatacaaaggttctaagccccagtactccagaatgtatctgtattttaggcatctgatttttacagatgtgattggtccagatgagatcatttcagcgtagagtgagcccctcatctgagaggtgtccctaaggaatggtgattgtgaggagatatacatagaggtagaataccatatgaagatgggtttgaggtggagcaccacagcccaaagaaccccagagattactgatgagtttccaacatcccgcaagggcctgaggagacttgcagagacttcacaggaagcaagagtttcctaactgatgctggactcctgccgcagaacaccaagacaataaataggttcatttctattgcttgttcgtattttgtggtgatagccctaggaaacttaggtacataggtaaatgtttttagttgataattgtgtactttgaagtaaatgtaggtttctaggatgtataaagagggcctctctagtatcctaaagttcctctgtgagacatttcagatacaaagtccagaccaggaaactgatgttgacacagtcaaaaagccttcttagttagatgatttgcctctgtgtatgtgtgtgtgaggggggggggagagacagagagagagacggagagaaacacagagaaaaagacagacacacccagagatagagagacaggcacacacatacagagacagacagagagacagagacagagagacacgcagagaggtcactgtcaggtgtctgcctctggagctcttggtttggattttgccagctttcagcacaaggcttttctgagtagcgaagcctagagatgcgttcaagccaagccaggtgaagatagtttattttgaagatctatcagatgcctcttgtggtaagccagtgttcaaccataaacacgccagctcagcttacttcattcctgtgctgttctcagcaggaatcttggtttggcatctcttatctgaagttcagaaacttctcactggaccaggcctttctccctctggcgatcagcaatcctgagagtgagtttcttggagaaagtagttgtttgggtagaggggagtgccccaaggccttgctttcattcagcagaggtttgaaggttgaagtgtgttctgggaagggtgtttgtgtaggggagatgcaccaaatatgtcaactagtgacaggacttctgggtgaaaatgtaagctgagaaggtgtagtgtttcctgtctttccatgactccttcttaagtcttttttagccatactttttcagcttgtgggagctatgcattacatttgtttagtttttaaacgcaaagccccttgtacaaagtcccttgtagactagcctgtgagcaaaccatggagtatgttctgagctaggaagagtggcaagagaagcaactgaaacattcatgcaattgctttctttagaaggtcagagaatatgttctcttatgtgttctagtgataaggttggtctcacctaagttttaaatgtgtttatctttaattaacgtgtgtgtgtgtgtgtgtgtgtgtgtgtgtgaggggggcgggctcatacatggtctgagtatggacttcaaaacacaacttttactagttgtcttttgcctactgtgtaggtctttgggatcaaactctggcttgagggcaatgacccttaattgatcaagtcttctttcataaacaatcacattcttcctatttcttctctgctttctattaattacaaaactgtttaaaatagaaaaaaaaaaatctaactaactaacccaggagttagtccatatcttccaaataactatgtggcgcttagtgtgggtatgttcaacgtaccgaaactcaacaccaacaatgtgggaataaaaaaatgttcaacaacaaagtaaaaccccaaggcagaggcaagacatcctgatggtgaaaagagccgctgaagcagaataatgtttaccatcggattgttagcgtacaggaaacacaatatgtggagaaacagccaggaagttgttaaccctgagtccttcagccatgtagaacacctgacaatgtattggtgtataaataaatccagttgtaaactgtaagtctgtaagtaaatcaaggtttctccccctcagcatcactgacctcaggggcagacaatactttatgtagagctctaccttgcgcaatgaactttgtggttttttttttttttttttttttttggttttttgagacagggtttctctgtatagccctggctgtccaggaactcactttgtagaccaggctggccttgaactcagaaatccacctgcctctgcctcccaaatgctgggattaaaggcgtggcgctaccacgcccggccgcacggaactttctttagtggcattgcagcctctgagactgaccggaggataaagcacttttctatcatttgtgatcactaaacaagtctgacattgccactcacccctaggagataaaaccatccccagttgagaactacttagctgaagaagcaagatggtgagcaccaggcttttcctacaaggatcatgtgaccgactctgcctgaggacttcacctccccctcccttctgccccttttccatttcaattgtgatttccctttggaaagaagtggtgcttcagaacatgcagccggacttatttgcttgaatatgtgggctccatggaaaaattcttggtgtgtccaaatctgtttgaaagtaggggctgaactgaacctgcttggtgtaaagaattacctttgtgctcttggctggcatggggctcatccttgtaatcccaggactcaggaagttgaggcaggaggatcttgagttcagccagggcctgcttaggctccatagagggtttgaggccaacttcaaactatctagtccaatagtgttaactcttaagggcagaattgggccaagggtggcattgaagttgagaaggcagactcctcattggaggaaatgggcagagatcccagctagtggatactgttgggtgtgttcacttctcttgcctgtcatggctggtccagggacagcgcaggcccgggtcctttctgactgctgttttctaggtgagttgatgtgtgcttgtgtgatgtcacccttatccatcactttcgtgatggtgtgacttagtggagcctcattgtgcctgcctcagcttgttcttttccagaagccgtgcaaacttgacctgggaacctgctgtcaaggtgacctggctaccttgctgctcttaggtgtggactgactctctgtaccaccacccacctctttttttttttttacttttcaggaaagagtgaaaatctgtaggcaatgatgcttttgtttgtttgtttgtttgttttctcctacaattcaagaagtacagatataatgagctaaaggaaatgaatgcccctctcctgcaaacaactgccttcttaaggaactcctctggctaaccactcacctgtttggggctcacaggcattatttcctcagttataatgatcagatgcattcatgggcatactctagtgtttaaggacagaaaacatcggaactggatgtataacaatgtttccctagcatatctaaggctctgggttccatatgttcctcagcaaatctcacaagcaatcaaacacacaaaacaaaactaacctacctcctaaccaacctacggaccaaccaacccagaaaacacatcagagcctaagacgtctacgtgtctatagagtagcaagatgaaacagttacttaggatccagggatctgtcctctcctggggcatcttttgttttctgctgattttggagatgactctgagttctcagttctacctcagaacatgtggaaagtgaattctttttgacttgtgcatccttgcctgtttgattgcaagtcaatatgactagtaattctgacagctgtgttcctcatcttccatcttcagagggatagagataaacatttatatgctggggaaggtatggagagggagacagccagccgccaccatgatgggctgtctgctcatgctcagctccgcttcattctcaggcttttatttcaccacaattggtaattagtgaaggttctgtgtgtccatgaggtttcatgctctttcaattttatttctctcaaatcgccaccatagatcagttttatgtctattgtatcagatcttgatactccattgagttaaaagatgaatatctctgtttctaactcatttccaaatagataatgaatattagaagatattaataagattgattaaaatagttaaattcgcataatcatcatcaccatctattatgttggtttttggaaacacaagtccagcccttgctgtcctgaaacttactctgtaggccatactggctctgaactcagggatccacctgcctctgcctcctgagtgctgggaatgaaggagcgcacacccacacctggcaaattgcttcattattaaactacaatgagcaatatttcctgagggaccacaaaccacactccaagtcatataactagcttaaatgctaaaatggctctattgtcagtcacattcaaaacagatatttacttatttctcttgagatagtgtcataatgtagcccaagctgtctcaaatgcccactagcctctcatatactgatattcaccgtttctctgtaatcctagcaccaataagtaaagctctgggtactccatcttctatggaaacaatataatagtagtaatattacaatattgcttactcatgtaagaaattacagcataaaagctaagcatctactaaaaatgagatgaatgaaaaatgttttccgtggtttcatgttaattgattcattttggtaatgatgtttccctgggattgctggggattgccatctatgttttgaaacagtccctgcatcggatctattggccagggcatgtgtgacgccatcttgttggtaagaaaggttagctataaatgcgggggtgcctgagcacttctagagaggtggcgtatgaagacggccatggtgggtgacctgcttacacagccttctctccttgcttctctcctcctttcaataaaagacaagagtcatcagggatgaaaatttaaaacttgccgtcaaccttgagttgttttatttatatgtgtgtgtgtgtgtgtgtgtgtgtgtgtgtgtgcgcgtgcgcgtgcgtgcacacaactgtggaattggagttggtgtctgcttccacctctctaggctctgggcattgacctcaggttgccaggcttgcagggccagcacctttaccctctgagtcattgcataggtcccctgagttgttgctgatacccagtgatgatgtagtgcagcaaagcaggaaactcctgtttgatttccagccacaatttcttaatcacctgctggcacaagttcaggagcatttcctcagatctcccaaagctgctcggtttttaagtctgagatccacatttatatgtcaagtttctgccttggggccagcttcttttttctttcataactttaatgaattagaattgctaaaccaatactctatcttgtggagttgaaaaataattaatccaaaaaaaaaaacccaattgattcagtatctgagtaggattatctcatagtttcatccaaatgaatttggaacagtcccttttaaggtaatttgcgctatgtaggaattgcctatcggggagcaaatgaggttgctaagaaatagaatggaaggtttgaaaccaatgtgaggccctggtcccttgataagtctcaggaaggccctcccttcctggaaacatttactgaatgcctactgtgaggtcaggccactttctcacacttgggacaaggctaccaagaaggctgagacaattactctctgggagccggcattccctgcagtgaggtgagagccgcatcaggatactgcagatgaataatgtttgatacatgctaataactccagggaaggaaatacaagactgccttagttgccagcagttatatggggaaagggatgtaagtggataatgatgctgaagaggggcctgcgtgaagtggctggaggactgatcttgggcgggtgggtgggaggtttccagatctaaggaagagaggagggtatgtttataaaagacttaggtctgattggtgtgaggagaggtgggtaagccagactgcggaagcctcactggcatagttgggagtctaagggaatattctgagaacaatgtaatttgttgtccccaggttagtggttcctatggttgtgggtgcacagtatccgtgagtatacatgagaagcagtgcactgtgtgttttcaatgggtggcgtgtgttatctgaataaagctgctagctcatgttagtgcggctactcgaggagcagactacaaggaacttaggaagagagaaagccggttgaatagttcagttacttcgatggcttgttttctgtattagcttgactgtgataagggatgcctagatatttggtcagctgtgattcctggcattgcttatgagtgtgtgtttagatgacattagcctttgaatcagtaaattaaggaaagcggatgggggtgggtcttatccatcagttgttatctatcagttgctatccatcagtggaaggctgctctgaagaaggctgacctttctatggagagggagcttctctgcttgcctgagcagccacacaggctttccctcctttggactgaattgaaggatcagtcaactttcctgtcctccaggtcatcctactttggaatagtaccatggcatggactctcctgggtctccaggttgggacattgcagcctccactttaacatttattttttattactttatttctttattgtgtgtgtgtgtgtgtgtgtgtgtgtgtgtgagttcacacttgtgaaggttagatgacaactttcaggaggtgctgcttttctttgaggtaagatcattagcttgaactcacgtggttgtcaggtttagcagcaagcacctttaccgcctgagccatttgactgacccaagaagtccttttctatatccaccctgttgattctctttctctggagagtctggatgggccactttatttatgattattttatgtatttataccactaatctttccctttggtgcctctgctttcatttaattctggcaagatgcatgctcccagggccttgggatagttgaaatggacgaaaacaggctccgtgattgtgtctatggatgaagcttgaatagctgctaaagaagtcagagtgtttaaatttatggaaactttaagcagaattactggcaatttacctcaaagtttgtacttgccctgtttgtatttgaagaagaaggtcgagatgagaaaacacaggaaacaatttaatttacagatgtcggaaccctaaggtggggcaaatgtggtagacctcagggtctgcaattaatggtcggaggttgggttgacaagatggctcagtgggtaagggttcttgccaccaagtctgatgacctgagttctactctggggtccacttgatagttaagttatcctctgatttcatatactgtggtgtacatgtgtacacatgcatggacatgcacatctatacatacattggcatgcatcacatacacatgtgaataaaacagacatacagatagatagaattttttaaatgcactatattccagcttcttgacatttttatatcccagtcagtgtcttgacactttttttttacagcctttggttttccccctcttactcctgaataagaagtgcagaattagcttgttatagaagctttgtcttgttagggagccactgctagtccctccttataatacctgtaatttatggatctgaagacatctatctgtcctacaaatgccatctgctgcagtgcctcacccacagactgcctctctcctccatggaactgcttgctgagccttatcttttcaccaatgcacttccaaggcagagaacaccaccgagaaggaagttagttagctccagggcaagaaacggaagaccccagccatgttcacccagaccccactgtgataggttccacagactatcttagccactgtactatacctgtgaagagacaccatgaccaagacagctcttatagaagaaagcatttagttaggggattgtttactgtattagaaacttatttcacaatcatcctggcaggaagcagacacatatccactacagatggaactctgtatgcatatgcaagcccatactattctcaccaagaacaggttcagatctggttccaaaaccagagagggaaatttagggcatggtaaaatagcaaaagaaccagaacaccgtgagttaggactctgcacctgaatactcaggtctctattctaaattgtaacctgaattgcttgatgaacatatctggaaagggtctcacctagagagagcaagtagacctggaccaaccaaattttttttttttttttttttttttttagttctcacacacttttaatccttctggatagaattcttatatacagttttggggtgggtaagggtctgacagcaggtacttctcattggtttgatctgagagatttggagaaaccttatttgcatgtgggagggcttagtgctgctcttacatgactgatgatcacacacctttttgcagggagctgtaggaggctgtagctgcaacaggagcagggggctggggagggggagcccaagaggtatggtcgaccaccttctgtctcatgcaggtggaaatcagcacccaccaggtactggggttccagacctttgctcgaccagggaccatacagtctgtgcacagcccactgccctataacgaattaaaaaatagttttctttctcctgtaactcatcgatggagcaaatgtttcaacgttccatttagtgtgttctattttttcatcaattaaagatataaacatttatatgcatgtgtagagtattagtaatgttgatgctattgatttttgttactaatattaagacaaactaacattaacactatacaatactttattatttgttttctaaaatagaatgtgatatagtaaaattcttttttccttttatcattatctatgttagaaaatgtgtcctatttaaaggattgcaacttccatattcatttattattatgtaggtggtatgtatgtatgatattatggaggtcagagaacaaccttttggagtttgttgtcttttccacttttatgtgagatctggagatcaaactccagtttttagtcttgcatagtcaggtgcctttacctgctgagccatctaacaggttctcttttcttttgactaaatgcataggattcaggacaaagatcagtagctgttgggaatttgttctaaggctttcaattaactcaaacactgaaggtctgaatttctctttctttgttggatctttgtgtgatttaggtatcagagtaattgtagcttcatagaacaaattgggtagagtaccttcggtttctgttttgtggaataatttgaggatggaccaacccaatttaaagcaacaagttgcacaacaaacattccctggacacctcaggtctggatcacacaatcttggatcaatatggcctaaaacagttgattccacagctgtggcaaggcatctctgcagctcatctgcagctctgtctctgatttagggacagtcctggctagtgcaatgttaactcgagtcctctgaaaggaggagacttcaattgaggaaatgcctccgtgacagccatctgtaaggcatttattttctcaattagtgatcaatgagagaaggctcagactgtggtaggtgatgctatcccctgggctggtggtcctggattctttcagaaagaaggctgaacaaaaccacagaagcaagccagtccaacctctccatggcctctgcatgagttcctgtctccagcatccttccctgtttgagttcctgccctgacttctgtcagtgatgctgtcttagaaagtacttgagacggtcattagcattttagtgctctgactttcctgttactattgctgtgatgaaacaccatggccaaagcaacttccatactgttgttcatcttccaagaagtcagggaactcaaacagagcaggaacctggaggcaagagctgaggccatagaagggtgctgtttaatggcttttcccccaaggcttgcttagcatgctttcttgtagagagccagaccaccagtcttggggtagccccacccacaatcagctgggccctccctcatcaatcactaggcaaagtcctaccaacttgcctacagcttgatcttgtgcaggtgttttctcaatcaaggtttccccttcgatgactatagctgtgtcaagttgacataaagtagccagcacacgtttcacaagtgtacaaccacgaagcgtgaagatgtggctagagtcgtgttatgaatttctgtgtgagttttagctgacttctttcttccctctcctttctttctcctgttatgatgttttgcatagtggtgtgtctgcctgatttcctgattctcattgagtatcagcaacctcattttctatagacaggctttctctagctatagattagtggatgtgaccatagtttagataccttgaagctatacattctatctagcattaagagtgaaagtaaaaagcacaaagatacatgaagtttttcccgttttctgctagtgtagactctatgtgttaaaaaacaactgaaagtttatattataataagctataagtgctttgccagtgacaattcctgaacctttgccctgccaattcctacgacccttaagttttcatcaatatttataggaaaatgtcttatatttggctgaatcatgataattcagtttgtccaatttaaatacagcttgaaaacaaattaataaaataaagatttgcaaaaatgatctagatgggcccaactccaaaaggacatttatcaggaatcgatgctaactacattttagttggaaaaaaaggtcatgggaacccagaatgattttatgtggtctatgagcttaatttatattttaagcctttatctacgacactgacagatttataacttagattctcttatagccattttatttttgttctaaatttggccagctgtattttacatatcttcctgtgaaatgtgagtgagggacacctgtgtattgctggagcatatgatgccaattagctgtgcaatttcaatggcaacaggaaaaaaaaatcaagcctgtaatacgtgatgttctgggctatccctccgctcactccccacttatgtgccagaggcgctgcacactatataatcacactacaacctcttttctcaaagctctcactaagagcccaccaccctacttttctgaggtaagcattattaatgaaaccttggcaataatttagcaccttgaattccagcctggagttaccgagaaggaaggatctagcacatagaacctatcttaaaggaggtttaaacactgctctagtcaaagtggttctcaggtggcatgcattgtaaaccgtgaaaactgggaacgtttcacaaggccaagttaggatgggacagaggttgctaatctgcttatgtggtccaggtgggcctaatgcagtcccaagcctgtgtgtagagatagagggctggaggagaggctgatggactcagtctaaggcagctctctttgacgacgaatggacaggagactgagtgaaggtgatgtctgccattagaaggtgggaaggtaagacaagtttctcttaggatgagggaccataactagtagacacatggatttcagcccactaagagaacttggatcagtgcttctcagtctgtgggtggtggcctaagaccactgggaaacacagatatttatactatgattcataagagtagcatgattacagctatgaaatagcaatggaaatgattttatggttggggtcaccataatctgaggaacagtattagggggtcgcagcctgaggaaggtactgaatgacagaactacagaactcagtgttcatctgagttacaatgcagtgcttgattaccagccccacaggataatgtattaatttgttgggactggtgaccttgggtacctagtgttccttttgtctcaagcacaggcaaggagactgtaggcttttttgtttttttgtttttgtttttgatgagaatttgagtaagataatatttgtaaagtgctttaatatgctaccagatgaaaagtaaaagctccacagtaggaaaagtagccagttgaaggaccaattaactaatacaagaactgccatgcaagcagagaacaaaggacattaaagagagaatttgaccttaggagaggctatggggtcttggaagacggactgccgttcagttggctaaggcttatgttagttaggaagggagtggatgtgttgtgcaccatgtgtgtggggtttggagcagtattttactaggactgacactttagtaaagtgagtcagcccggagaagcagcaagtcctggggctaatgctctcgggtgagtgtgagtgtgtgagtgtgaggtggggtagtgcctagcagaaggaagtactcactcccagctgcttctcctgttgctaggcagtttccccccaccttacatttgctccataaaagctttttcttttggattgtgatgctgagctttttaaagcagcgatgtgctgtactttggagcccaggatcctcttagcaagcatttcagcattttagtaaaacaaacaaaaagcaggtgagttttagtgtgacttgacttttaatataaagtgcaatctgaacactgtgtaaaactgtccccttattcatgtgtccattggataaagcctgttcctgctggtgctatatccgagattaattaaacatgtgggcaaacagcctttagcagagcacctgaccctttccccttggcttcctgttgccccgccttgccagccctctcctctgccctctcttgctgtggtaggttttgctcttgctctgccaaccagtgctggcaaaacctcagctgccacgcagctggcattgcagccgaggagaatctcctgtccctctgtgtctcttggcacttcctctgccctcccatcggtccttaggtctgcactcttgtgtcacaaaactttaatcactgctcgtggcctcagctgtgagcagagaccaagctcttttctttgagaaccaagaaaacttaaaaataaacagaacactgaagcagtgcatggtgaggtacacccgtaatctcaggcaggactcaggaagccaaagcgggagggtcttagatttgagccctgcttgggctctgtaatgagatcttgtctcaaacgaatcaccaggaaaggaacaagactgccttctttcctcatcaataagatgtaaagctggatttctgatgactatctacatacacagttctcataaatgtgtgtatttgttgataactgggtttactgtgtttgttattaactaagcaatctaagccagaagatttagcatgatttacctcacaaattaaaaagcaagcattagtggagcaagatgcactcaactctgaggaaggagaattaacatgagtttaaggtcagtctgggctagctagtgaatttgaggcaagtgagatcctctctcaaaacatctgaaaaagcagtaggactgagtagctgaccaaattgtggctcaactacttcttggtgggatctgtatatttgaaacgcaaatttagactgatattcagcggttttataaaaagaattttgatcactgtctatatcatgaaaggagtcttcaagtaatttcgaggttggtatcatatggactccagcatctctagggatttcagtgcccagtgaagaactatttgaaaatgcgtttgtctaatcaccctctccaaactgatgactggtggggaatctctctctaacatgggctgtgcttgagaaggtctgggatgaaacccaggtttccatgtgtctctcaggccagtgacagttttgtgaccttgctttatgagaaacagctaggctgtttccctgagtatcagtttcatctgcatggttcctctgtgtttgcgtggaactgactggccactggtgactgcagaacaccagtggattcagctgggtgcctctgcttcaatgagggccccatctctgcatcacttatacttgtgagcatcttgagactttagcactgcatcaaaacgggcaaggaattagggtttctaagtctctgagcctaacctggtgcatatccagtactcctatgtatgttaaaaggtttgtttacaatggaggagttagagaaaggactgaaggagctgaaggggtttgtaaccccataggaagaacagtatcaaccaaccagaccccaccgcagagctcccagggactaaaccaccaactgaagagtacacatggaaggacccaaggctccagcctcataaatagcagaggttggccttatctggcatcaatgaaaagagaggcccttggttctgtggaggcttgatgccccagtgtaagggaatgccagggcggggaggcgggagtgggtggttgggtaagtatcatcatagaggcagagggagagggacatgggctagggggtttctgggtgtatgtgtggaaacctgaaaaggggataccattggaaatgtaaatcaataaaatatccaataaaaaacgatgaaaaaaaaaaaaagagagactcgtttacaataggcttgcgcctcctgcagctactttaaagccacgagaagagtgctgtgttaactggggagtaggactttcaggtagtatcttgtgggagctttggattaagcttcggagctttgtaggttctcaaagcagatcctgaagcccagctttactctcataaattgcctaggatgatgagcttagtcatctgtgatgcatccctttattagtctataaaaccctctggttccagacagacatttcttgaccttatctactcgggaagtattgacagaaagggccgaaggtaatgaccggtcctttccatgactagttttccactgaggaatgtggatgatgtgatgtactctctctgcccttctgaagtcagcacacttagtagttttcactgagggcatttttgttagtttggattcttcaagtaataataagaatgacataggataagagcctaggtggtgtagtatagtttaattaggctatagatgtttgttaatggatggtttgatgtagaatagaaaacacatagaaatacttttaagaatgtgtgaacattgtgtgtatgtgtatgtatgtgcatgcacgcatgcgcgcatgcacgcacataggtacatgcttgtataggtcaaaggtgaaccttgagtgttccttaggattctctccccttggaaacattatcagttgtatttatgcctgtaggatgcatgtttgtatgtatgtaggatgcatgtttgtatgtatgtatggtgtatgtatgtatgtttgtatgtatgtgcatatgcacatgccatggcatgtatgagaaggtcagaggacaactttatgaagtcagttctctcttgctccctcccttaaatgtgttctaggtatcatactcaggccagtaggcttgcatggcaagtgcttgtttctactgatgcatctcacataccgaccttttcttagagatgggccttctcattggcttctcctcactgagcactaagccggccagccatccaggcccaggctgtcctgtggagaggctacacgtatgcaccaccaagtccagcacacgtgggttcctggggtcagacctcggtcctcctacttgaatggcgagcattttatcaactgaactctttcctctaggcacacagaatttaaaaagagcatttcaattttaaacacattggcgagggcacctcttagaaacaatttctcaagaagaagttcatataacattagtttcaaagttaatcattcagaggtatttatagtaacatgtaatcaccgaacatttcaggacttcaaagttaaacctctggatcattaagtagtttctccctgtgtcttttttccctccagcccctgcagccatcagcctgcattttgtctctaggggcatagccattttggatgtttcatttcagtggcggtgcatgtgacctttgagagctgctctgggagtttcacctaacctgtagaacgtgttcgtattttgtggcttttttaaatgggtgaacatcaatcttgaatgctgacgttgcagcttgtgcatccatcggtctgttcgtggacatgggaactgttttttgaatctgtggcttttggtgtgtgtgtgtgtgtgtgtgtacttgtctgatcatctctaatttgggggggataggaggtgagggcacaggagtgagtgtgggattgggctgagcaagaaaacagtaggatcacaaaaggagagagtccttgtgtagactgatagcttactaaaacaggtgtgactgtttaacttaagctccggacagtcatcccaacaatttctatctctggaaaaagaacaagaaaacattctaaagtaacaagagaatatgttactggttaaggacttctagaaggagagaccttagtgaggaacaaatagaacaggctacacatgtgatacaacttgcctcgcctctggcctaggatttgaatgtttgtcagcttcatgttgtgctcagactccatcttcaggatgtagaatgaagacacacccacatgattgagatataaacattttacacacgggacagtaatgggaccagttgtggcacaattgatatattggtctagctagatgtgagagctatttctggactcccccacccctatagtgagcttcctaaggggtggggtgcagtggaggaggagcagtgatctggatatggggaatctttgccaggagccagtttcttagtcatttatttacttttttgtcctttggactctatggtcactaaaggtacttcatatcatcgtcaaattctttgagtggttttcattcctcaggactgccatgcatcatagcaacccacacttccttctggaaacttcctctcttccccgtgtttcataatcctcttcatgttttcataaccattcttcttctctgcgtgctagattttatttcttgccttttaaatattgtagttaattgggaatcctcttctcctttcctccctcctcccccctcccttcctgtctgtctgttctggaaaatcaatccaagacctttgtgatgctattcaggtgctcttctgctgagatataccctagtgttttcttccattcctctctactctctgatttgtccattggagatggggtattactgtgtagcccagctgagctcatgatcttactctcccaggaaggctcatctgcagtatttagtttaactactgcccctactaccaacgcatgctgactccttaaaccaactccctaaaaacgaacaaacaaacaaagcctcctttcgaacagctcttatatttcagagttatttttatttttacgtgtagaggtgttttgcatgcatgtatgtttgtgtaccatgcatgtgcaatgccctcaggaactcagaggtaggtaccagctccctggaagtagagtttcagatggttatgagctttgtgttggttctgggaaccaaattcaggccatttgaataagcagtcaggccttctaacctctgagccatctctccagctctctttaagttatttaagatcaaatatttctcatgggttctgaacttgatttattgctctctggatatcctgcacagggcatctgaagttccgtagctctatatacttttatgctccaactttgtgatgtttcatgttccttattgtaagagtgtcatgatagcctgtttccaaggtgattctcctcttctgacaaccactcctgtgtacctaggaattatacccagtcagctaggtggtctaggacagacttttcacttctgtaatgagaataccagaatttgggagtcaagtctggattctgttctttgattatagcaaaaccccagaggggagagaaagggaggaattgaatgaaaagcaggaggcacaggggcatcacgggattgacagctatccagaatcttgagtcagtatacgctgctggagttgagacatagttttcaggcctagattaagttcagagcattggcaggaaaacaaggttaatgatgaagttgagggtgtggctatgaaaccctttgagttcctagaaagatgcaaggaagtgcctacaaccattcaacccagcaatagggtttctaagatgcttcggggtgttgtccctcagtcttcctggaagcctggaataggggaagcttcttcggagttccacagacctggctttctgaagctcagtcagattcacagtggagaggtcattccttagagggaacaggcactgccagccactgcaaagagatccgaaatctctagtctcccccagtgtctgcaggcaagatggcaagcagactgagaaagttacactgatgctcacataggcaactctgccaggaagaaggaagataatgtttaaggttaaatgaagagtctggagggaggagccagctaactgagaagtcctcatggagaaacttccagcatttccagggagaggtggctctatgtgcctttggtttctccacacctggacctggagtgtggaggatgcttggagttcaggtgctcccccaccagctgaagcctcctcctcctcctcctcctgttgtgtttgccttcatttatctccatagcaacactgtaaacagaagagagctatttagataccattaaggtttatctttgtttgtttgttacctttggccccaaaactgtctgcattacacatatttaaagcaggctctcgggacaagacagactcccttttcattcactggcggttgtattgagaggacactgtactcaaaggctctattccgggaagtacatttacccaatttcttacacacctggagctgactttgatgatgatctagattctgatcttgacaaaagataaggatttgggggttgtggtccagtgagatggctcagtgggtatactggatagtctcatgttactagttacaaaaggacggaccctggattaaaaaaaaaagtctctgtaagatctgtttgtaggcaagcttgtatgacattttcttagttaatgattgatgatgacggtggtagggcagtctattgtgggtggtgccatccctgactggtggtcatgggtccaataagaaagcaggctgagtaagctatcaggagcaagccagtaagcagtacactccagagccttggtttaaatggttgcctccatgtttctgccctgtttgagttcctgtcctgacttccttcagtaatggaccatgtgtatggctgtataagccaaataatttttttttcctcccccaacttgcttttgctcatggtatttcatgacagcaatagtaaaactaagacagtgggtaaaggcgcctgcaaggctggtgacttgaatttgatcctagaacttctggtagagagagagacctgacttctaaaaattgttctctggtctcttccacctggcatgtatccacactacacacatgcaaacaaccccctaatagacacactaaacaaatagttaataaacagaatttgcgaatccttgagagagagtgtgtgtgaattttttatatgagtggggtttgaatcactggtgtccatacagtgaaatgctggaccagtattcccccatggctggatgattctcgcgctttatttatgtccttgtgcagtcttcactgaacagggctggtctctgtaacagtagagtcctgtagaaacgatggaacaagactttcagagccaggacgtgcggcttccactttgctctctctcagatcactggctctgtcagctaagtcttctggaagcatcggtttgccctgatttgccaaccacatgagtgagttacctagggaacagccaccacggcaggccaagctttgcataactgcagcctgagctgacatgccagttacagctctctaggaagggtcctccacctcagagccacctacctagtcaaggcggtccccacattctagactctccagaattgctgtcttttgtctgaggcagctgtttcaggatcttctgttttacagtttggcataagtaacagaagttctgcagtgagccagtaccaaccggagaactttgtagaactttgtggaattttcatcctagtttcttagtgagcaccactattactaatgattagtcggggttatggtgtgtgtggcgggaagtatgaacatctcaatccttctactttttttgtagtgtttgcttttctttcatctccacagaaacattgtaaatgagaaggagctacttgggtaccactagagtttattattattgaagttattattattattattattagtagtagtattttggtttagtttttgaaagttacctttggccctgaatgtgtagggatcacgtgtgtttaaagcacgctatttgtgatagggtgtcttttgttgagctatagaatatttgtatgaggaatcagtgggctctgacactcatctccttgcagacagaattgcctgtcctttgtaatggttcgaagatctgtatgcactcactatgtggataaagaaaatggggccagaaagcataactaatctctctaaagctagtcctggctcccaggccaattagatgaggtagatttccatttatgcttttttgttgctgttgttgatgtttttgttttactttactttttttttctttttccttttttttttttttttttgagtagtttctagtgaaaatgactctacccagtaaagactaaaagccttctttttattatgctgagctgggtgtggctgcttgatgctggaacagacatgaaatttttattttataattttgtctatcccctgaggcaatgctccacttggatcctttgaaatggcaggaaataaattaccagtgggctccagtccaggatgcgggatggaggttccaattctgattggagcagacctcacttccagtgcgtaggccatgtgtgagtttatataggacgcttgtctgcttttaaaaccgagaaccgctaagccttgaaaacagcattctgctttgtggctgataaaaaaaggttttactcaagcctaagatgtaatcacaccacttgtgttctttccttgaactttgttctccatggagtagagtcactttcgatttgaagtggtttctctctaaatacttagatgggctttgaggaatgtgtggcttctctcttatcaacctgaacatttcgttcacaaggtaagtgctattatgtttttgtaaaatatgtggggtgtgtttactctcagtttcttaagattattctgtttgattttgttttagtatctacctatctatcatttatcaatcaatctatcatctatctatctatctatcatctatctatctacctatctatctaccatctatctacctacctacgtatctctgttccaggcaccctgtttgaggatttgtatgttttctaggcaagcattcttccaactgtactatattcacatctgataattttatataaatgtaagcattcagagccaaattaggcagatatgaagatgcataataatttatttttacttttccctcccccaaatatgagatttgcttcctgttggatatgagatattgtcttaatgagatatttttgttgtctgctcttctgagagtaggcattaaaattgttaatttgtgttttcaaataattacagataacctagcattcagaaattgtaaacttactagtcaagataccattgtgttcctaactggaattttgccaataggttatcactgtgtgtgtgtgtgtgtgtgtgtgtgtgtgtgtgtgtgtatgtgtatggagattagaggtcaattttgggtgtcttcgtcagtctctcctcattgtatgtagtgccctcacctcttggacataatgttaatttaaaattaaatcatcttgtttaggctgctcaactttttacttagaaatttctttaggctttggggccaacttatttcaaatgaagcaaacatttcagttcctggctagttagttcacgatgtctttgtctgaaagcatcctggaacagccttcctcctccacaaacagttgttgttgatttctagtttcccttgcttccttggcagtcagtgttgcttttctctgggcacacttttttctgcactttcctcaagtcacctcagactctgaggaacttaagctggtgaatcggcctcttcctctctcattctttcggatatacctcttactgtgtctaacaccccaacttcgctgcctgcacatagaaagtactggcaggtagtcttggaccttggggagggaggtggggtgtggctccagggaggcccataccacagagccggtgttgccagccaacctaagtggacaagcatgtgccagcatgcaagcaagacattcccctacccacaactcccagcagagcaaaagcagagagtccacacggactcaccaggaactcagccacataaaatacttttttctttttcaagagctgtaaggggcgatgccaaagctaatcctggtaaccaaatgtgtgtggttgcaatgcagcgccctgaaaatagaacgcatcgtggtaccacacagcacgcatagcacagtggcacgcactggtttgtaagtggaggactggagctttgaaactagataggaggtcaagcttggaggtggaggataggttttcagttttttggaggcagctcttcagacaggtgcagggaatgagtaatacgccactccccaatggtccggctcagccaataagcaccaggcttctccttggtcggatagcatggtctctgtgcctgtcacgagctggatcagcaaccaaacccagattccaggtgtggtattccacagccgttctgtaatttgtaatcatagaaacagaacgttcctcctcttatttcttccctgccaacagtttctgggtgggtgaatgtcagtagctggagttatttttaaagaggtgaagcttgccgtgcgaagctgggaagagggcgtttgtttgcagagcagagctgacatcaaagtgtagattgctgctcactggctaggcgcttgtcctataacaggtaatgtttaacgtgccagtcacaaagatcacaggaacagtgtatgctcgggcataagatagcaccacctttttatgctctggaagacggaaaggctatacgtgttctcggactttttttttctctctctctttcgaatacacttatgcggctgttcttgccaccgcctctttggctgactataattggactttgaagttgcgaactcgtatcataaaaattggtaacctttgtctgagagcaagctcggctaagcaatcactttccaattcttttcacaggataacataaatgtttttttgagagcttgtgaacagattggattgaaagaagcccagctttttcatccgggggatctacaggacttatcaaaccgagtcaccgtcaagtaagtctcactggtgtgttttaaatgtagaataattgtatcatagctaaatgttatatatgtgtatgtgtgtgtgtgtgtgtgtatatatatatatatatatatatatatatatatatatatataggaggtttgcagcttaagtgaaaattgttgctgagaaattttgtgcttatggaactatctttcctctctctgtctttcttgtgtctcattccaaaatagactcttaaaaaatcgtcttgaggactggctcagagtgtgaagccttctgtaagtgacacggtgtcaggatcttgttgtaaatctctacactgaccagagtggcggcttatatttgaatgttttccagcctggccatgcttggttgctaatggtaacgctgtttattttaattatcaagcgaatttagaggctattagcataatagaaaggtaagaagggtcagttgaaagtagcttttaggtagttggacatggaaaatgacagggacagctggtgcaagcctccttggtcatatctgacaggactgtcttgcctagggccaacaaccttgtcagtggttgcttttagaataatgaacccttcccactgtggtagtagtttgggcaagaaggtaaaagtagagaggaactcacatccgtgggcgttctgttggagtttaggtggacagtagtgttcatgtgtgagtgtgtggtttcaggaaagttcttttaagctgttatgagatttttttccccctccagcagtctaatctgcatgcaggaaatcagtaataaaattatgttgctaggtaaatgtgacatagacgttatataattttgaaataatgcttaccctcttatctggcctcttgaacctaattaacatgtttccaaatgaggaaacacactctgttctacttgtagaaatagcgaaaatgaaaagctttgtgctctaaagatttgtgtacttactgtccccatagtgtggcttcagtcattattaaaatcaaccaggaaatcataaacagggccacggtctcatggggaaaaacaatgctacagatattttttgataatctgccctgtcttctaacagtctaacccaaaaacctcaggcagcactagttgctttaaaatctaacagtaaatatttcaaatgaacaacctgtgccacgctggcccacctcttcccgtggggtgttttctcaactccacagcgatgatatctgcctggaagagtcatctgtccacatttctgatgaatttgaaagtaccaatctgaagtcttgttgctgaaaatacttactttcactctactcaaggtccttataatggccattgaaaatgagaaactatttgtttaattttttttttcctacatagtacatcctttcctaggacttatctgggcaaagaaacttcagcctttgaaatagtttttccctgaagctggtgatgtgaattaagtctaagtgtgtcctcctctgcagtcatattgctttgaacctcggcagcctatacttgaggtggcttacggactgggtgaaacatgtttgtttggctcctgattttaagcgttgcatacagggcttgcctggaaccgctttcaggagtggttgggtctaaagtgttgacaagaaatcaggatctgggctcaaccttcagtgaaattaaattactgacaaagtgaaactggggttgtgcgaagcctgcagaacaacttgtttgagtggaaaccacaagcctgtcacagcaaggtgtgcctcgcttggtcagggtgagagagccgctctcagtctgcttgagaactctccatgcttgaaccttgctgggcttaaagtgtgagtcctgggtgtaccccagtgtaaggctcagtgcctctcagacaaggttgaagatcactggcaaatgactgcccttgtgctttgagaaagcccctttcattacgaggaacaggcttaacggaagacaaatgattgcttagtaaagaaaagttttagtttggattgttacataatacacagacttgtgtagttcaactcttgacctgtcattattataaataaaaggacttgatatcgattagatcggtggttctcttgtggaggtagtttttcctccctggggatgtttggcaatatgtggagacatttttcattgtcatagttgtgtggggtgcctacccagtgggttagagtgactctaagtgtcctgtagcccacaggacaaactcaacaggggaggatttttttttttctattccaggtgatcataatacaggggttcagaaattcccaatgtagacatagaagaccatctttgccagcaaaaaagctatggggactgaaagactgtgaccggacaggcttgtgacatagctatgatgtcacagcacgcttgctgtcatcaaataatttcatttctgtgttagttcagtatgcttatttcggtggcaaggctccttgtgagttgtctgagagcgtccgtgtgtgtagcattccgagattgtttgactcaactacaaacatttgatttggcagaaatgtagcaagcgacgtgattattcgaagtgcggtgctgttacggaaccgctcaggctatcatctcacggcgcgcagacgtaggctggccttgctgcatctgcaaagcagccatggtataccaagagaaagcagtagcagctggtatgctctgtgtggggaacaggaggtgtttagtctgtgggtggaggacgcatgtacaatggctacatgtacagtggctacagggagtgagggagaattgaagcagaggatcagtgaggacaaaagctgttcaagagctgctgtctctgagtggccggacggacccagcgccttggacattgcttttcagcagggtgtgccttaaaattgaatttgcaatgcattcctacccacagaacggatggagagcactcccggggcttctgtaactgcatgcactcacagatgatcgactttcctcctgggcttccctttgctgggagtttgaatgttttcacaatgcatttgaaagattctactcatcttggtattgtgtcttattcacaagtcaggaggatccatttatgtttatttttttgtccccaaagggttaataaataaacctaggattcgatctccatgagtggctgatgagggctaacccagtatgcagctgtgtaactttccctgcatctttataaccatttttcggagttatccgcatggaactgaacatacatattccatggggaatgaacattgaggtgcccctgacccagtgcccacagaggcatgccacagaacactgggagcacccccaaaacagctgtgaagggctttgtgatggtatcaggtcagaaagaggggtacacagtgactgattatgttagaaattaactcatcggaggagtcctagaatcctgtcttacggggctccgagttggtggcaggtcaggctcagcattaaaactttgcatgattaacaacttttgatttaaaaagtaaagctcatatttaaagcattgcttaaaacaatttcttcttttagcgtgtgtgtgtgtgtgtgtgtgtgtgtgtgtgtgtgtgctgtttgcctgtgttgtgagggtgcgtttacccatccatgcaggggtcgatactggtatcttctgtcagcttctttgagacagggtctcttactgtcctgaaacttgccaagtcagctattcccgatggccaatgagagcccagcatctcctgctttccatcgcccagggctggggttccaggtgcagggccctatctgtgcctggcttttatgtgcactctggcgattctaacttcattcctcatgctttgcccaggaaatactttactgactagtgagccatctccccgagctactcaaaacaacttctatcaaacattttaagttgcagatttgtacaggctgtaaacatgtttgttccccccagcccctcagctctgcagtctgtctggaatttaacacttcttcagatgcattctgttcataattacagagtggccgtgcttttgaacacaatatttcagtaacaaaatcatcttctagtatgagtttagtgctgcttttattaaggtcttttattatactttaaaatgtaactttaaatagtgctattttctggtttttcttcttatatattacctcagggtatagataatcaagatttttttttcttgccttaaatacttgctagttgccaaaggaacagtgattggaggtaaaattagtattaatatctaaccatcacgaaacttatgggaagctcaaaatgacagtccagatgttcagatctatggattctgaagccagcttgatttttgtcaccgcactgtgaagtcattaaggctcccagatggcactctggacaaacagtctgtcaaatggtggccggctgtgtttgatggtatatgtatgtatttgtagtttttttcaggtaggtaaaaataatatgagtacttttttatactaagatgattatgtcttacatgttcataaatgtttgtatgtgtgcccctatgaatatatgccatgtgtgggggtgctctcataggcctgaagagggtattgggtcctctggagctggcattacagacagctggtcgtgggcaccttggcacaaatgccgggtgttcaatcagggagccatctctccagccgccattaatgtttgtcctaattttaagcctggttttagattattattattaattttttatatgtttatcttttaaatgagtattttgccatctccatttttattcatttatctaaagcaagcttagcgctatccaaacttggatttgtccccagaacatggcaattttcacctgtcactgtgtgttactattttcagtgctccccttcctatcaactctagacaagcaggcagaaaggaagttcactgtgctctgtacatctgtgtctccttgctcttttcttcaggggacagcaacttactgagagggggacattaaatcatctgaaaggtctgtggtnnnnnnnnnnnnnnnnnnnnnnnnnnnnnnnnnnnnnnnnnnnnnnnnnnnnnnnnnnnnnnnnnnnnnnnnnnnnnnnnnnnnnnnnnnnnnnnnnnnnnnnnnnnnnnnnnnnnnnnnnnnnnnnnnnnnnnnnnnnnnnnnnnnnnnnnnnnnnnnnnnnnnnnnnnnnnnnnnnnnnnnnnnnnnnnnnnnnnnnnnnnnnnnnnnnnnnnnnnnnnnnnnnnnnnnnnnnnnnnnnnnnnnnnnnnnnnnnnnnnnnnnnnnnnnnnnnnnnnnnnnnnnnnnnnnnnnnnnnnnnnnnnnnnnnnnnnnnnnnnnnnnnnnnnnnnnnnnnnnnnnnnnnnnnnnnnnnnnnnnnnnnnnnnnnnnnnnnnnnnnnnnnnnnnnnnnnnnnnnnnnnnnnnnnnnnnnnnnnnnnnnnttcctgaactctgtcaagtcacaattcccttctttgtttattcaactctgcatacttatgtatgcattcactcagtgatcttagcatacaaacatggctggctcatttctaaatgaaaatgaaaaacctcttcaccatttcacctacagcatttacctggtgcttattgctttctgtatgttcttgactttcatcatttctagtactgactttgtatatgtgtgtgtgtgtgtgtgtgtgtgtgtgtgtgtgtgtgtgtgtgtgcctccctgctgagctaccagcattaagttgttgtttctctcagagtttcgtgctatgttctggcctgcttaaactgatcatcaccatgaaggcaaactttattgaaaaagagggaattttgttttagagaggtagtttgcttatttatcatatgaaaacattgatacagaattttctgacaggtacctacaatccacaaataagatgaagtttgcttgaccatttgacaggaagtcctacaaattcatagttgaatgcatggtgtagataaatccactggaggttgcgaatgtcagttcagtgcgtagagttcttgttgagcatgcacaaaattctaggttcaaatccccgtcagctgggtatggtgatgtatgcccgttatcccggggaggtgaagacaggagatgtgccagtgtttgatgtaatcccaatataaggaaagtggagacagaggagtctcgagctacacaatgaggagaagatgagcctgggctacaagatatcctgtcctcctgacacccagcaatgagagaatagaaacactcaccagtttctttgattaaaaaaaaaaagtacaatcatttcatttcttttttaatcaaggaactcttctaactggaggggacagagattttccatatgggacctctatgttcttattcatttatgtgaaaagtttccccaaatcacaaaactatttgaaaacaaggaacatatattatcccttttatcttttggtacccagtggaaatgttggtatgaaaattggattctgatcataatcacatcctgggtacttcaagagcacactgcaaaggtccgggaggctgattcttccattgtccagtttcccttcattcctatcagacgcaaagctgccccagcagcgccgttgctggacttctggtttcagtcacctttgacttatcatggtagggtaatgatatggcacattacaacacattctgaaactgcgcagcatccaaaagaggcgagcttatcacaccctcaccaggaggaagcaaagcagagggggaactttgaaccatgagtctttcaacgcagttggtggaaggtttagtaactccccctatccctgtataaagaatacatatttacatctagtgtgtacacaattacatgtttacatctgtgtattcacatgacctcttagaaacatggcctttctatgagtttatagtatgattatgtactgttctctgtctggtaaaatccgaaatgcacatttaagattttcaggctgggaaatacagtgggtatatagggtgtgaaaatttctgtaaagtttaagggcaaggaatagtattgaaagcaggtgttcctgggggaggtaatttcttatgataagtcacaaatgctgctttaataagacatttcaccaacatttacagtaagccttcttctcaaagctagtagcatactggtaagttacctgtctgggtttgcctaccagtacatagcattaaagataagggtgcctccctctctagccatgttgactgtgacacaattaaatgccatctggagactgaatccttagaaaaccgaccgttccctagtggtttgtttgaactgtttccacgaaacctctgggtgagttttgattacttttctctgggatccagcaataaaattcaagtgaagaagggtcacttgctgtgaccaaaagcctcttcgatgatttttggtgtctcctgagttgggctaactcttgtttgttgtggtaaatatttaatctcagtcaggggtttctaccctgccttagatcattcagttcccagataaaagacatacaacttttatatttatactaattggtagacagcactagaactgtggagatgtctactctctaagctattagtttctacttccctatcaataaccccgagttatgacttgtcatagcgtgcctgggcagctcttaactccaattggccagccctcatggccatgtttttatgactcacctattccatggcatcttctcctctctctcctctgtggtcctcctcagaccccaagcttgggaacccaaactctgcctacctctcttctgcccagctataggctgtaggcatctttactcaaccaatagttttaaattaaagagcatggttacatagcatcacttggtgcacgtaaggattccctcatccctggggacaaccagggtcaatattgagtattacatccacagcagcagaccaaacctcaacacttgtatttttggtggcctcagccaggtcacttttgctccctgtgacggatcagcttaccattgtgacaaatggtaatttcttgctcactctctatcatgctgtatgctaaattctagaactagatcactaaaaatgacagtggtaattcctgtttgcctgaaatctagaaggtactcaggcttggacggcaagctgcttcctgggagtgttgggctgctcaaaggaaatcagcaggcacatgtatggcgcctcgcttagcaagtgcccaataactactagagtgttattgtgaacattagcacaatctagttacctttttttgatcctgtgaaaatacatgtgcctttgagggagaaagtcagctctggctatttaaattgtgattgtcaattatgggtctttatttttctgaatttaggcaatctgagactcattgtttctactgggggtagatacttgactagatgtagtttaaaaatatttttatttaattctgtgtataggtatagatatatgcacgtgaatgtgggtgcgtacagaagccagaggggttggatcctcctggctgcatttccaggtgtctgtgagccatcccatgtgggtgctgagaactggttgctgatgcattccaagaggagggcatagtttctccagcccctttaaataatcacattagtaaagaatttatggtcagttaacttgacgtaatcactagagtgaaggggctgctgtcgtttctgtctcattgcatgtggtaccaagtggttgtattagtcagctttttaaaaattcaggtttccactgtatttcctgaaaatgtcaagattttaatttgcaatgatttccccattttaagaaagagcaaaccagaaatacttccacaaattcagatgatgccatcacagcacatccaaacccaaacctttgcattatttattggctcatttttaatattgccttctctccttcccattttcgtgaagtgtcattttggacgcagagagaggtgatttacacagatgagatcagaagatattatcagaaaggatgctggagggcttacattctctctcttcttggaatagctgttcatgatcccgactaagctcaagagtgcatttcaaggcagttgtccactgagaataaacttaactgctcctctgggctgggccactttgtcccatcaaagtgtaaaaagccttggttatatgattggatgtgaatttactcacagacatcaataaagtgtagtagggttaaggctgaacaagcatggaggttctagttttacttacaatgagaaagtgaaaaaacaaaacaagaaaagcataggagttgtggttttctattgatttaaaaaaagatttatttatttttatgtatatgagtacactgtagctgtatagatggttgtgagccctcatgtagttgctgggaattgaatttaggacctctgttcgctccagcccaaagatttattattataaataagtacactgtagctgtcttcagatgcaccagaagagggcgtcaggtctcattattgatggtttatgaaccaccatgtggctgctaagatttgaactcaggacctttggaagagcagtcagtgctcttaactgctgagccatctctccagctctattgatattttaaaaatatacattataagatgataggttttttcttttttttaaagtacctggctaccaagtaataaatagaatagacaaaaaagttgttcgttgcttatcatttgtttgcttctggagagtttaggctaatgaagcagtaagcgttcaggggaaatttcctggtgtaatttctggcattctgggtgagatttggtggctgaaggcttcatccttcatctatcagacacacacacacacaccgttttgtgcctctcctaaagtgggtggaagatttgtaagcatcgagcaaacatgcacagtaccccatgcaaacagtgccagcttcactggagagactttcaatatgaaaggaaaaggccacctgtcatacaaatctaagtgtcacacactaatcttcccaaatgtgactggtatgatttttgtaatgttatcatctgaaaagcatatgaaagacatgctttgaaggagcacagctaagattagccagcttttcctaagctttaaaggaaaggaggatttagtgagtttgagagaaacacctgccttgaattaagcactgtttgcattaacccagcttcaattgttagtttacctagagtttgctctgtgtgcccagaacagttgggggagctatccctgaacaaaatttcaagtaccagggtttctgctgtttgatttcattgtaacaatattgatagctgccagcccaaaatgctttgtattttttttctcctcagttaactgagatgtggaaattctcgaaggaccggtgttcagtgtgcctgttcctaggcttcttttgcttcatcttggagagaaaatttctaaaaaaaagtgtactgccttataaaatgccactgctagctcatatgacatgtgacattggagagcccagattggtgcatttagtttttcaaagaggcgtagtctgtgactgggaggagacaatgtcttagtctgtggtctgttgttgttaggaggcaccatgaccatgacaagtcctatcaaaggaagcagttattgaggctgggttatagattcagaggtttggtccattatcagcatggagggcagagtggcagacatgttgctggagaagtagctgagagttctacatccagatctgcaggcagcagcaagacagccactgggcttggtttaggcttttgaaaaccttaaagcctatctccagtgaattgcttccctccagcctcctaatcctttcaactagtgccattccctgatgaccaagtactcaaatctatgagtttatagggaccattctcattcaaaccaccgcagacagtatgagcatcattattattagctgtaggtagccatagcatgcagcatcccagattactgagaagtgaccgtaatgtctccactaagaaatggtggagtggtggcgcacgcctttaatcccagcacttgggaagcagaggcaggtggatttctgagttcgaggccagcctggtctacagagtgagttccaggacagccagggctacacagagaaaccctgtctcgaaaaacaaaacaaaacaaaacaacaacaacaaaaagattaaaaaaaaaaagaaatggtggagaatcataactactttattgaagactatggcttaagctgtaggtagaccattgggtttggatgtgataccttcccgtatggacaggaatagtgtttttgttgggctgaggggctgggctagatttgtagtgaggtataggtgggggtactccctgggtcctcacctgtggacttttcctctgctacctttaaaacagcacccaatgaatacgtgacattcattatctatagattccaaacctatgagcagagaagataaacaacttaccttgtaccttgaacaaagaagagaaaaagcttaattaatttttggtttgggttgttaaggggctttgtcgtgactcatcgctgtgacctctaaggccagggtggattggagtgaggtgtagcaacaacatgaggaaatcactgtgtcagagggtcctgagcacctcagaaatgttgctgtactcactcaggtttcaacacattggatgagggttgttagactctgtcaggtggctcgctgcttgcttctaaatgagacacagccagtcactctcccctttgcttcagatgcctgaggggaactgaagcagaaagaagacaaacttcctcagcactgtgaccttgggcaaataatcaaagtttgggctttcagtcattggttgtctccttctgccgtgttgcctaaacagacttaaatagcattggaaattggacttctattttgctttcttgtgctgtgtgcctaacattgtcaaaagtctatttttagctgtgccaggtttaccctaactcaaatttgtaaacttgatcgacactcccacatcacacgcctgccaaatacctgtgcgttctgatcttcagattctcttcctgctttgtttttaacttacttcaagtggaaatagtaaaatgtgtcatcaaattcaagatcattgaactttatggttttctagttgtaggaatgttaagtgctaacccatgtgttttaggctgggtgaactatagttgagaaataaccaggtatttgaattttattgattggcttacataaatgtctttgtaaattcatatatttatgaatgttcaagcgtattgtttgtcatgatgatggagcagacctagttagtataaggtgagagttataaaactttactaatctaaattgccagggaccacactgccacactttgacctttgtagagtgaaatggaacttgtctaaaaatagacctaataaataccttttatttagatagttccttgtttactggtttctcactccattttgcttagctttttgaaaaacaacaaaaatttacagatccttttatctttaacttcaagtaaactgacttctgaataagaaaatccaaaataagatattataattgccatcacttaggtctatgaaaatttatacaaagctttaacgattgctaatttgaaactaaccctaaagcccagattctatggaaaagataagttggttacattacctattttactggactaaagaagaaaaaacccctacagtatgctgcctctaagtcctgctatccctgtagccactggagttttaaacaggtggtcaccacagaacatcaagtgtaacaataaatagcacagtctaattccagtaagatgaaactctgctgtggttacaaggggtggcgcaggggaggacagttaggggtgggggatggggatcagacagtgacgccaaagagcaaagtccaaggcatgagtcaagctctgaactccttgcagggagctcccgttggctcaccaagcccttagaaactatttctatggtctacgtgaataaccaacccaccaccaacaggaagaagtcctcatggaacttttcctttgtcaatgtaatcttttagattaccaaagtcacacaaagctgatatttgtccaagctgaaaatattgcaggaaaataaaaataagaatagttctctaactactggatgggtgcaatttgatgatgtatctatctgagctttatagttatctatacatataaaacagattacacacacacacacatgtatatgaagaaaaagatactgtgtgcaggtgtggagatttgaaatggtgacattttgcttgatatgtgtgtaaacttcaagctgataggttggttgcttggcagatatgaaactctgctgtggggacagtatataggggctaaaggccacatgcttagtaaatggtgtgactggaagtcctcatgtgactcagctgcactttgcattataaaattctgcttctctgaacgttcaggagagagacagggtaattgaatgaaggaattttctagtttgttgtgtgtgtgtgtgtgtgtgtgtgtgtgtgtgtgtgtgtttgtgcgcaagcgtgtgagcttccagaaactgcttgggtagaatggatgttctggagataatggaggtgtttgtatgttttggtagttacaggtaagaaattatagactggactttttacctagaggtcagtgctttgagcaagctcttctaagattccagtgtgcacatataacatgggagtgtgttacaatgcaggccttggcagggaggtgtgggagctgaaagtttgtttttagcagggctgggcaatagagaccacactctcagtaggaaaggtgtattatatactaacataaggcttaaggaaggtgttagggtaaacaactccttcactcctcctgttagacagggccatcctcacagtggcctctgtttatgcctgcactctcctgcttgttcaaatggtgactagtaacttcaggtccaagctgcagctctgtgctcttctcttctccgtgaaggtcttcttaattatcatcatatgcctgaatttcccagccttattatggtatgatttacttataatcaaatttatccagtttgtgcatagtcttaaatttggtaattgaatgcagttgtgttataattactgtgatccagatgtaagacactttggaagctcccacatgcctcttagtggtcagattccttcccttgatgggtgattaccatgattttgaccacagtggatgatcttgctcctcatactcatcaatacagaggtcatgaataaccacctcccactttttttgaggcaagatcttactatggagccctgactggcctgggattctagaccagaatcactccaaactcacagagatctatctgcctctgtctcctaggtcttggaatttaaaaactgtgtgactaagtacagacaaagaacgtatacttattttcccaatctttggtatactgttgaaacatgagtataagttggctttgccctttctctcaccaccttcaaaacgtagacaagaattcactcctcagtatgttttctagaaatgttttgatattctatcttaggaactcttttactctggatcagttgacagtagaaacattacccttccaagaacaatgccgtagcccacctgtaagcagctggccacctttctggacccagttggataccaagctcagttaagagaatataacactactgtatgttgtagacttgggaagcttacattataattgcaactgtttgtatggtatccaaattttcctcatgcctggggaaaacctacaaatcaaatgagtggagtggacaactattcttgggcttaggctccatctggcctcattcacaaagctgcctaagagaggaagccatgttaccggtcttagctcagccacagtcatctgtggactctggcagcttcttcccacctgtgatggctattcttggatttcaatttgactacatttggaattaactaaaacccccaaatggaaagtatacatgtggtgatttttttgcttaatgtgaagtgataagatctgcttctaatccggatctttgaggtaccatatcatttaaactgggaaatcccacctctaatggggtacactttctattggaggcccatatacttgtaagaaggaagcttttgatcttggcctgcttgctctcaccttgctgtcaagtccattctttcactggcattagagcctacttctctagggttccaggacattctgaagaccagctgagacatccaggtgcatgcactgaacaactgctggatccttggacttctattcatagtcatccactgttggattagctggccatagcctgcaaatcattctaataaattgcctgtctgtctctctatctatatggcatgtaatgtattatacatgatatgtgatgtggaatgtaatatgcttatgtgtgtgtatacacatacacacatactcactctgtaggttttgttactctagagaaccctaatacaccacctatctatcctcattcttatacaacataataaaggcaacactagaccctgtgtagagggacccctgtgaggattaaaagttgccacaaacaaagagcctcgatgttagttaggcaagacacaaatattctgaaactaccaggagtttttctaatatctctgatagatatatattctcttctttcccagaactccagaagtatgtacaatctgcatgccagttttgtatgaagagaagtaatggctttgtgattggaaacatggtagtcttgagagtattggaggagggcacatcacttagatgatggtacagttttatctttggagaggaataagtctgagagaaatgaaggagctgtcattggaggataaacattcctagggggaaaatgtggaggaaggagacaggtggccgcaggactcagccaggacactctcagtcagggaaggtggcaaaactgggtgaccagcctatagtgtccacctgacagcataaagaaggccctgggggacctctgaatactcttagaggagagttttctttttccttattcgcttttgagagtaaattaagattttattttttattttttttaaatttttttactaataactctaaaccacaaggcatggaaataacagatttagagaatagttacactttccccttaatctttggtcattttcatactataagaaattatacacattttattttatgaaaaacagtatttaccagtcttcttgggataaaatatgaaagtgaaatgactttgcttcttcatgttaaatctaaacaataatgaaacttggacttgggtgtcccacaatattggaacacttgcctagagtgcttgatgtcctgggttcagtctctagcagcataaaattcagaaaaaaaaaggagataaaattatagaggaaagcataacgattcttattaaactcattattttggggcgattacttttattatttcctcagagacttttttacatgtgggcgacatgtctctaactttagataataaccacagaaagggtatcattaagaagttagaagtaagtaattatgtctaagggttaattccctttgaaattaattctcaatgggtgaaaatgccagatgcagtaggccttcagtgtaggaaagttctcactgatctttcctttggggctggagggtgagttcagggtcttgtgaaggctaagtaagagctcttttgcccagataagcgcgctctctctctctctctctctctctctctctctctctctctctctctctctctctctctctctctctctctctctctctgtgtgtgtgtgtgtgtatccttttagtcctttcaaatggttccactccctggtgagtaagcattcaaatgtgtgagcctatggggccattcatattcaagccagcacaagagtattaagcatggtttccgtctgttgagtgggctaattagacagccgttggttaccatcaagttacaggtgcttccagtgcacctgtctgagtatctgtcatactggtgtaagtactttattgtagtacttcctacccattctgaagtaatttcacaatcaaatgttaggtgccttttttatgctctgttggaagattaagtagaaattcggggttacactgtttaaaagtttacttaaaacatttatttttattttatgtgtatgactacttttgtttgcatgtatgtttgtaccgtgtgtgtacctgattcttgtgaagtcaagaagagggtattggatccccaaaatttagagttatagatagttgtgagtcaccgtttgggcaccaggaactgaattctggtcctctgtaagagcatcaagtgctcttagtttttgagccatcgttctatctatgctgaaatctttcttcaacaaattatatattagaattgctgttaaagaatgtcttaagaattacttattagttttctgctattagtgatcataactgattacaactgaaaacaatataaaaataattattttattttcaattatgtatacgtatgtatcctgtgtaggtttctgcatggagtacatttagtgcccatagatgccagaatggggtatcagattcctcagtgttatggttacaggtggctagtagccacctgatgtgagtcctggcatccacatttgagtcttctaggataaacagtatttgctcttaacctcagagccacctctctagcacctaaataagttttttttttttttttttaaagatttattttattaatatatgtaagtacactgtagctgtcttcagacactccagaagagggagtcagatcttgttgcggatggttgtgagccaccatgtggttgctgggatttgaactctggaccttcggaagagcagtcgggtgctcttacccactgagccatctcaccagccccctaaataagttttaattcatgactttcaaaagttaactttcttcttctttggaggtatactgggatttgaacccagagtcatgagccttttacatcttgcttacatttaaggaaagatacatatattttttttaatataaaggacatatctgcccttccttgatggcaagttacttttctgtacaaccactgcacatattaatttatacatattttgtttttatttttaaaaagttggttttcctttctctctagtgccttctgcctccacttataagtaattgtatttacagaaaccatacagatgttgtgattgtgtgggatttccagtgaggtgcccttgtgtctgtgccagcttcccctcacattagatgtttttttctgacatttagttcagactctgctaaatgaaggaagtttaggtaacataaaagctacgtctaaatgcctcgcactggtcttcagggacataacaggagtgaatgcaagggatgaggaagctcaggcacgtgacagcagtgtcttacccttctgaccggaccggcctttcagaaatcctagggcggaaatttcctcagcactgcttgaagtgttttgttctgtgtgactgaagatatgctttttttccttttacctcttttggcttaggtgttctccactggaaaccatggggcgttgctgcttatggagtgttaaataaccagttccctgaccttccctgaccttcagagccctggtccagagtgccctgagaggcagctctgcagtgctttctgaagcatgcctaagcacagtgaactgcatcgagtgttcttttatttcttagtcaacacttgaaaacccttggcagtagctccaggctttgcactaactttgagcttctttgtgctttttattgcttatttttaaactcaagttgggttaaggctagatgaattatgtttcggtttaattttctttttacaaaagtagccaattttgacgaagctatcacttgggtccgggtggagctttaatttgctgggtttcaagggcagtcagtggctttcaatattttacaattctcattattatgtgtgaatgtgacatacatgtgtgggcccaccatgacacttgtatggaagataggaagactactttatagagaagagtctcttccatttttgtatgggttctaagactcaaactcggatagcatgaggcttttgtaccaagcgccttgagccactgagccatctggtcaactcaactttcagtgctttgatctttttagcttgcatcaaaatcctccagatgaatcttcagattatggtactagacctctaattccagacaggatggccttcaagaggttcttggggttagaggaggcagtataggtagacactctatcgcatctgtggaagaacctggtggtcacggtcatgtggtattgaggcgctagaattcatgagtttctgtgatggggaattgtcttgggccctgtttttttggctctgaagctgccgctgtggccccttactagggcagcacaagtgaaaagatgaagactctcggggattagatggtgtaaccccttaagttctaagtgatggccagggataatggcagtgagtccatagagtataatacagaaaaggttcctgggtaacacagtagaattgggttgggatcagatgtggtgaatgggagcaagagggctggggaaatcatttcgttcatgatcctgggaaggttttggaaaatcactcatcagtaaaatgagaattggtggctcagacctgtaatccctgtagcgcctagaattcttatcacgtaagattcatctcaaaaacaaacaaaacaacaacccctaaaatcaaaccacaaaaatacatgagtggaggaaatggaagcttactgcagaatatgtgtcagtttaaaaggcatttaacaaggtatattgaattggaaagctgataggcatgcacagttgtattaaacctgaattggaaagctagttagggtattaaaatcacatgcatttactcatttccagtggtttacataggacacttggtaatactctcagaatattttgaaattactatcgttagatgaaagcacaagtaggacatagaaggatcatgcttacacacacgtgcacacatgtgcgcgcgcgcacacacacacacatatggagttaaaggtggtatgtatttatgtaatcatgcagaaatttaaagaaaagttctttataggaattataagaaacaaggtaatatatctaaagaaaatatgaaggcatttttttttcttggatagtagttacttcacttcatttatttccaagcctagcataggttagactcatgagatttaaaagtatctttataaatgacacatttctcattctgtttccaaagatatatatcgtatattacatatatatgtatgtgcagttcattttatcaattatatatagtctgtgatgttaacttattaattttatgtatatttaaaattatatatatatatatatatatatatatatatatatatatatatatatatataaatttgaaagtatacacacacactttgctatgggaaaatattgtctctcattaaaagccttttcttaatttatctcaaatagttttatgtgaaaatgtagtagcaatatatagttttgagtagagtttcactgaaatacagctgctgcccctggcctggttggctgtggatgtgggtaggagtggaggatgagaagcaggtaggtgtcttggctttccagtgtttgacatgctgtgaatgagggtttaggtcaggtaaattcaggtttaagttttaactatgtaagccagtgctatagaactctatccggaactggacacctattgtcctcaggactggcttgaccacttgaatgagcccccaggcatgttggttgttgatgttctcacagaaggtggctttgggagggccattggatgctcacttgagattctcttctgcctctccttcctatagttctgtcctaacagtcattgctggcgtgagagggaatgagtacagcatttggggttatccacacccctaaaagagacctcacctgtgctctgtaaggaagcctcagaaactcgtggtttaagttggacttgggtggaatcagatttttgtttgctgttggaatgagtagaggtttgtttaagtccccacagggaaagagttctcatgacacttggcaagacataaccaaaccaccaacaggaagagcaacagcattgttcctgctttgggtaatgagacagagagctgaggctcagctgctggagtgagaaaaggctggacaggcgctcctgacatggctgtctttctttctgtgtgtgaagtggtgtgcctccttgctgtatagaagcatatgcaacgcctctcttttgtgtaataagacaggaaatgaagctgaggtggcttcccagttggaacttgcttgtgttgaggagaaagaggattcctctgattaggaaaggaaattgtgtttgtgggagtagaggtattttatgacagattacttttttcctgggcccaagctcctgtaataatgactcaaactcaagatatatttacaaatacctaggtcatacagctaggctcaatccctgactagttaatgatgtaaaataacccacttatactaacctacattctgctatgtggctggtttcttctgctcatgtgctatgcacctgtcctcctcaaatcttccccaaggactctccccacacccgactctatcccagaattcttccagactatcagatgccccaccttctattctatcctttcctataggctataggttttttaatagacaagtaattcatccatacaatacacaagatcttctctctacttgggagtggggcagagatggagatgctgactgactgctgcttataataggagggcagcagggcaaatgaacaaatcagatctgagtggaagatccctacctggaatctaagagcttgaaactcatgggaaaggcaggataataaaatgggggaggtcccattacttgctcaaacactttaccagttatcaagatttaaattgtgaatgaggaacacatagttataatcgagtctctttaaaaaggtactatttgtggtgatatgatatggattattctgatgtagtatactttatgtacaggtatatttgacaatatatgaccattgtggagcacatgctaaataggatctagattgtgtgcactaggcactaggcttatacgtaggttggttagactttccaggaatgtatcacaatatcattgtaattgagaaatggaagatcagaggtaaacttcaataaggtttccagtgttgagtgcctatctcttctgacctgtaattcagctttagtgggtaatatatttagaagttgctgttgaaatctaggcactaaactggatcttacatctaccacccttgagattttattctcatttatatgtgtgtatgtgagcctgtgtgcatgcaggtgcctgcagaagccagaagaagtcattaagacctcagaatgaagttatagatggtagtgagcggcccagtgtgggcatgggaaactgagccccagtccctctgcaagaatacaaagcattcttaaccactgtgccatcccttcagccctgggctcatccttccatctgacagtatgttttccattaagtcttctggtgtatattcctggctgtttttgtctcgctcatgcatgtaatatcctgttccaagtttcagtcattaattgacgcttcagtaaattttagtcccaaggaagccctgcccctaccccaataagttgatttttgattagagatattagctaaattctttaattctataaatcaaaaatccacagataactttggccccagggaacttttgatcctatctggacacatttctgatgatccagaagtgaagaacttttacccaagggatagaggcaagagtaatcttttatatcgtgcactgcaccagatatttcctgtgtcacaaagaattatgagattcatgatagtatttctgaggctgaaaagccagcattgttctcaaattattacgttgttttacctacccctagcacaaatgaaatcatggaaagtatagtttttgctcattcctgtaagcactaaagggaagcttacaaagagcaggtacggaggacagaagtaacctactacataaaacctgaagactagagatcttttaggggaggttcatacttatatattctttggggtcagaggtcagttcttgggcctctgttctgcagctctgatgtgtgctttaggctagcttctgtctaggtttcctgttgcacagcaggggtgtagacattacagatgtatgtcaaagcattctgcttcttagatggagtccaggcactggactcaggtcatcagtcttgcatggaaagcacacttacctaccgaggcatcttcttggtctagataccaaattttcaagcaaagtcttggttgtaggcaaggaagaataatttattgagtaaatacagagtgttcagaacatgttataggaatggtttgatatgtgctactttgattatatgaggtttgtgtcacatggaacatattaaaagccagaattccctggaactggagttgcaaatggttgtaagatgccataggggctcatggaattgaactcaggttctctggaagagcagccagggctctaagccaacgagccatgtctccagtctgaaaaatttatcttttagaagctaagtagtatttccatttacccttgcacacttttataatctaattttgtcttctgtggtgttgaggataaattgccttgtacttgctagccaagcactcccgcacagagccacactcggcttctctttatgcttaaagttgtctactctctcttactctgagtccacatttagggcccgatagccaaggggcagaaaatgcttcatggttgcatttttctcttggctaataattatcgtgctatttcttttagttatgagtcttttgagaagacctttggtaacttttccatcggtagaaagctcaggcgagctcctcctccagcacaatggactgagagactaaggaagcgtctgccttctctgttttgaagacagatttgggaaggaaattactgttgccctaagtaggctccggagggacagtatagacggcagtgtattaggggatgatggtgctctttctaggattaggaaggaagtggatttttaaattatcatttttttaaaaaagctacagtagaaggaaggcatttgtgactactgaggcaaagtcttgaggcagcctgggaatcacatcccaacttaagagttgttgggatttggaaaggtttctgggtcttaatttcgaattaagcttgaagtggattaaatgagagagcaagacagaacaatataaaaatgttcaataaaggtgtcattccaagtccatgtggtagctagttatgtatgctacggtcaagagctcagagctggaaaatgactcattaaaagtaataaccttaacaatgccaaacatttaaatggtgaaaaattcaaaatataaaggaaatagctctcttggttcagagtttgtcaaaattttaattttgtgagtattcaatacttttctaattttctccccctcccccccgccctgatgtcttgttatgatgatgccagtttcttgttccttgacacacaattattgagctaaagtgtgtcagttggcccatgatagccaatcaactaccataagcttcccgactaaatgccaaaccaaaacactgcaggtcacaggtagccattaagtaagatgctccaggcagatcgcagagatctgcagcgggaaatttcatttgggggagttgccaacgcacagatgaaaaaccgtgtatttatcgtactgcggttgaattccaactgtattatagacatgactttgagcacggtctcagagctggagagatacatacccttcagagggatggttcagtcttccagtgcactgcatcttgaaatgaagaatggcttgataaggattccattggaggtgatatttgaccctgcacatctccctttgttgaggaagtgctcttagtggtttagtaactgtgtttgggtgtgttttatgatatgaaggataagaatgcactagttgattctcagatccttgtctaactctcaggagtgtcgtggctagggtctgcacttccttgtttgtcgaaggaagcgcctctttctctaggtggtcctccctagggtgctcggcctgggtttcctgcttcgtaacccttccatgtttagggctcaacttttgggcctctcctctgggaatacttacttttcaggtgatgtctttcagtcatggaacttaggtttttcttctgtgcattggcaactcccccaaatgaaattcctcgctgcagatctctgcgatctgcctggagcatcttacttaatgactacctgtgacctgcagtgttttggttttacctgctaactgacttgaccattagatctcatgtaacctaatacccaccgtctccagaatgatagctacctggtattggaaggtacaggagaaaagatgtgggtgggtggttgcccttctgttctctctgaccagtttatacagctgtgccctaactatttaataaacagatcatacacaattgttctcaatccgtgtttggcggctatgctgtgttctttctgtttgtcatttgatggtatttagtcccaactgtgaacttgcttttatttcttatcaagcttatagaatagaagaaaagaatcacatgatctttagttcattggtttgaaccaaacccacctcagttcctgaaatagcattcttcatttgtgctaagtgacattgtgtatttgggtcctttgaatacttgctttttctccccacttcccctttaaataaaagctgttttatgttatgtgggagggatgtgaaatttaataagttatttttaaatgaaggtacttagtcatacatgattgaaattagcctcatgtcgttagggcgaaactgttcaatttccaaaagttttgtttttctcacatatgtaaagatagatattagactcaggcatttgctcactcattatgtggatccaggggtggtggcattttgctggcgccattcttgaggttccatgctgaacagctcgagctgtgttctgtaggtctgacaagtgagtcacagaatttctgcatccctgggagctgtcagcagaaaggcagcttcatttatagtcggaaggtggggnnnnnnnnnnnnnnnnnnnntttttgatgtctggtagattacagtgtgtttcttgggcctggggcactgggattgtgttatacgggtgcagcgattaagcaacgtgtgtgaacaagcgccgtttgttcgagtgctcgggcgtgtacgaaagaaaggcggaggtgtgaagtgggatgggataggggcgtaacgacggaggtccagtacaggcaatagaacacgtgataggagtgggagcatcggaactggggacgggtaataatgtgggaggatgtcttgcgatcataattatacgggcgagacaaggaggacggtaaatgggggtgggatgatggcacttcggtggggagaagtcggcggaaataaattgggtgtcaagtctcggcggaccggaacggactgaagcaacgaggaaggtgtcggaaaaagggggatcgtcagtgcgagggtcgtggcgtctcaccgcgcgtccccgtagctcttttgctcacatcggcggtgaggcgagcggatcaaggtaaaggagcgtgaagagggggggcggtcggggtttggtggcggagaggggtatacacgagaagaggaggacagggagttggtgcggtggtggagaggagggcgtttccgttggggggttttggcggagggtcggccggaacggtggtgaggggtctgacgtgggcgggttacactggggccccgacgcgggcctgtgtaaacgctgaacccgttgaaaaagaaaacaaaaataagagaataagaagaataaaaccaacaaaagggaaggggagctggagctactctccgttagttagcacagtttgcttttctgagaggagggaagactgagtgaaatgttctaagaattcatctctatcttcctttgtcctcacttccatttgacacagtggaaggtgctagtgtttgttctattttaaatgatgggatggctggacgggcttccatgaatagagagcttccattaatagaaaaggagctgcaaccgatagcgtcctgggattctaattcctaatgggattgcggcatttgaagtggaaatggtccctttctttggagaccctagtgttgggaattttcttacttgtgtttcttgaaaagtctcagaatgttccagggttgatcagaatccctcgattttcctcccttttttggagatggatgccttgtggtctatgtggcactgatgttggcatggggagatggttcggttggtgagaatactggctctccaagcatgagggctgagtttgaagccctggcactggaataaaaagctaggtagggctgtgcatgtctctaatcccagtattaaggggttagagacaagcagatctggagccctctggccagccagactagataaaaagctgactgctttgggctcaggcagtaaggcagagctattgaagaagacacttggggtcctgttctaggctgcatatgttcctgcacttatgtaccatttacatataccacacacatgcatatacatatgacatatacatgcacatatacacattttaatatgtacaatacataaatacatacatacatctatatacgtatatgtatgtagcatctataacatatatattacacacagcacacacaagcatacacatacacaaacatataatgcatatttaaacaaataaaatacataaagaataaacacacatacatacttgcatgcatgcacacattcatatgcatacacaaatccactttatgtacacataagcctacacatatcacacatatatacacataatgtatatatacacatagagacatattccatccccatattcatagacatattcatactacacaaatccatatacacatctgtttatatatatatcattcttacatggacacaaacacacacacacacacatatatacatccacatatacatttacatcacacacacacacacacacacacacaagcaaaaataatgtaattgtggtttgaatgtgtcccccaaactgttgggaacttaaccttagtgcagtagttttggggacaagctgcttaaggtgacatggggctctgctctcctgagtagaccggttatgcagttattgaggggcaggttagatacagtgagagtggtccctgctgcaagtgcttgcttggtcctcctctctttattttctctagccattctttctctctttctatatcactaggtatgggtcaccggatcttggacttctcagcctgcagaactctaagaaatatacttataagtgatccagtctgtgctccattctagcaacacaaaacaggccaaagcaccctgtcttgtcattagatggacatctgctctgacttgccctgctgtctcctagcatactctgtctccaccccaactccatacacagctagcagatctgaaccggacagtgtccatagcccttttcttcttttggcttcctacaaagatcagcattcagggtcccatttcttgcttccttttcattaatttcttttctaaaagttctgagcaggtgtccagtgggggaagcggtagctggaaagtggagatgatttggtggtttggagagcgaccaagtatctggggaggtcagcttctctgatatcaacatagtttcccaaagggcaacgcccaggtcagctgctgccaccagggcagggccagccaggctggggctccaggaagcttcctggctgtgcactgggaagtaccctggggatataatcacttgatctgctgcagttgttctgtgagcagagcgagccaaggaaacttattctggtagcagggaggagtccgaacctggtgtggggctgcgcttgagctcctgggagaacttcaagaattcagatgtgctttttgttttgacagaggaggcctggattggaggctttgagtagtggtaggtggggccagaatttaaaaaaattatctatctatccaccttcctacttgcctacctacctatatcatctctccctatctccctctctccctctctccctccctccccccatcttcctatctaatctatctacatatttatttatgtaggtgggaaagggcctttgcgttccatatgttgcttatagaggtcgaaggaaaaccaataggagttgtttctcttcttccagcatctgggtttcaggaatggaattcagttcagcagtctggccaggaagctcccttccttgctgagctatctggtccaaggccgggtgctttgttgtgttaagcttctgcctgggggtacccgtgatgaattttttttcctactcaacatgaggaattccagtatgagtctttggatgtgtgcttccctgtggaatggtacagttacatttgagtaactgaggttggacttgaaaatggaggttgggaactagggagaagagatgtttttggagaatggaggagtcaagtctttagagaattatgatgttgggtagcagcaagggtagatggggcctttcggtagcatgtgggtatgggcagtgtcccgaaggaaaaaggagttctgagtcacagagcaattcagaagcagtgggattctgtgtcagatgccatgaggcctgacttgaggtaatttcctcctgtctcttggccctcgatcagccaggctggctctgtgaggggaggcaacacacacacacacacacacacacacacactctcagatgctatctttgccagccctgtgagtaattctctgataaaccacgtgttgggatggctccagttttccctggtccccgaggctatggagcaaagctgtggtgggtgtggtgtgtgggcccagagtgagctctttgaaagattttcagagttactttgggtagagcagtggatgactgctggctggcacgtactggcaaattataatctcttaacattttgttcttagactgctatcagataatgatgaaagcgggttttgtgtgtgtgtgtgtgtgtgtgttggctgtatagacatccctccttccagtgatgaggatcttagaaaacgtaaaggctgtggcaggctctgatagcccaaggatgggtggagatgactggcttggtgccagtgaatctctgtagatgatgattgtaccggggtgccacaccctttgttctgacctccttttggaagtaacttctgaccctcatttaaagctatccatactaagtcgtcggaagaagtataatgtgaaagagcattggacattatgtctcattcaaatgtgtctccctgaggggaaaggactctgtgtaaggggatcaatgactggcttccagcagcgacccctggctccagaggccagctgaagtggataatgataattggagactgtcatgaagtctcatttccttgcttggcctgggcttaagcagtttgaatctcagtgatacccagtgaggcgaggctcctgttttgcaggcgaggatttggggcagtgagttttcaagcccaacttcctgcagatggttgatgaggagtcaggatacacacagagtagatctaagaagtgcctgcggagccaagatggcccccctggaaggacctcacaccagttctccagcagagttagagatctgggtgggcctttattttcctggtcctccaatcaaaatttacttcttgattgattcagacttgtgtaagtagtgaagaaaggatgagtgttacagcttccagtttctacatttagtacgtagctgtttgggacagttgatgacgattgtgtgagcccacagactgcccagtttgaaggcccatgctgggcacaggcagcagaggatatgccagaattaacgcaatggaatagttagctctgcttactattttgtgattattaaatgtggtttctactgttagggcatatttaaggataaaataaaggctatccatatacttaagatagccatttaaaaaaatattatctgaatataaccacttaatccaatttatagtaaaaccttttaaaatataagtacgaagtctttgactattttttttcagatatcaccatgcaagattttttttaaaattatgtttttgtctctttttggaggttttgacacgcttttacagagttgcattttacttcagtgttagaggaaatgtggaggaggttggggaggtggctcagtacggctctgtgagaacaggggtctgagtttgagttcccagcccccaaatgataacctgagcatgacgtcagagtaggcaggtatggatcccaagaggttcactggcaagctactcacaaaacagtgagcttttgcttcagtgggagaccccaacttaagacagtgaggttgagagccatagtagaagatacccttctctggcctccaatgggtacacatgggtgtatcctcccccccaccacccgcccctgccccgcccacccaatcctaactgtgggtagcagtgcagttggagtcaagttggacagtcgttaaaaataagcaaatgcagtttaattttttcagcagtatatgaatattaagaatgttctaggtgttcattttaggccttttcttgccaacttgcctttccaaagtctgatcaacgcattccgtgaacgagaacatttgtgtatcttgcattacgctggtcatataaaatatttttatgcactcccaagtaggcagaccctttcttcgtgcactagagatggcagcgaacaacaccacacagagctattcacatactcaaggcagggattgagcatatagctaagtggcagactgcttgcctaacatgaagtctaggttcagttctcagtaccaccacaacaaacaaaaacaaatgcaggctaacgatggctgtaagtgtaagcgaagtagggagtaagaggaagttagggagtgctgtgttaggctggctgcaacttatgttggagtccagcatagaatgtcattaggaggcctttgtgggaagagtggacagaagagcctttccctccctgggccagagtctgagaaccggtcttgataagttagggatcctattttgtgtatttcctcttatctgttgaagtaggggacattgtgtgccttgcatctctcagtataaaatagaaatcttgaaaataaatggtccaaatgaagagaccctgggacccatatccattcctaaagtgctccctccatggtgttgtgtgacctcagttctgggcacacttgttctggtggggccactcagcaagggcagatttttctttcagctttggcttgtgcaggcacttggcttgttaccttgagcttcctctctctactggttaatttaaaagctctcaggagtgtgctctgtggccacccaagcccaggagctgcctgtttcctgacttcatccactggggtgtgtgtgtgtgtcaccgtgaactctgctccagcaatcttgggccatgtgaattcctgacattatgggtttcagtgataggaagctaatttggctggcccatgtgtgtctttgtgttctggagcacgttgtaaatgctcacacttagaaaggaatgtaaagtgaagggccagaaagcaaggtcactgctattggatctgtcacggaatagcattgccttgcttatcattataaaaagtcagagggtgaaggactggaaatatttatttcaagctattgaaaggaggtgaggttttcacaagggctctgtgattcctgatacccaagcgtgcttttgataaaagtgggaccactttgagaaccatatgtcggtgagactacacattcattgtactttcgtactttagataatttactatttgaagtgatacggcagtcaccattagaattatgggccacgagttcacaaccatttctagtgatattcctcggttaacaattcccgaaacagaattttattcagttctacaagatgattttcttttagttgacgagataaattataacctgagcagtgcagctgtgaagtttctccagattactttttttttttttttgaagtatagcacccaaacagaaagatatatgttaactcaaagatcaactcccaagggctcaggaaatgataaagtacttgccctgaaatcaagagggtttgcgtttgatcccagaacccatcttaagaaatgacccacaagctgctaaatgtacaggtcgaagatttcttaggaggctcacacagttcgatagccagtttatggctcagaattcaaattctcagcctcagagaggcctggctccaggccgtgactctcccatgctctaccccaagggtaccaactattcttctttgcttgttttagtagttttatattagcctatccacattacctgtattcttcttttctcatggtttgtgagacggaaccataccctagaataaagttacgggctgttttgtcccatggctccctggtgttcattctgtgtagctatcccataataacatagaaaggctcctgactatgacttttgtcaaacagatgaaaaaaaaaaaacaacaaaccatacaaaactgttcttaggctgtacctggaactgggttgactgggctatggcctgtgggctttagtttaagtagatgctaccaagtgggatccgagtgaatggagcagatgtttctaccagcgatgtgagaggacttaggattttcctcttggtgcttgtctgggttggagctggatcttaagtctgttttgtgtcgagcttgttctgtgaaaaggaagagttgtcgatgctggaaagctgagatcaaccgttgtctgtcttcaccgctcacctcatgtttcttttctatatgaatgtgtgccatgtacattaccagcttgatgtatggaatatgttccatctgcatatagacagcaaatgtgtgcgtgtcttttttcttctactacttaagccatgctgacaagccatcctagaggcctaaccaggctcctacaatgtggctctcactgataccctgtgttggcaatgatggaaaatacttacttcagtacttgagggaggcccctctgttctgctacacattattaagtctcttcaacactgaggtggtatctgtttccttttgactttcttataaacatcatgctcttttgcaggccagtaaaaatgtcctacacgcctgtaatagagtagaggctgttcaggtcatagttcatgatagggtttgtttgtttgtttgtttgtttgtttcttttggaactgagtattactaagtagtcctggctagagctcacttagccctagtggccttgaactcacagagatctgcctgcctctgcctcctcagtgttggggttaaaggtatcagatcccacacctagtttgtagcccatttttaaaactgtaatctgcagggccagaattcttaaaaaaacaacaaaaaaaaaacaaaaaaaaaaaaaaacaaaaaaacaaccctcaatacaaagctgtttgtttgatttttcttctttcaggtatgtgtgtgtgtgtgtgtgtgtgtgtgtgtgtatgtgtgtccagttttcctgtcatatgcatgctttgattttttgcttaaaaaccttagagtaggtttaaacattatttaaagataattgaacaattcatcagactatcattggtaaaacaagaaaaagagcaagggatttctttttatagaaaactcactgtaatattcaagtcagtggctatggaaagattcttgtgctgtgagatctaagatttcagaacatataggagactttcaacattgatagaattttataatgaaaatgaattttaatcataattaataatttaaggttcatggatattatttaatcaatatgttctctttcttcacaggcaagaagagactgacaggagactgaaaaatgtaagctgtatttaatggagtgttataaatagcttttcctttatattctgtaaagtcataatagctctaagaatacacgccgtgccactgtttctaattaaattttatccagaaaccaaacagttgaagtccaagagcacgcattaatgcattgttagacttcatatagactggattttggcataaagtggaagattaagtttcaagggtcattgttctatttctcatctggcaacaccacactcaatttataagttttaggggagcaagcaagagattatcaaattagacattaaaagaagacactgactgcttaaaaactctgggtaattattcagtatagactggcattatgcccttaatattctataattataaaagaatacctaaaagtaacagctctatttaaaaatatggtcatcaagcaatgaaaattattgactttaggtgtttattatatagttctattggaaaaatgttgacataaaaagtttcacttgtgggccagggagatgggcctcagtgggtagaagagcttcttatacaagcctggtggcctttggatccctggaaccagtgtaggaagctggatacagtggcgtgtgtgtattcacagtgctcttagtgtgagatgaggggtcagagacagagaggcccagaaactcatggccagccatgcttaatggggcagcgagctaccagagagagaccctgccttaaaacaagctaggaaatgggaatcggcttccagacgttgtccacatctgtggtcctgtgtgcattctttctgcctccctccctcacagtcgcccccctcacaccagccccgagttttacttgtagtttatactcatccgttttttgagatagcttctcatgtagcccagtctgatctcatagttttcatgtacacacatgacctttgaacttctggtcgtcttgacttctgagtggtgggagtccaggtatgcaccactagacccagtttcatgcaatgctgggcactaaacccagggctccatgcacgctaagaaatcattctactgagcactaccaccaagcgttgtgtgttcttcttattaaccctttctcttcaagggtagagtgtatgattgcctattgagttctgggccttttgatctgagatcccactttgaaacaatgaactatatcacgaataattatattttaagtgaccgcattccataccatacatctaagagtctgcttcttatctgtgatgtattatgaattgcaatttatccacttgcatttgaactggtacttgcataccaactcactggtcttgttctttccatttaggttttgataactttgtactggctgggaagaaaagcacaaagtaacccctactataatggtccctatctcaatttgaaagcttttgagactcttttagggcaagctttgactaaggtaaggatacaaccaacatggatatgtaataactactttatgacactcttctgcttttcctctgtggcaaacatgccgagtttgtcctctctagacagggctgtgtaggcaagttagggacttgttttctggctttatatgtttcttccaatagagtgggctatctattccagaccagttccaatatatagaattttatgtccttaattttaggcaatttgatggcacacacattcttttttatacactatataacttaactgtttttatactcattatgaactcaacctgcagtaaaaaggcatttttaggtctattaacatttataggcgttactcaatttctttatattaatttgttcttgaggtaggtaattatctctagtgactacattccaatatcaccatggtgctagcgttccttgaagagtaataaacgttaagtgaaactggacaaagtttcacttgtttcaagtgtttgtttcaaggcagagagtttcaaaataatctaagttatctaaaacttgctatattgccaaagatgaccttgaaattctgatcttcctgcctctacctcctaactgccgggactgcaagcatgagttatgactgactcctgaggagggtatatatttgtgtgtgtgtatgtgtgtgtgtatagggatgcacgtgagagtgtgagagtgctggtgaccttggtggcctgaagagagcatcaggtgcccagtgctagagttactggcgttgtttattacctgtgttgctgctccttcatcttgcaacaggcattggaagcttgtagactatttgagaaggaccaagtgctgagagcaaaatatactgatttttctgtaaaaaatctgtatttatagagccctagtggaaaaactaatttctctgtggaactattcatccagagtattttataagaattgagagaaaataaatgctcaaaatgataaaataccatttatgaagtagtgcttgctttgtgagagttctctggtgacattaaacaagaaagatatttagcatttgtttctgacacattgtgaggatgaaattcatgcaactagctatgtttctattctaactatgattagaatagaggaatatttcatcatgatgagaataattgccttctgctctatctatctatccatgtttttcaaaatacttttcctgcatttagctaccctggtgcattacaaaaaaatagggttataaagtttcgttgttattttttgtttttgtttttctattgtaagaaattggtagccctttaggtctgggcagaaactcagttggttcaatgcttgccatgcaagggtgggaatgagtctgatccctcaaattcatgcaataatgtggagtgtggtgatatgcatatgttagcccagcactggggaggctaagacagtaggattcctgggccctggccagccagtataacctgctaggctaactcctgacgaacaagatatcctgttttggtctcaagaaccataaaacaatcaaacaaacgccaggtggacatctcttaaaaaacaatactggagattggcctctggcctctgcacacatatccctgcatgtgcttgaacactcgcacacatatgtgcacccacacctgtgtgctgcatgtgtacaggaacacagaagagtagttctggactcaacactttttgcatgaggtaactgagttagtagttgagatattgccatttacacagattgtgctagaagttggagaatgactcatttaccagagagcataattgtctgagactggagagcacatcggtccttgctgtgggggagagtaaagctctggtggggtaattgcaagttgttttgggtacaagggaaacctggcttcccagtcatttgaactaaggacgtatgcagttagaaggttcaagggacatggaattgtggactagtgttctttacagccttcctcactttttatggcactgactcaggatgagtgatttcagcgcagtctgtgcctctttaaaggatgtttgcgctcaccgatgtcagagtcagtgtggtcagaagacttttttttttttttttttgtagataagactgtggttgtagttctattatcccattacctggtgagaatagacaggagaggcatgccaatctatcatttgtttggtatcagttcttttaaaatgtaaggcatgatgtggtcgactgtactttcccagttccctgacagtgataatgccaaccggaaatcgcaatgaaaccacactcactaagagctgttgtatttgagtcagattgtaatttgcagatgactcatttgtgggggacctatcagggtgaagtccttaggctgctgggacagactgggcgatttacaacggtcacatagttactaatcagtcactttaacatttataagatcagaagtcatttgtgatttacactgatgtttccaaaagtatggagttatgtgtgtttgaaaagcctgatgcatctaaagactgactttaaaatgtcagtctcatagcctgagacagagcctgctggctaagcttggtaacagcaggaggaaggtagtccctggccatgttcacaccaggacgttaagattaacaatggtggagtgaaatctctttactggccattcttggcacttcaaacactcgtcagacaattgactcaggaactgaaggatctgatttaagcagaagtctgcttgaaacagctgctagttatttgttccaagcacttgccaactttctttcacatgttgaaagtattatgataaatgttaaggcaataataacacttacaaacatcacatcattattgtctgacatcgtgtttccattttggctgtttctaatactgtctgctcatctacctgcttttacttaaccatttgaagatgaattcaggtaacacacctcaatcttatgttctcagtgtctatttcttaaaaagtaaaaatgtttctctgtctagctttaatttgtactctaaaaagctcatcaatatccattgtcatttaatattgaatctttttcctaatggtctctcaactattttttaaaagttaaaacatgatttaatcaatgattctgtagctgtgattagttaaatcactttgtgcttctggaaggttgtgtgagaatgaaagacacactcacgagcgtgcgtgcgcgcgcgcgcgcacacacacacacacacacacacacacacacacacacacacacacaccagttaattttaatatgcctttaggaggcctgattgccagcatcttatatctaggttttataatgagtaaaaataaataaattctgtaatgtacatactcactgatctttataataacaaaattctttttttttctttttttgacggttgatggggttataaaatgtcattcttaacttatgtttaacacaaagcaccccagatatttcctggagagaataagacatcctaaagatttgtctacctttgaggtgtcaacattaaaatatttttctttgatttctttcatcccccctcccattctctgtctatctcctctctctctacaccccccccccacacacaccactgaccagcatttcaaggctactgtaattttgttttattagtattttcatcttatgttttggttatacaactttgttaataattttaggtattttcttattatatgaaatttcgaatacccccttattatacagtttgtggagaaaaaaaagatatacttttcatgggttttgttttcttcttcttttggtgaacaggaaaaccctgtcaacttacccttcttattaatcagagcttttgcatccctgcaacttcatgtccattttctgatctttgtaccatgtttccttcaggcacttgaagattccagctgcctgaaaagaagtggccgggacagtggctacggggacatctggtgtcctgacagaggagaatttcctgcccctccaggtagccacagaagggaagattcctttgagagcttggactcgctggggtccagatctctgaccagctgttcctcagacttcactctgagagttgggaaggaaggtgagtgggtgttgtgtcttgggctgtgtgtttcttttatttcttcgtatgtgaagagaagatagtaaaggagagaaagtagaaaatgaaaattatccaaagagttttcaccaggatgaggcttttcataaggccgtgttcttatgtatttttgtggtggttgtttcttctgtatttggacttctgaggagatggttcctggctcattgggactggatttcattagcaagacactcttgagatagagatttagcaatagatacctagtaagacccgttaactcaaatatctaaacacaaagtgcattataagagtctgtaaaatgtctgttttacttcctgagtagtttcctttcttgtcttaattttaccggaagtacttaagaaatacttaagtaggatgcatcttccaactgtgctctatgctaatccacagcagagggtgaggcaatcagttactctaagtcttgttgtgggaaggaaatgtcactcaagcttgaaagcttggggtcaaacacttccctgaaatgtatcttcaaggcttggaagattgctcagtggttagagctggtcactgctactaagcctgagcgccatctctgggacccacatagtggaaagagggggaaaaaaatcaatttctgcaaattctcctcttccgtctacatgtgcactgaggcaagaacaagcacacgcatattcacacagaatcagtaatgattagtaaattttaaaaagaagaaatgcatgcctccccctttcacactgtaaagaaatccatgtcctattcctatggctattatacctaatatattaatagtttcaaactaaacatccaggtagtcttagttcattccgtctaagtagaaaccaaagataacagtccatcaaactctgaggctatcggtcagcgatagagcccatggccaactccagcacttccaagaccaagccttttccttttaaagatgccctgagcttcaagcaacatcgttatcagaacggaaatgggggttctgattgtgaagttgtactctatctttgaagattttcagtttacttattatggacaaatatttgacccaagacctttattatgcaaaaatctcagacatcacaaataatatgtttgttttcttaaagttagtgaagcatacccaaactaaattcctttagagtcgtgatagtagaaaaatgtgaatggcttagtgttaacctttgtaactgtcactgtctttactgaggtgtgactcttttagagtccagatgaagatgctcacacctacaaggaagccaatctaagtttatagttcatcggagtaatcacagttataaacgaagcctgaaaaatcttcaacctactgtgttctgttgtcctgaccggggagactatggaatgctttgtttgaatttatatctacttgtcaaagtatagcagagagaaagaaaggttgtgggtttgtggcaagtgtagatttatcatcaaaacgtacagaccgactggtgtaaggtcaactcctcctttatatgtgacctattcctggtgtgtgtgatgcaaagcggagggccccacagtctcagtgcaagggaaccttgtttaagggctagacaggtagacaattctaagtagggtagtgggagggagctgggttccaggagcatgaagcttttctgtgattactgtattaaaattctgctacccacacaattatagtgggtggtaaccacacttaggataatatttttaggattagaaaactgtgcatttaatgagttttatatgaaaacacatcaggagtggtatttgtatataggcttaaaaataatatttttaagtttaaaacttcaaaaaacaaatggaatgtgatttacaaattttactagtaggttttagtaaggaaagcaacttttttcttgttcttttaaaagaaagtgtttaacaaacacacacacacacacacacacacacacacacacacaaaacagggaaagtagcttaatgactctggttgtcctggctgtggctgtctttccacccagactcccctttcaccggttcttgtgacatagctgtgtcagaccacttcctctgaaccatattggcattgtttgctgttcattcctgcctggcaggtgacaaaggcaaactgtgttaggtcacgttaacctggctggtgtgctgacagccagtagctatgaggggagccgccttctgcagcagggaggaagtctgcaacccttaccaactactggcgttttacaagtgcactggaggcagggaacaagggacaggaaggagtttactgcaggcgacttgtgtggttactctctctattcttattgggtttttaagagctgtttctttccctccttcttctaattagagaatatattattatctgtttctgtctatccttgggatctatcacaaatactttctcattctttttctcctttcccttttcctccttctcctctcccttctttccttctccccctcctcttaatcccccccacccccgttaaacctgcttttaagtagagttttaaccacaattcctggtttccattacagcttctgtgcttatcaagtaagctttagtttggtgctctcgtgtatgcataagatataattcattaggacttcagatgtcatctagcctggcttctctgatgtaggatccatgtccctaagagtggccttacaggggtctgtctatcaccattgaatcttgctccatcttcctttggtttctatgcttgactgttacttcctggaaatctgatggcttcctgccttttgttatattactgagttcctgtagacttgcgctgtctcattggattttatcaggtgatatacctcagcagatttatgaagcactgtggtgtcaaagaaggttggaaagagaagggactgtccagggcttgggggatttatctgcttatcatgactgcagaagaatgcactacgtgtgtgcctccagtgggaaggcaagtccctcctcgtgggtcttatcacaacttcttgacaaagttctaaaaatattcaggcctttcagcagcagccctgggtttccaggggagaggagaatatgctgagggaaggggcttcagcaggagagccctggagagtaaagcaagtttttgtgccgttataggttgcgaaagtgacatcgattgggaatttacattcaaaatgcaggattacaacaaagatgatatgtcctaccgaaggatttcagccattgagccaaagtcagctctcccgttcaatcgtttcttgccgaacaaaagcaagcagccgtcctatgtgccagcacctttgaggaagaagaggccagacaaacacgaggataacaggaggagctgggcaagcccggtctacacagaaacagacggaacattttcaaggtagtatcatgtgatgtggttacggagtgctttctggatttgtggaactgtttaatgaggtttaacaaggttaacgaaatggctatttaaagtatagttagcacataccactaatgggaatttctttttttacctctgttttcagtcctatgttgaagacagttattgtgtttcagaacgccagcatccaatgaccggggcttcttttagatgcatgccctcagtttattggtgtgtttcagctccctggatcaccgatgtgagctctgctgtgttctttccattgtttttctttcatgttgatagcagtggacatgaaaagaaacccttactgtcccaccgacttagcagagtaaaggacggtttttcaaatccgtctttccgcacggagcctcgtggttctgaaagccgggttgcctgatgtgtttttggattgacttagccaaccagagattccaagtggaaaagagacctgagggtttcctctcataacccatctgtcaactcttgtctttgagtattttcacttgatacgctagcctctgggctacatacactaacaaggtcagacatctatttatcctgggtcttgggtatctatcttgctgctgattgcattaaacaaaagcaacaggtaatgtgcttagaattcgtctttctcttaacatagccctgggtatccagcttttctctagctaaagtgaggtgatgctgtaatgtctgactttggccctaggagctgtggtgttgagatgcggagttaacgtatttccttcacaggggtgtaagcattgagagggtagagtgcatgcctttcgggttcttcgccacaaactgctcacacagtattttaacctggttggatattttgaacagtacccagaggagaacctggggtcccaagatggagacctggcacacagtccaagaaacttccacctcttcttggtgtgtagaagaggaagaggaaaagctcacgcgcatgcccaacattgtgaaggatgatctgtatgtgcggaagcttagccccgtcatgccaagtccagggagctcttttgatcagttccttcccaaatgttggactccagaagatatgaactggaaaaaaattaaaagagagacttataagccatggtataaggaatttcagggattcaggtttgtctctgcatgctcctggtgttctctgtcccagtctggtggagtctgtgtcttggttttttttcagttagggagccagaaagcttgatttgccctctaacatctgtagaactctgataattaaagaaaaatgtttaagtgttatccttagactatacaggggggcctatgcctagaatcttagcactctggaggctgaggcaggaggattaaaagtttgaaaaaaagtcttaagcttcaaaatgaggctctgtctctaaaaacaaaacaaaagaaaacaaaagaaaaagaaactttctgacctacttgtaagctcccttccaccccctgagggtacttttttttttcttttaataaactgcctgtggcctatatttctattattaaaacacaacaacaacaacagcagcacaataaaatattccagattctagactttaaaaggcccccctcttatttctatctcagcatttgatttccaagcttacattcctcttcatttctttctttgcttcctccaccccccacccctttctccttgtcacttctcggcagaaggaattctgactctgagaatgaggattcgggctctttccaaagctccaccattttcagtagactagaaaaggcagaccataggttagacagcagctaccaaagaccttcactcttgctggagctagctaccaaacacgctatgaggtcacgtgacacccatgcagccaggaggaccagcagtgctttgcaggaatccaggtgcacctgtctgcatgagctacctgcttgtggctgaccagacaccttctctgactgcttctgctgctactttaacctagacccggagtaccgagtcatgggaacgtaatgacccagggtaaaggcacagtgtgtaacaagcatcctgccttccgcatgagggtgttgccgcaaagtcggtagaaatcaacgtgctattaatacaacagtgtgtactcttggcatacagtatatgacggccaactcttgatcacacattctctagggaggggacgagccactgtggataatggaattagaaagttggtacaaggagcggtgcccaggcctaggctgggaggtacacttgatcttagttgtaggtcaatgacttgaccttgatagtattcactcttcctgggagtatagcctcgtgtttctttagatgatactccaggaaagtcagagactagttttgaatatttgtcttgtttgtaatactcccttccatcgctcctaaaataagccccgccctccataaaccccgatgactactggttggtctgctgtctttctcctcatacttactacgattctccctcccttttctcttttctgtgcatcagtcagtttttattgcttcaggccctccaaacctactctgatgacatcttgtcctcggaaacaagtgtcaaactcgatcctacctctggccccaggctcataactcgcaggaagaatcgctctcccgcaccaggctatcgagcccatgaccttgagctgccagccctagatcccgacttagaaaatgatgatttctttgtcagaaaaacaggggctttccatgcaaatccgtgtgtccttcgagcctttgaagactttagaagtttctcggagccagacgatgccgtggaacgagatataattttgcagtgtcgggaaggtgaactcgtacttccagatttagaaaaggatgatatgattgtccgcaggattccagctcagaagaaagaagtgcccctttctggggccccggataggtaccagccagtccctttccctgaaccctggaccctacctccagaaatccaagcgaagtttctctctgtgctcgaaaggacacgcccacccaaagaacaaagcagcggctgtagagtgttagtcccttcctatcgacagaagaaagacgacatgttggctcgcaagatccagtcttggaagctggggactgctgtacctcccatcagtttcaagcctggcccctgcagcgaggccgacctgcagaagtgggaggccatctgggaggccagcaggcttaggcacaggaagcggctgatggttgagaggtcagagtgtgtttctgcaaggagttggcttgtgatggatgctcttgtgtaactttccttattggggaaaaaaaaaaagccgcatccatttttcagctctgcatgctgtgtgccgttttgaagcatcctgttttaaaaaaaaattatttggctttgagaaacttttagtcagttcatggaagacgtgtgattccatacaattccacatttactcagcttaggatgactggagaaggtatatgcaaagcttgcccctggcttgaaagagtccattagaacattctgatgtgacattggacaaaaatatattctaattgtgtctgcgggtttttatcatcatgtttaccacttttgtggcagtcttgctgtggtttgattttatgtgtttatcatattttgcagtctctttttttttaattgagctaaatattttctgaaaactatgtgattgcagatttcatttaagtcgatttttgtggtcattctaggttttgtgaactgtcagtttgtagcatttttatttataaagttcagtgcaaattccattgaaatgcatgagtctgtcaaattatttgtttgtagttgtggccatttctgtaaaacgagccacgtggcttcctgatagctcttcggctcgctacaggtggggaacgggcaaatttgaccaggctcaatacagcgaatggccctaaatctaacttagctcctggcaagtggaggccttttcttatgaacttgttggctcagagtaaatttagaaaatgttgatatatcgcttctcggccttttggctaagatcaagtgtagaaaatgttgatattatttgaccttagttcgttgacataggagacggactaaaagttgatatacttaaaagttgatatttaagaagcagctaagggcagctggttcagatttgcccatttgcagttaaactcaagttaaagacgtcgagtacttagaagcgaacaccgctggagagaatgaccctttttaatgtttggttttttggtttcttagactctttcaaaagatctatggtgagaatgggtaagtgtatggttcccattaaaaataatccctcctatctgtttgtctcctctgtaactcaccgcacctctgtcctggcatgtcactaaatgagtgctgtgtgcagtgcatgggacgtctacttactttttattaacattgcaaccctatagcaatatttttgtatctaaatgcccaatgcatgaacagttgtataaagcagtatcatttatttatttatttatttatttatttatttatttatttttggctgtattaaaatttaactccaccactttttctttttcattttcttttttaatgtaatgactgaaagtcacaaagcatcatgctaagactacgctcgttttgctatatgattcctacaatacactaagcttctggtttctttttgttgaaggtctcccccataaattacgtctttgagagcctgtgataggaaaagatatgactgcttgcttaatgttagaactcaggtagctggcagaattcacacacttagctcctgaggaattttattagtgggcacagttaatagttttaggagatatttccaagattcttgattacggtagaaattttactgtaatgtagctgcctataaagaacaaactagactttcaaaactataaaaagtaatcttggtcatttccaatattgttacaagaaatatatttaaattatttcgcaggtttggtctaccggtatttaaaattcagtggataaacatgtcaatgtaatataaatctgattgtctcacgtgttttcccagttctagactattttaagttgttattcattctcaatgcagttttacctggctttctgtaactgaaatcaattggtaatagtttttgaggaggagaggtgaaggacactcaatattttaatcagactcaggagttgtccccttaccatagtttgtctaatctctctgaacctctaagtttaacggtatttaatagtgttaatagtttggaaactttagaagctaccaagattgtcaacagaattcaccgtaagaactctagatgttgaagacacgactgagggataggcagctattgccgttacccttcccagtgtggcgtttgagggggaagaaattagtttttggcataacccttcgatatctgttcatcagttcattgcaggaaagctgttttaacttgatttaaaatccccttgaagcttcaagcatcctgactaactttcatgaggaatgttcatttggctttgtagcataaacatatctctaaaataggttaccaaaagggggtctaaaaatacccagagagtaaatacttggaggtgtgtagtaagcatgtaactacctctgacttggccctacctgttttttcttagagtatcagttgtgatgtgacttgaatttcccagggcaagagtgggtttcatggtagaattcatgcctagcttgcccgaggctataggttcggttcccagtactatgcacccacccttaccacagacacccataaagaaaatgtaaacatccaacctcaaaatgctgaaggatctttttcttaactgtaccagtcggcagcacatgcttccagtcagcacttgcaagtattggacttggttgtattggttatcagcatttgattgaaaaggctatttaaaaaaaaaaaatcctcctgtagtgttgggctaaggtaactatacaaatacagcaagataatcagttaattgagaccaatgaatattacatgacttgtctgataatggggcctcatgtgtcttagaaaatgcagctctgtttagaagcagttgtaaggttatttaatttccccctttttctcctatttttttttttttgtccaagttaccagtgatttccttacattgatttcttgcaatgagagtaaaatataaattaaaaatgagttacctatagtgactccattttacatttatgttgagtgaactttctctaaacataatatagtggaaaagtttgttactttgtaattagaaactaactgcccattcattatatgaatgctttatttgtgctgcagagcaatttgaagaggaatgtgtagggctttttttgttttggggtttttgtttgtttgtttgtttgtttgagtcctttgcctattaaattccagcttgcattttgtgcagttttgggcgcctgcgcatgctgtgtgttttactaagttttggttggcatgcaatccgttatgtttactaagatgctttgtgtgtgactgtcagttctcatgtgtgtgtctttgtgttgcatgaattttcatttgtttggttttatgaagtttgggatctggtcatatatgatgatataagtgaggtactgacaacagtttataaaaatatgtataaacaatctttcaatgtaataaccactaaatcggctattagtatcacaagaaaataaatgccaattacatgtgaattgatggtcaaagattgctaaggcagctgtattttccttatagagctttgtcaaatgactttgtaggattatcaggtcataacaatcaggacatccgatcaaggcaggcaaaagggaggtagacaagtgacctgggttattttctgaggatttttttttttttttggcatgctagaggacatctaggtatatctagaaatacttttcatattacagccaagtgtgtatgctacacttagtactttgtaaatgccctgcaatacccaggctaaccctctacaggacatgattttctggctgaaatgtcaatactgtttcccaaataagtccatcaatctataaatgaaaattctttcttatgctcttttttttttctacttgatagtaatttcaaagtgtcacacataggtttgaatactggctattcatcacaaaattctatagtgtctaatgaaaatatatgttcacatagataaattagcatatctatattgcttccaaagctagagacccttaacttaattctttttgaatttcaatgaaggctatgagtaaattcacatttagggaaaatggtctgatattggctctttgggcacttctgttctatggacatccatctgccagtttactgaagttggattttaggataacccttatttccagcagaaagtgccagaagcatcatatgcaatcaggggagcacaaggaaattatacctttgtgattcataaagatttcttcttaaacttcttcctgtccttccctaatactattcaattaattggaaaggcaagacacttgttacacctggatttgcagggagcaaatataaatggagatgtaacccggagccttccgagtaaggaagtataagccattgtagcaggtaactctgagagagccgtgtgactcacctgtgcgtggtccctgctaggcctgtcctccaagatctccctgatgctgtcttcagggcttatctcacttctgggaggcagacagggaggtgttatctgcattccatagatgtggagaaagagaccgagattgcggctttcccaagcatggaggctctcagggagtagaactgggctgggaccgtgcctcaggagaaaactcacagagactgcttggcagcgctggggccactcaaggatctcgtgagactctgatgtcatgtggttaatgctggtaacgaaagacttccatcatcttttgtactccagaagctgtagatgttatctctgtggtctggggcaaacccttttaacttgaagcagtttacagagttagtatctaccagattccattcagtcagaacctgccttaataagatttggtatatagcaccctgctttaaaagttacgcaccagcatagccttacctaggtatcctacattagtagaccaggagctggagaaggaaactgactcgtgttcagtgggtggaaacccagctggtctggagccctccctccttgtcgcttgctggagcttacagagaccgtttcggcctgtgttcttgctttaatgggggtaactttatatacccccaggaacaaactgtgctcacattcctgcctatacaaaaaacttgtctactgtagctcatgtttggctcactttgttcatgctgtatgcgtctgggctgctggacccagctcagtgctcaggccctcaggggagagaggccggtggtcttacctttgactggcacactgtgtgggaacgtacacagtaatgcttcccagcccaagaggaggaaaataaggaaaggagccatggaaggttctggactagttcaagtttcttcttcccacagaaagtttagtggcgtatcaaatcgtattttatttttgttttctagtttatgcagcctcaggtgttacatatccaaccccttcttatgccttggatctgcgaattcccttcttctttctattgaatatttttgttttgactcaaaaagcctcttaccatgtaggcatggcttcagtgagtttatattctcaaattcacatgattgaacttgggtatggagttatacctagtaaattatacatatatagattgacatgtttttgtatagctatagtctatatgtaattgattccctactaagtctgtacagtactataaaacttggagagcagtcatgctttcccacagagtcgatttggattttctgcttgactatgctcagcgttatctcattcttagcacagatactgagtgtatctgcatgcatggtactgcactctcgtttcctttccaagaagcatatggcttgtgagagagatgatctaggcatgcctgtgcatactatataagatgacaccaggaattagtaaacatgagaaatactatagctaaagtactagagcgggtgagagaaaggcagtccacttttcacatggaagaaccacgaagactgcatgcaagtggtagaacacgatctagattagattagatcattgactgaatgtgtttatggagtatgcactatggactgggctttgttttaagcctagtaatctataagcaaactgtaagatgtaatgtctgaaaatcttacaggacccagcacgtaatagggaaataagaatgtcttagatgccagtgaatgtccaaggaaaagaggtctggggttggggtcagcccaaagagacaggcatttgcaggatggaaggaaggaaacactgaatcccatttaagtggatacctggaagtgaagagaagtcatgtagctagatgaaacgtattctgagcagatggaagaacaaggagagaagcaagatgggtgagcataaggaagacaaccacttggcaggagagtgaggcagagtgttagaaatgagtgtggaaaggcagcaaggggccaggttgtttcagacctcaaaggtcttgaagattctacttagaactttgatgggaaaaagaaactcaagtgtagcggtcgttgagtaaaccgtacctgcgcaggagctatctggattcctgaatgaaagtcacacacacacacacacacacaaaggctaggtactcctaaaccttcccctggccacttactggaattcttacatggctggttggctttcccccctgcagctcttaggtcccatccttctcccccgaatcatggcgattctctggcttcctttctcccagttcctagcctgtgcaaatttaaaggtcctgcttcagtctctctgtccagccattggttgttggctctttattgacccatcaaaaaccaatcggggacaaggacggtcagcgctgtacaggcagattcctgattttgggggctggattaattcaaagcattggagcccacgtttggagctgagtgtcccatgacccgaccgtgacctagaaacctgctctttggagcatgttgagctggatggtggaagccgacagatctttgggattctccaagtggatgatgtggtgacagtgttgatcagtctgatgatggggaggaggttagaagttgttggatcctagaaaaagagaccagatgaattatgaatgaaataagtgtcttgacagtaagagagcaacctgggtgacttcaggaattttgaacctaacagtggaaggatggagttgaccttaactgagatgaggaaaacaggtggtgagcaggcgaccgtagagagagagcttagccatgattgtgagtggtattttgaaagacagagaggcaccagccaagggcttttgagttggagggagcatttgagggaagccttctccagtgataatgtaagcagctggtttggaaatgcaggggagggttgtgctcgacctagactgctggcagtctgaatggaaagaaagccgcattaaatgagaagataagtaattgaaagtgaggagaaacaaaagtggaaagtggttcttagctttcaaatgtggatggctggggcgcagggaccaccattaaccatcaccaaggaaaagcagcttgagattggctgtatcagcagtaacaacatgtctgctgaggcccagtttaaaaaaaaaagtctttttcagataacatttcagcaggtccctattcaagcataagtgcgtattcacaagtcattggaaatgagtcaaagaggggcagattcctggctggagcctccagaggcatttgcttagtagttacaactgtattcctgaaccagctcagagtagatttagaaaaaaaaaaaaaaagtgatagtagatctggggagaatacaaaacgtaggtgcccaaggatatagtaatataagtaatatatgtttagttacaatgtaattaagctcagaatacaataaagaggatttcagctagcccaccttttaaattctctctcagactctctcattgctctcagggatgagctggccccagccttcctgagaggtctttctcatcagtgtggtctacacaggggtagtagtcacttcccaactcggccactaactctcttgtaagcagtctctttactacaagggagcaagctttatactctccgagagttcgaagtctgttagaagatcgtttctttacaatggtctttaaaatatgtagcagtaatggggggaaaaggttttgaaaccctccactcttggctttattgcctgattgcacatatccgtatacaggggccacaagtcgtgaactctgcctgatcaaggagagggtaacagaggtggttctgatgggctgtgggaacgcctcatggtcttctgtgaatgggtccagctgcacagcagcagagtagatcttagagaatggttgagcacattgtttcatggtgttgaacttgaggagaaaatatcaggtagtcactaaattatttagtaagggcctgataaaaagaaaaagaaaaaaaaaaaaaaacagccaaacttgtactaggttatctttgaggggatatggacaaaacagacaaactcagacaggtgttaatgacgtttccccccaagataattttagagttgacccctctaaatacaagcaccggattaccacttttagaactgttcaaggttattttgactactttgtggaaaagaaaaaaagaagcgtctcacatgtgagttggacaccaggctcttgtttccgagctttggaaaaaacaccatttatcggtgtggcgctatttcagggacactatcagtgaagcatctgggtagggcagaagatatttcggtggaatttctaactataagcccagtcttcatgtgaaccctcaggccagctgcgagaacctttgtgactgtgggtgtttctgtgacaggagcaagtccatgagcgatgtcagcgcagaggatgttcagaacctgcgtcaggtgcgctacgaggagatgcagaaaataaaatcccagctgaaagaacaagatcagaaatggcaggatgtgagtattctaccacgagggcgggctgcatgtcttgcttctcttcagaggaagtctgggtactaaagagacagttttccttgctattctagattcagtactgtagagaatgagaccaaagttctgtcctatgtcttaaagaccactgtcaaatatagaagtgtgcttatcttctaagagactgtgagttctcaaagagcgtgaggtttcttcctagcaggagagtgagctgcttactggagggagtggctgggttgaggtatgatggctaattgtacctctgctagacaaaagagcattgctcaagattgagatgggagaggaacaggatgtgaagctctgatcttggcattagtggggagagttctcaacgttaccttggagaccaggatgaaatataactcagagtaatattttggttgaagtcaggatctagtgtgattcaacattaaccatttctgtagagctggcctatacgattgttcatatggacatagacttaacctttatctcgatcttaaagaatgacttcatcagttggatgaagcagttattgcaagctgtaggagtgtaaagggctgtaattggtaatcgtctccccaaacccaaagaacttggaaggctgcatagtaagagcgttgagtaacaacatgagcaaaaccatcagagaaagtcagtgctgatgtacaaaggcactactctgctacaatgtagtgagtgtcctcttatttgaaagttgactgaatgaacacaggcctcaggggtgattccatgttagggtgcttgcctcattggtgtgctgcacccctgcaaaacccagcaaagagctcagcatcacttgaccaactcacgcaatgagtttggataaagtaaatatcaaggtgggctacatatcaggggagacgcagaggaatatttgggtcactttttttctttttgggaaaagagttcgtattggtttcaggtttcaggacagtgggagaggccctgggtggcccccaagtttagtaggcagacttactttccaagccctgggtgtgtggagtgagatctggtttggtctgagaacttggctatccttccctttggactggaatttctcttggaatcctcactacggtgtttctctggtttggaaatggagaaatatttgttgcattcaaaatgtgtcaatccccgagtgtcacaagtggcttgcgtgcctagggataattggaaacctgcattaggtacattgtcctggctgcttttgaacatgtttctggagatgtgggaagcaagtgtgggcttatgactacattatgttccctgttgttccctcccaggtgaacttgattctctgaacctaatgggtatcccctataatctgcaattccaccttctgtagggaagaactgtgtttttgtttgtttgtttgttttgttttgttttgttttttcctttaggccattctccttggcagacctaccacacaaggcactgatctttatgtatagtctaccttatcgagaggaaccacatcttatgcatctttgtttctggggcttgaactagatggaacactcacttgagctagactgttccagagacttttctgtccctcttatcagggtacacatgtgaatcaggggtttggggtgctatgaaattgaatttgaaatatttcccggccaatcagatctagtacctaattgcaagcatttagcattctttgagaaatagacattgatgtgatactttctaggataacaaaagtgagatccctcttattaggtcaggtttttccggcagacacatgagataaaggcttggtacagaaacactggctataaaaagcaaaattaggccaccttggcacaagtgggagtgaacggtttcagcattgtaatgggatactccagcatgctcttgctgcaaggaaagggcgtgtagaaattcaggtatgaccaggctgatgtgatttcttgctcaggaccttgcaaaatggaaaaaccgccggaagagttacacttcagatctgcagaagaaaaaggaagagagggaagagattgagaagcaggcactggagaagtctgaccgcagctccaagacatttagggaaatgctgcaggacaggtaaagagctggacaccccttgtgtttggagagcccagtgctgggaacacaggctttgtatgtggtggggatgtgtagtctccagttttaaactgtaatcatatatgtgccgtagcagtcagggctttgaagtgttaaaataatgtggcagaattagtgatccgagttaacaaaagaaaatactacttaacattgctgaggggtatttgtacgctcttctatagaacgaggagatattctcagtatttgaaaacaacaacaacaaaaaaaaacccactgaatttctcaatttaaagtgagtttaaagatggggtagtcaagtaaaataaacctttaccttcaaatggattttgtgaactctaacaattcctcgttgaattgtagtggtagaggctaagttagatttttaaggaagtccatgcaagtgtggatgtgtgggtttgtttattctctgagttgtaaaagcaggataaaagtgaaatttccacttccatgagtgagaagttaactgtgtggctctgggggagattggtagatcagagagaaagcaaatatgctttcaaaataatgtcacaaaggcaatatgccagcaggtgaaattaaacaaagctcctttgtgtccaaaatgccaatgatgaagagctccattcacctctgtacagaggttagcccgggggtggggcagagactccctcccaactgccagatgaagctgtttcatcaattctctgtaagtatggataataagcttgaatctattataattgcccatggggattctgtcaagctccgtgaactggccggatctctataaaagctcatgtctttggtgctattatttttatcaatacattatgaactttataaagcaaaacttggcagaatcagattggtcgtcagccacctaaagcattttgaaagacataaatttgtagctaaaaacctgtgactaatcaagtgttaaaccttctttattttattattacaaccttttatgattaaaaaaacccatttgaagctgggcgtggtggcgcacgcctttaatcccagcactcgggaggcagaggcgggcagatttctgagttcgaggccagcctggtctacaaagtgagttccaggacagccagggctatacagagaaatcgtgtctcgaaaaaaaccaaaaaaaaaaaaaaaaaaaaaaaagtacccatttgagactctccttgataaaaggtcagatcagtttcttagctgatgcttaaaaattctgcataatcccattagtgttgttgctgatttttgtgttcactttacattttagtcattatcttaccccatctggggtcaaatgcataactctgtcgtaatggcacatttctctttgcccagggaatctcgaggttctacagttacgtcttggaggaggacctattcctctgatgacatcctcgatgatggagtgctccctcctacagtgactctgtcagaaactagttaccagagcgagagactagaagatgaggcaagagcgcatcctgctgagatgcccaaagaagattccacaacatttgcaaatagagaggacagtgtagtagctgagactcagcttgcttctcacagtcctgaagagcaacgtctggccccttctccttctgaggaaccgcgccaggcctctggatcttctgcagaaccgcaccaggccccgttgctgtccacagaaccacgccggacccctttgccttccgaggaaccacaccaggcctctctatcttctacactacagcgtccatcctcactctcttctcagcagtcatggagtacaagagcagagtccactcggatttcagcttctctccctagaagttaccagagaaccgatacagccaggttaacatctgtggtcacagcgagaccttttggcacatcttcaaggggaatctcctcactgcccagatcctacacggtaaaaatgccctaggtttctttaatctgcccctgagcacaatgagttgggggagcttgcacagaggctgagttgggcacagatactagatgtataaaatgtagatgatgtccataaacaactttcacgacaatttagatctagtaaaaacgagtgattagattttaaagaacagataagatacattttaaggcagaacatttgggtttttttttcttgtcatattttttgattctgaagtattaggttggactttatgaaactaccagcagtcatctttgacctatagtactgaagttttacatggctcttgttaaatgttctcagagttatatttgtaaggttttttaccctatccttccttcctaccttagaacttgatgactgagtatacttttaaaaaaaaatgtccacttgtatctctaataggggttggcacgtgtgggacatgttagaattatgtaaatgaagtagcatggtctgaatatttaaaggtcatggttctgttggttctacccatctatacttcagatcttaaaatcctgacatacagatgagaagaattatggcttaaataaattagtgtttgaggtgagaaaagcctgcctaaatcatccaggaaatccccgaacagcctacttaaaaaaaaaaaaaaaaacatattggattaaatctatatggtaggtactattagcatagaacagtttgagtcactgttgctattgaaaggcattacaaataaagggttgacaactcccaagatgcaaggcatttccatcatttgataagagataaagataaacactagcaatgggtgtagaaaaacaagtcggtcatctcaacgcaaaggaattcactaaagcacaaagaaaacaggtttaacctcgtgtttagcatgaggacaaaggtaaacaaatttttccctcattggacttagaaatattttaaatgttcaaactacgtggtgttaccaaggctgaaaggcaggcgtctgttttcttcataaagatgacaggcaggtactgcagatataaaacctttgacccagtgagtttttggagtgtctgggctataaaataaaagctccgtttaaaaaggcatgctccagttggtcgcagtgctttgggggagtgatggatagctcgaaagaatttaagtagctatcaaatagagaaatgattgatatccacactctgggatgtctgacaattcaaagagctagtttggagttgtatcttttgacttgcagtgatgtgaacaaacatagggaattttagaaatctatacataatgacgcttttatcagagcatgtgtttctgtgcacgtggatatttcgtagtgtgaaggaacacactccaggcctttgacaggagttaccttgctgtggcacacatgtgtcactttagtggctttaaaatattaataagtctgttaaaaaaaaactgatcctaaggctagcagaatattgagtttaaaatgatgtgtcctaatttagatggatgatggctggaaatacaacggagatgttgaagttgtcaagagagagcaactcgatttgggcagagccactggcccgaagcctgactccagccactttatttcgggctcagccagtgagaaggaggtcatagccacagaagatgtggcaagcttgtcctctcccacactcccttcctcatctctctcccacgaccgggcagtctcttccaaagccacgttctcatcaatgtctggtttggattcagtgtctgactctggagaaggaagaggctcaccattgagggaagtttccaggtccctggtaagttttggagggttctgagccatgtggctcagatacttcaagattttaatctggaaacagttgtttcagcctttggctttacagtacaggttgctatttatattacacaaaaatatagtatggtctatttttaacagagtgtgggggcagtcggtcccttccagcttttagtttgtaaatcccagacaaccttcatgagctgtgtctctagaaacatggtagaccagtctcttggagggtttgccttaagtttttattattcacgtttctccagttttctgctgcagaccattaatgtatgtgtgagtaagcaaagcccttctctgtggaaatcagccagctgcaaagagattgtcccatttagtggatgcttgtctctgtggacacagcattttgttatagtgtaaatttttggtggcttctcctacaaatttgtacttcagaatggcagcatttgcttttactcctgtctctcagtgagatcagtgaggcttggttagagcttgacacctgcgattctgaacatttgaactccaaataaaacatagcggattacaaacaaatggaatacttgtaatgtttcctgtttaaaaccctaacagatggctttcaacagaattattagatgatagatgttttccggtctacacgtaaaaaccactaaaagtctttgtcaagcaaacaaagcttctacaaaaaaaaaaaaaaaaaaaaaaacaaacaacaacaacaacaacaaaaaacccaaaacatatacacacacaaaagaacaaaacttaacaacacttacgttaagcaacttgctagctgtataagtccctttacatagaggcatttttttgattgttggcctggtccctaaatccttgttagtcttactggagcatagttattttccaagtcaaaagataaaatgtcacttgaatatgtgaataaaggagatttatgtgaaatagttttacatagcatatttatttaggtttattagatttttaattgtataagaaaataaaaaaaaaaaagtcagcctccctccctgtctccaggttatgatacttactttgtatctgggaaatatgaaggatacaagaaaaaaaaatccatgatgaatatgttgttcagaaataatcggtgttagcacttacataactttttgttttgtttttgtttggtgataggtgttttctggttcctgttgtttagctatttttcctgtatatattttcaaatatatctctaagacaaaatttttcagcctgtaaaaaccatcagttataaattgcaaatatattttaaaggaaataggaatttatggtcatcattacatgtctcaatggatgagaactgtgcctctggtactacacggggactgaaagatatcaataggtgaatataaaaccagaggcaaggtgtctcttgtcctatggatttgtacattgtcttcccgctgtcaaaaatcaaatgtaacaaaacagcttgactaatgtgctgcctgctacgtgctgggccctccttcaaggtgacagctggcaaactgcacccatggattagggaaaaaaggccatgtgtggtgtgtgtctgggtgtgtcttctgctctggcaactgcaagaagcccagatgaacctggcttgttccaggtttcatcacagtggatttatgctgtcatcattaggtttgaagcctaattctgccgtggaggatttggctgcatttaaccattggagctagtggagttcttgagcagtcgtgtatttcctatggtgacttgcttgtctctatttggactatctatttctatgctaccaggagagcatcttgtggagctggctgactccagagaggctgtgtgtgcccaacacagctgatgagtgtcagggtccttgtacatcagtctgtgcaaatttgtgcccaaatctctctctataactctagatgttcacagggaagaaactctgagtggctgaacaccttgatgctttggtagctttgggaaaacatgttcttttggtttctctcttcattcccctgtgcttctgctactaaaggccttatacttttgtctctaggatctcccatgtaatgaccctgttcaatctcagttgccactgttccaatgcaggaccttttcctgtccatgtagatggttagaagtagcctcatgtgtgtttgttctgactcagtaattttgctgttctagactctgctgaagcattctatcctttgaatgaagttcagagaactcagtagagtaatggtgttcttcataaatgagttcagagtcccttcatcatacctccgtatgaacatgttgaatgagcacgtgctgtattgaatgggctaggcaggcttcacagggttatatgagtaaactctttcctcagcccagtgatgtcagcaccatcacttttagtctcacctacagagaactgaaagcatagatggtcacactatcttttcaaggtcatccatggcactaagtactggggttgggatctgaactcagagttttatcctagattgcctacctcttactacatcagggaaagagaggtgcctaagaaagctagttttgtttgggcacatcagatacgttagtcattactcttctctatttgaagatgtttactctgcttatctctgttgaatgcctttcaagttcttcaaagctgggtaaaaccacctctttcatgatccctgtgttttatcttcctgattggaattgaaccaaccacccttgaaagttaactttttccttgttgcaaatatccttgtttccctccttcatagatagtctttgtacctttcagtcaacatacagatttcagttaatgctgacttgacctacatcggtgctggctcaagctatattccaggccttggttaccagcctcaagcgtgatcctgatctgggaggcaatttcagatgctttttggttcttgagcgaggggactcatgggttgagggatgcttttggaatgcaagttctgatatgttacacagaagtattttaagaatgcaggtgaggaggcagagggtgggaacccatctcagaactgtgctgataatgtggtttgggtcgtaaagcagggaaggtatagccatgaaaagacctgaacatgggtgctttcacctctgcccacaggagcttcctgttcctccccatggctgagctacaggcttcctaggtcaatttacgttgctagggaccagagagaagaggaagagatttgactcagagtccttcctcactcttcaactgccttgccttgcagacttggctttcgagatgccctctctcagcgggtttttcttggaagtttgttttctatcctttcagagcctcttgctttcaaactccacaccaatctacctcccagaatctccacctcagcctttgagaacaactcatagaaggagaataataacaatacatttgaaagtaggaaacgttctacatgactttgactccatttatgagctggatacggcgcaatggtagagcatttgcccattatgaggttctaagttcaattctccagtgctgacaaggaatccttttaaatatcaggggtgtctcgttcttgtttatcccacttaatcatctcagccacttctgacttatttttaacatttttgaattttataaccaatagtgattgaagtgtcttctggcctgtagtactaaaagtatctcattctagcctcaacctctcaattctcattccccagccttcaccgtattgtggttctaatcatcactctcatgcctgacaatgaaatgactcttcaaatgattgtgtggagaggtggcatatacatactgaaactcacctgaactgaacttatttcagaaatgcagaatttgaattcaaccaagctggcactagggagctattggcattgtgaaatttggatgtagaataatcagtatgttctataagtagatttctgacagctgtggggaagaggggatggggctggagatacaagagaaaaacaggaggtgataagaggagagaggggaaatatgcctctgaactctggtggggacatacagaagggtgaagaagctgggttcattcaaggttggtctataaacttgggagcacattattacaagggtgagcaaggcagcagaaggggaagaaaacagagaggggcatttctgactctcacagtggttggatagtgacacatgtaaccaagttatgaaaatccacaggaactagaacatgtcttggcggaagatgctttaattttgagaacattggacctagtcatttaagacgtgttagtgaatgcaagttatttaggcaagccatggtcagaaaggttatgactgaggaagtccaagatgagagaggaggagaacagcacactgataagactaagatgaaggtagagagactgtgagggttgggcaaggtggatagggacatcaggtgacttagaagagtgttccccactggtaaggacctggtaggctgtatgcactttagttgggttttgtagatagaagcttggaaggcttgaatcagctggtcggagtgggcaggccaccttcggctctaaagtagtaagtatacagaggatgcccaaaggttgaggtctatctttgggtaagggagatggctccagtgttagagcggggctgcgacttgaaggccgcttccctccttttctcattccaaggagaatttggcatgcactaaggaactttgtggacagaaatttaaagatttttttcctttgctattctggactgtgtcacccaaatctacttttagtggtttttttttttattattaaatatgtagggtttcctaagccaacacgtttgtctagttagaaacactggaaaggaatagttttcttggtgcataagatagactctgtttctcactcccagtggtagtgccatggaaattataattcatcaactccaggagaaataattcatactctggtgacatcaggtctatccttagacaattaaaagtctcctcctggctcatcagcctgacggtaagtggtgcaatctcacttttagtggagatttctgttcaaattgtagccgatccgagggagactgctttcagcgtaaacgctgagccattgatggatagctatgactttctcttttctggcatggacaactgaaactccttgggaaattcatttcttagtcatcaaaataatgtaggtttcccttgacaatttgtacgtttgtcccatctagtgcaaagaggtaactcctcgattgtcttctgtagttcagagcctttgtcctacgtgcacatggcttaaatttttgtagagaaagttaagaagttagaggtcctgcctgaagtcattgttactagttgaagcatgaccaaattgtagctatgtttacatataaaaagtcttaggcataatctagtagtataggaacccagcacttcacaggaatgtcctaaagaattctataatgaagaaatgatacaactgggagcctgtgacctacaaccctaatcctcaaatagctctcacctacttacatattgtgtttgagcgtgtatgtgtgtgtgtgtgtgtgtgtgtgtgtgtgtgtatctgtgtgtgtacacacatacatatgtatgtgtttgtgaaggatgctgtgcacataagattgtcatttgaaaggagagcttcaaccatgaaaaaccattgtcagttcgagcaggctctgacattacattcaatgtcatacatggggtaacttggatattaacagatttcccagtaattgtccctaccttgttctgtctttgtgttttgtcctgagttatggacatggcagtctggccgcttgtagccatcgcaaaaccatcctctctgttaggttcatagaggtgggtatctgttcttttatttaacatgttcagagatttctttattttcaagttcaaaacagccttgtggagagaattcttagctgtatagctctctctcttccacctctatggttgaagctcattctcctttgtgctttatttggaagaaaaggacaatgttcaatcgcagtctcccacagagcatttttttttaacatctccatgttgagactattaaaacaccatctcatcttttattcaactaataaaactccggtaaatggtttgactgtgtggcccatcatttgtctctctgtctttgtataacaatagactctgtgctgcccttggctttaggtcagatctttgtgtgtgtggtgaggatgatcacttatttccactgggtctcctctaatttaggtgtgccgtggttcttgctaagcagtggaaccaaccagtgcttttctctgatctattctcagacaagctttgttgccttcagattggcattcagcaggctcattaggaacacctgtcatgggaacatctggatgcctctatttaaactctttccaaaggcctccaggtggaaacttctactagctacactttcatcttgctttaggaagctctcatatccacttttgaagagctacagttacaattattcttaagaacaaggatcaagcctcactcatctttcttttcccaagtgctaagtgccatgtctcccagagtctacacacagtaagtgtatgttgcacagtgaataactgggctgtattactgtgcttccatgcatttataaagctcggcgcctgcttatatctttgccttccttccatttttgtaattcctacacatcatacagtttttctcagagtactgtcacttgaatcttaaatttactttatggttgaaaaaacaggcagaaagcttattactgctttggttagccctaggccctagcttgagggtaactgccaaattaaaatgaagaattggcaatctgtgatctggaaagtaggtttgggaagattttttttttcaaataggtgcatctaagttccttatgattagataataaagaaccgaaagactaatctgataaactcattattatttatattcgtttttacccaaataaagtgtatgttaagtaagatgtttcaaatttttaatgacatttgcttgtttatgtgtgttgtgtgtgtggtgtgtggtgtgtggtgtgtggtgtgtggtgtgtggtgtgtgtgtgtgtgtgtgtatgactcactctctcagaggacagcctgaaggggttggtctctccctctaccttctgaggcctggcgactgaactctggttgttgggcttagttgtgcttttacttgctgagccgtctgctggtcagtgaaagatgatttagcaatggtagcttactgtaaactgaaacttggtttagaaaaggatttatgaaaatcctggaggctggagagatggcactgcagttaagagcactgcctcctcttccagaggatccaggctcagttcctagaacttgtatagtggctcacaactgtctgtaactgctgttccagaggatctaatagcctatatggacactgctcacatgacgtacacacatgtacataaagacaaaacacacctaaaataaaaaatatcttaagagagtgaggagggagaggagacacacacacacacacacacagaaagagagagagagagagacagagagagacagagacagagacagagagagaatgagaatatgaatatatcctgggcagtttaggattatagtaagagggtggaagtaatattctcctttcctaagatgctattgttcttgggacgctttaaaggagccaggatctgtctgttactctgggtgtcttactgtgttgttcctctcagatgagagaacagagttctgtgttttataccacgggcaccagcaatgtctttgcctctgtatccccatgaaccagttgagccaacaagtatgcccagtgcgactggcctggtcaattccagatggattactcctgctgaggactaattatatatctatggggcatttgcctgcttcagctaccaatgcttaatactggaggtagattatttttcaatatgttgtctggcattttaaaaacagataatgtaacttaactctatttcattttaggtgatgaataaatggtttgtaaattagacttgcttgtatgatgaacagccaacctagactttattaatggccagcctatttgtaggattgtattaaaaggaaagaaaatgttggttgatgataaatttgcccttaccttattttagcaggaaaaaaacctacttaatgatatacatataactgaacatcttatcaaagccaaggaaggaagtgggaagctactgttttatggtggaggagtgagggtgtaccttggtgcagcctcccatcttaatggataggttttcctctgtgtgggtgccagggacacctgatagcagcgtttcatgttttactttcaggatcagttcagcgatatgagagtcagcataaaccagacgcccgggaacaaacctgtctttgggtttacgataaaatgggatatttctgggatcttcgtagcatcagtcgaacaaggtaactataatcctaacaatagacctaactctattgtgctcccttctcttctgtgtatgtgggaaatgagaagtgacttgatttggaatgtagtgggtacatgtgggaaagatgcatttcagtggaggcaaaggacagtttcttccctgagacaaatagttggaattacatattgtttattttcccttcctaattcatttgttttgaagaagctctattttgtaaccttagagggttttttttttttttaaagactcaatttctagaagtgttaacatgtagtacttacctgaaagtctaagttttctgtaaacaattgtgttttgtggtaggtgcataaggcaaccaacatgggggttgtttacattgttgtttacagtggctcgacccaaatgtgtcacacatgctaggccctctgtccgtggtcacctcccatgaagaatattttctaagcattgataatgttttatctgtcacgttttgtatgttgacggtgctttggaattctgctgactgattacttcttccacagccagggttatgtcaaggcaaacacagaaactgctcaatacgccctcaaggttgaaaactacagtgatatctgtctatgagaggaggtccctctttaatgattcctattatccagaactgtgtgttgagttggctcttttaaaattgttgtaatcattgtgctttcgtggtagttttatgtggtactctttttttccccttcttttcccacccccagagttctagttgatgctcaattaatgtatatatttcacatttttagtttaaaaataattacattgcttctctttgtccctcagatgattaagttatttttttattgtctgaatttaaaatttctcctttccatgtaaacaaagatagagactatgaaataaataatgcccttggtacttcatgtggtgtaaggattcagatattagatatatctgagatatgatacatatgaaaatatcggtgttactcccctactggaaatgaattgaacttgctgagatgaaaaagtcattctctttaatttaaagaaacagcagagagcatactgtacaggtttctcttcatccaactgttccctttatgttgtttaggtagcccagcagaattttctcagctgcaggtagatgatgaaattcttgccatcaataacaccaagttttcatataaggatacaaaaaagtgggaggaagttatggcaaacgcccaagaaactggaaacttagtgatggacgtccggcgttacggaaagtctggtgagttcacttcccactgtgtctggctttttaaataaggaaacccaacttgggcagatggttctaacagttggcttcattaatcctctccccacccccattttacatagctttgtgcttacagttgttttgtcatcgttgttgggacaaatcacaaacactgcctctgagtattctttctgaaaatgcttcactagcaaatctactgaattcgacaccattttgcttttttctgtaactgatagagctgaatgtacatgtcaattaaaagcaaatgtatctgtacctgggagtcgcaactattctttctactttagcaactgtgtgtattcgttacttgatcttcatgatcacaaagctaagcattaaaaacggcagtgtgaggtgggcagtggtggctcacacctttaatcctaggactggaaaggcagaggcaggtggatatctgagcctgagggcagctggtctacagagtaagttccaggacagcctgtctcagaaaaaaaaaaaaaaaaaacaaaaacaagaacagccaaaaagaatggctgtccagtttcctgttctctgcactattcaactatactgctgccctcaaggtcccagtgggacatgttcctacctattctcatagcagtttaatctgctttttataccatagtgtttctgtgtcataggtgatggtcaggtggaagggagcattgagtctcttcagtctttgctattggcatataacatgtagtcccaatttaagaaaagaatcagcacatttgctagttttcttgttactaactaccgtgattttttaacttttgtgtcttgggaaggtggtctgctggctaaagccctaaagtctctgtcatttacatgtgacttgattcacctgtctgactgtctgtacatctatctgtgtacattttatatctgtgcattcagtaactgtattctttccactttaccgtctatgtgtattccttacttgatcttcatgtgccaatcagactggggcaaagaccaaccttccctgccatttatacggcataaaaccctcaatcttaccagtgtggctaccaaaattataggttcatctgaaacaaagtggatcgatacaacatcaggaatttacaactcagacaagtcttcaagtttatcagtcacaactgatttctctgaaagccttcagagtcctgtaagtagaacagagtacccctagaggccatagatatgggggaagcaatggtttgtgaaatcattttgatacaatataagataaagttagggtatactgagtacctagactaagtgtagctttgaaaatacgtttttattagcagcctatcattattgagttatgtaatgatattgacatcccataatgatgttctgcccgtggtgctcaccagtgtcaacatcacaggcctctctcagatctgtgtgaatgagaaagagctaatgtggaagattgcatgctataagtgatctgtgtgctctccagtcaactggtaaagtgtgcaccatggagcctcacaaagcatcttaattcttacatggtgaatctgatagattggattgcttatgtgaccaagacatcatcagttttgtgaattgattcaaaaactataatgtatgaaatttcaaaacgttaaaagcagtatttttttcatgcagttttttttaaaaaatgcatctatttctaatcataattattcattttcagttgataatttaaactttgacctgaataaacttatctaatataagaaagtattaatacagttttgaaggattgaaatgttaaagaatcttaaatggctgttttactactcataaatataaaccaaatgaaggactgattattttatctatcatgcctctaagaacatcaatgactgattaaacttatggtcatctttgcctgcagctagtcattaatccttttacaagtattggagagtcatgaaaaacattaagattttactacacataagctacgaggaattaatcaacaccctgaaaaacccatcttgtttaaagatacttttccctaatgagagatacattatttaattccgaagtccaatcagacagaatgttaattagcttttctcccgctttccagtatactgaatccaaagaagtcaatggaattcacgaggaaagtaacccctttgattcaaaaggtaaaactcactcttaaattgcttctgttggttgcacatggtaaatcataagctcaagatctgccataaaagttaatatctgtaagtgaaggaaaactggaggcacagcaagtttaaaccaaatagcatgtagatgcaattgtggccaggtgagagggagtcagtgccagcctggaatgtgtcaagatctctaaacaagctcagcagcctgctcagggctctgggtacctaagccaagggagaacagattttcccagggccagcagcttcctggctatggagtgttggcagaaggatcttcatttaaacacaaaatggtgaggctgcccttcctccctcactgttttaaaaaggaccaatgtgcagggggcagatcctggcagagaaacaccaatggcagcaacagttgagggaaggcacacttgtctgaaaaaagatggcagagtgtccaggctgatgttagagttctcactctctgctttgaccgttcagcaataatctagctactgaatattgtgtgctattctgtagacataccagaaagagttttcaggtccatataagcagaaaagaagctagaaaaagctacaggtcttacaccatgagccagggcctcttgtcgtaggactgtttgttttggtgactttagacatacctgggcagatacattgaacaaagctgatcaaagtctgtgaatctcccgtgattagtatctctgcccttcatttctaataattagaagctggggttggttttattttttcctttatccacatagttttaaaatgagaattgcttatattccttcatgatactaaaatcgaagggatccctgttctgttctgccagtggcccgaatagtagagccaattgatatgacgtctacattgtgaccttgggactctgtgctactcgagggttgtttagttaaaaagtcagcagcagttgttttcactggattgttctttatggtgaactgcttttgttgacgtctcctctagatgcttttcaattcccctttatcatattgtaaaagcgcttggggagaattaactttaggttgattaacctaaacaaaaactgctagttttcatttcttgggggacattatgctttaagaagactgtatgcctctccttgctgtgacggtacgatgctaccgactaaaaataattaatacaagcattggttccttttactaattagaatgtcgtgtagactactcaaacgtgtgtgtctgccttgaaataatctcttctcttcagtggctaccaattttgttatttggaaaataatattgctaaggattggaagaatgacgtggtatttattttcttattttccaactagcatcagaatccatttctttgaaaaatttaaaaaggcgatcacaattttttgaacaaggtaaaccgacaagctaaactattcccgggctctcatgatctcatctctcactccagccttctgtagtctgtgcttccaggcaccagtctctttccatcttgctattcttgtgaccaagcaacgtaacccgtttcccttctttccccaggatggccaggcttttcttacagctcctgggtctacctctgtggtaacgggctttgcgtgtcctttgtctagctttccagctgtttctccccccccccctctcttaaccttgtgaaggaaacaaagcaaaaccacccacgcactgagatgctgctacacacacgtgtttccccaccgggtaacaggaagacttgaggaatttcattttcagcttcctgcttccgtcacttgcacagcttgccattagattacaccaacatatgtttggtagacttcccaaaacagcaaaaacaaacaaacaaacctggctctggtcatgggagataccattcctgaagagcagagttacttgtcgttattggaatgatggagttggaaggcatagaatgatgactctgttgatgtcaaaggcaatgtaaagtaaaggagatttggtggcacctaacacaggagcactgagaagtcatctatgttggtgtagctgcacgaactgcctcgtgaggtgtgatgcatgcggcttctcttcatcctcacatctgtctaaccctctgtctcctgaatgtggtttcaactctgttttgctatgaggaacttaaaagtaatatctaacattttagttgcaacatgacaggagatttactgttgctatctgaaatgttactatttctttaaagattcatgaaacatttcaaaaattgctttatgatacctactgggtttgtgtctgttgtgtttattacctaatattcttcttaaagtagattaagtttcctctcagaccataaatagagtttatcagctgtccttggtgcttttgattcatatatatatatatatatattttttttttttttttactaaacttattgttttctgtggttattcagttgaagtgatatcacacacctaattcaagctggctaaaacaaaataatgccttgtctttattctagttttctctaatttttcttcagtgagctattttagggacaagaattttcctaattcttatgacaacttaaaaaaaatagttatataagtgaataatttatgtgacggtggagatttcagaaaaatttctaaatactgtataatactatactttctgaaatttcacttttctagaattgtacaatgtgttgacacatatttatacaagctccctgatgaaagaaggaataagctaaccgagtgtagtcatacccagctcgaatgccaaggctaggcaggaaaattaaaagttcaagaccatcctggattaaaggggcaggggcatccacacctgaagtcccagcacatggaagttggaggcagacggactcaaagttcacagtcagtgtttgtttgctacattagttgagcttgaggtcagcctgggtttcattctcagaaagcaacaatagagtataataataataataataataataataataataacaataacaacaacaacaacaacactgtgcctgctgggttacacatcaaacttgaatacttgtgtttcaaataacagaagcggtaaagtgggctcggctctgtttctaagagtctgaggtaccagcggtttcctctgttattaaatttgaatttggatgacgagttcccaagagaactgaagggaaaggttaaacagaaggctgatgtcactcctatgctggcagggacagctagtgctgtgaaaagaattactttggagaaatggaaactcacgttgtgcctttcttccttgctcgcaggaagctcggattctgtggcccccgatgtgagtattagacttttgcagttggtcctatgtgagggaagttgggtaggacagggctactacacagtactatttcttgtttagtgttaagatgcatcaatgttgatcagattgtcatgttgtaagctggaaagactgacgctgatctgtgagaccatgtctgcatcattgtggtataagccagcgttgaaatcaatgattgctgagtgtggacgtgtttcagtagatgacttagtgacgtggtgttctgtgtttccattctcctgtgccacaaactggttagcttccagttccaaccctcagtgccccgagtcgctgggcttgggatcaagaggaggagagacggaggcaggagcggtggcagaaagagcaagatcgcctattgcaggtagctccacacagcctgcgggaatccggcgctcggctttcattgggctcttctcacctgtgccacccagtcttgagaagcaagcttgaaaaaaagcagaaccaagatatcgtcctcaccactagctaagactgttgcgtattgcgtgcatattttgcaccgacccttacttttccagtttggtggttttcaaaactatcagacattaacccttatggacccagtgaagagtgacacgcccagactgtgagcacttgtccttgttagcagtagaagagatctggtttgccatcaatcagcctcccttatcctagctggaggccttgatgaatttacatcagcagtaaaggttgggcataggtgcctactctttcttgacacctgtattttagcttaatgcaagaccttttttttttttttttcctctttcttccaggactaaaactctgattggtcacatgaaagagtgacatgaaggtttagagacagcaaaattgttaatggaaaatattctgcttcccatgagaaggcaaccttgattaatcattatgccctatttcctcacaggaaaaataccagcgtgagcaggagaagctgagggaggagtggcagagagcccaacaggaggcggagagagagaattccaagtacctggatgaggtaccatgacgcacgccttgttcttattcttctctataccttgttggagaacctagcggaggacaccacaccccattttcctagacactctcacctctgtattgaattctagtatgttagaaatttgccttgctattttaacttttctcttgtatagcaccaagcagttattccttggaattttggagtagtctttctgctccaacttagacctcagtctttgttttttgtttgttttcttattttttgttttttgttttttttcgaggcagggtttctctgtgtagccctggctgtcctggaactcactctgtagaccaggctggccttgaactcagaaatccgcctgcctctgcctcccaagtgctgggatttttttttttttttttttaaggcactgtgactatctttttggctgcttaccattaatctcctctctgtacgaaatgatagagagacagatggtgacagtgacgtgtttgctttcttttatgggctgcctaggagctgatggtcctaaattccaacagcatttctctgacctcccgggagcctgtggccgccacctgggaagccacgtggagtgaagggtccaagtctctggacagcgaaggcacccgagcgggagaggaggacaggggacagctggaagacgatgctgtgtatgaggaccaaagtcagaagctgcaggaacttgagcaggagaagaaacggaaggagcaagaggctcaggaagaggagcgccgcaagcagcgggaggcccaggcctgggcagaggcagaagctaaggcttgggcggaggcccaggctcgggcagaggcagaagctaaggctcgggcggaggcccaggcccgggcagaggctgaggctcaaaaacgagctgaagctcagaagctccaggcagagagggaacgtgaaacgtccgtcaaaatataccagtaccgaaggtctgtgcccatagctcaaagagttgtcctcaatcaaggagtttcagcaactgtggctttgttttgtctaccctgtacgtcttgtctcctctgccatctttgctttgaccaagtgaaccaaataattcaacagagcctttgaaccacaaataccattgtgtctcttccattccctcagctcttgctggcttcccaacatcaaaactccttgccaaaaccggaaagctcacgcaagctgtcctggtcctttgaaggccttacccttggggctcttcccgggtttactgtctcccttgtttacttgtcttgtgtggaaattacagccctctgccttgggtttcagtatgttctgttacctcggaaaatgatttccctcacatatgtgtggccccccacgtatttgaggtacactgcctgacatcaccagcttagccttccagaatacctacttctgcctcctcaccatttctttctccaccttactagcctgggttattttcctcttggcctgcctaccccaggaagatgtattacaaagcagcaactcttgaaatatatttctgtagctctagattattaccagaacatgttgctcctacccaccccagtgtatacacgcacagtgaatgggtgagtggacgtgagattagcaaatgcctatagctctgttttctacagcagctgattgaaatgtgtttctagatcttaagccataaacgatttacctaaagagaccagaatgctattttgatattcctaaagtcagggaatgtcttaaattttgatattttaataataataataataataataataataaaacctcttgctctttaggcccattgattcctacgacctaccaaagagagaagacgacacttcagggatgcttccaactgacaggtgtggactatttccttttacctgggtggtcctagttggcttcagaggaatgttcgttcctcagttcacttagatgatttgtagagcaactatggccctctgtggactcctggaatattaggaaaccttgaagattgttctttgtattcgtttgtttttgctgtgtaacaattgcctttaaattttagcttcagattttgtgggtcagcattctgagctgagctcattcattaacttctgcccgcacgtctgctgtgagttcccagggagctagctctgctttggggaggtggtggaagtatctggggacatgagagcagcagtcttcagcatcctgtaagccagcgatatcctaatacgtggatggacagagaaggactaggaatgaggatagtctccaagacgccagagaacttacataggttagcagtcgctgagtctcaagatgagaagtctaggagtcagtcccctgtatcgattttcagaattcagactttcacgcctgtctagagtggaggtagtgaaacgttaactaagaaagcaatcaaaccaagacaaaccaaggaaaggacagaattatgattctagtcctctggagtcagaggaaggggcatctctgtacattcaaggctggcttaatctacatctctcttttcaaccttaactgggtttataatgcggtcatatatactatatactatatgataaatattactatatagaatatgaaaattatttatatatatatgtatatatatatatatatacatatatatatattgtagtatatactttagaggcattggggagtgtagcctaacatctggtggcaaatgttttcttgtaataccttgtaaatacaggtgtaactattgacagatctagctgtctggcagttactgcatcatatcatgctttataggtcactgcacagaatgtcgctatacatgatatgtacatctgtgtatgtatatatgtatatatatctgtatatggtatcattactatttctgaagttcacttagtttaggagaatgagaaaatgagcctgtgtacttttatagacctgaaagaaaataccatttttcagagtagcctgcatagttaggcattatgccttactatctgtttggaatgccaggagaacatctgacaaatggatggtgagagatctgtggccttctaatgccttagccactcacatcttgattctgggcagtataggcaaacctaggtctgagatctgtctggagcctgcatgggcagagctgcagggcactctccatcgtcttaggaaagagaggcatgtgaggatgtggagaaagtggaaaaggggctcatgcctttaattctagccctagagaggcagaggcaggaaggcctcggagtttgaggccagcctaggttacaggtctacacagtgaaaccttgtctcaaacaaacaaacaaacaagctaggaaatagcaaacagaaccaaaaccatcttttttgaatgaaaaacaatgttcttaataagacatatttaatatattctgttttaggagtaaatcaagatctactacggaactaaatgaccccctcatagagaaaaatggtaagtgtgatttttgtattcaaacttttctttttaaacacaattattcttttttgtgttgtcatatactatggttggtattttaaaaatatttttattggatattttctttatttacatttcaaatgttattcgctttcccagtttccccacttctatgagggtggtgttcctccacccacccacccactcccacctccacaccctcaattcccctacactggggcatctattgagccttcataggaccaagggcctctcctcccattgatgcctgacaaggccatcctctgctacatatgcagctggagccatgtgtactccttggttggtgacttagtctttgggagctctagggagtctggttggttgatattattggtcttcctatggggttgaaaccccttcaactcattcagtcccttctttaactcctccattgggggccctgtgctcagtccaatggctggctgcaagcattcgtctctgtatttgtaaggttctagctgggcctctcaggagacagctatatcaggctcctttcagcaagcatttcttggcatccacaatattgtcagggtttggtgacactgtataggatgaatccaatttcccttatgaacattgatgcaaaaatactcaataaaagtcttgccaaccaaatccaggaacacatcaaaaccatcattcattatgatcaggtaggcttcatcccagggatgcagggatggttcaatatatggaaatccataaacgtcatgaactacataaactcaaagaaaaaagccacatgatcatttcattagatcctgaaaaagcatttgacaaaattcagcatcccttcacgttaaaagtcttggaaagatcaggaattcaaggcccatacctaaacatagtaaaagcaatatacagcaaaccagtagtcaacatcaaaccaaatggagagaaacttgacgcaatcccacttaaatcagggactagacaaggctgcccactctctccctacctattcaatatagtacttgaagttctagatagagcaattagacaacaaaaggaggccaaagggatacaacttggaaaggaagaagtcagaatatcactatttgcagatgatatgatagtatatattagtgaccccaaaaattccaccagagaactcctaaacctgataaacagcttcaatgaagtagctggatataaaattaactcaaataaatcaatggcctttctctacacaaaggataaatggactgagaaagaaattagggaaacaatacccttcacaatagtcacaaattaataaaataccttggcgtgactctaactaaggaagtgaaagatctgtatgataagaacttcaagtctctgaagaaaaaatcaaagatctcagaagatggaaagatctcccacgctcatggattgtcaggattaatatagtaaaaatgactatcttaccaaaagcaatctacagattcaatgcaatccccatcaaaattccaactcaattcttcatagagttagaaagaacaaacatttggaatgacaaaaaacccagggtaacaaatactattccccaaaataaaagaacttatggttggtatttttaagtgcagggcactttagatacattaagattagatagctatcatgcttttctgagtatctgtgataaaataatgatcttctgtttattttggatttctgtttttgatatatatatatttttaaattttattctatgtgcattggtgtttgcctgcatgcttgtctgtgcatggatgtgggagccactggatctggacttacagacagttgcaaactaccatgtgggtactgggtattgaacccagctcctctggaagggcagccagtgctcttaaccactgagccatccctccagtcctattatagctttctttataatggaaagagttccgtattgggcatttgaataagtaaggaaatgtttgggggacttttcaaagaaaaaggtcatagctttgcatagtcgactttatcttacatctaaggaatgaggatagaaaatagtgtagaaaactttaagattatatataaatttgaaatcatgcatgtaaatggtgaaaggttggacaatctgaagtgatagagattttttattcctcgtttcacaaaaatcatttgaggcttggagcaggatataaaatatgggtctgcttaaaatatgactggaattatacaagtaaggaaaaagccctaagcaataagcatcatttgcacagagtttgcatagcagaatgcataagcaaattattagtttttgtacctgaggaaaggctcaggtggggcttgaggcagacagacaagcttcaacttcagcccatcactgacccacctataaagcaatgctagtctctaatgctagctatttctattttttaaaatgaagaagtgatagtctggatttcatgtgttatctttaaattgctgaggaggaatttttataagaaaggcctgggtagtctggtggcagctggtttgtgtctctggtcaaagctcttagagttagctgccactggggtaggtggcattattctcccctggttagtagactcttcaatggtcttggctctatttaacttgccagcattttggcaccactttccctttaggaaacagagctctaaattatcaggccctctcttaggttcttactcagcagatacttctaacgtggtctcctggtctgtgagtcttctcctatttggatttcctagctctttccccttgaacttggctccagctattgccaaaattacagattaagtacacttgtcctgtgtgacgtacttttagcctgtggtgtttatactctgcccagagtgagacctggttgacagtgcagcaccgtgcctgcctgaaacagctgctcattcttctggttttgtgtctcccctggatagtagttggtatgtgtttactttccttcagtagccccaggttcttgaattagcaaacattagaaattgttacatatttggcaagatgacttggttatgccattaatcaaatgaaactgttttatttaaatgaaaaatatttaatttgagcatgaacacattgatgttattaatatactaagtatgggtgtgtataaaaagttttttgtggctctattctttgcttacttggaggtacctagataagctaaatattatgaaagttgaggtaacaacggtgacttagagaagaaagttagttaaaattgccttatccaggctgaagcaaggatgacacccgcaggctgtatgtgttttacataaataggaaatttagtcaacagaccctggggctgaaagctgacataattatcactaatacacttagtagttatattacagttgtggaaatttcttagagcacaaataaacttgataacattatggatgactcttttcccctcaccagggctatgtcagtgactgaaagatccaatggcgcagtcctgacttattctgtgattcacactgtgaacgcttagccccgtgccaactagagatgtgtgcatttgtcttgtttctcgccacgcttggggctagggcagagaaaatgcatcggaaaattctgtttccctacagactcttcctagccgcgagtgcacttgattgaaagaagatgaacagtttgtagctgagcgtttttggggtctgtagggttttttttgtttgtttttgttttgttttgtttttgcaggcagccttgatggttttcttgtatgcatcccaatgggtgtactggaatttccactggttgctgtctgttctcctgcagacatctccctggagatggatggtgtcagctcatgtgactagtgatgggtctgaagttgcactgtcttgggaggctgatctgctgccatttcttgtatacttacaccgaagcttttggtatgttattcatttaggaagcagcaaatattcagagagaattggggccactagcttttcacataggagttctaagaaggatcaagccccctcagaagcagagttggagagacagcaaatccttcaggaaatgaggaagagaacatctctccacaatgacaacagctggatccgacagcgcagcgccagtgtgaacaaggagcccatctgcctgcctgggatcatgaggaggtgagacagttccccatcgcttcctcttccctgtgacgcaaaggtctcatttgtagggccccctcccttagagagagagagaggctgagagagtctgggagtggggggaggtcattgagtgctattttgtgtgtcataatgagttgttgtgtctaaactgtctcatttaagctgacggcaagcaatgttttcaagtagacacagttactcttgtttttctctgtgaagaaactggttgaggcagagaaaccagctgggcaagatctcattaggaggaggttctaaatccaaatgttgggttttgcaatgggatacagataattgaatacacttttgactcctgcatattaaacttgaagagaatgaaacctacttatattcataatgagattaatggttaggttggaatcatgataattgggttcacaaaattgtatgaaaacataattttgtgactttttagatggtaactgtgtagatatgaattaggtaaggatgggcatttggagaggtctgtcctggcaaacaatcctgcagttactctgttgggtgttctatcagctaagcatggagacttacttgtaacctgtgtcagctacagaactaattgtctcgctatacaaataactcatttaaaacccacaaggcaatcctagtaacttcctctacgtttgtatctacatctgtctgtctctttgtctgtagctaaactgcacaagctgtgtgatagatagttcatgggaaccagaaacaaaaccagtacatacgtaaaaatcatcaccactgtcagacggcagcctgtcttcctgcgtcgaaagtgtgtacagcattaagacattgatttaaactggtgctggcaacgcataagaaaataggaattctcttttccaacagcttcaatcaattttttgtggtgaattaaaccaagtatacacttctttaccagggtgctatcttctggattctgttaaattaagcaagcatacaaagatagaggcaaggacacacactattggcaatggtgaaaaaaaaaaaaaaaaccaaagcagaaaatttaaaccacctcatccacaaaacacaatattattcttaaaggtgcacctagttaatagcggcacagcagttagaatgctgtacaagtattaaaaggtgcacggtgcactgtgtgcagtcagcacctcaggagataaggaagaaagggtccagtactcttgtgctttcgggatggagtgcatgctgtatgttttttcctcatttaggcaagcacaccaaatttaaaataactcctctcccgtgtgtgagggttgtctggtctgttctttgcctggtgttggcttcggcacttgagcagccatggatctggagttggcgattcctttttttcttttaaataaaagagatagtaacggtctggcagcccctccgccatgtattcattgtttctttaatgactctgagcatgtaaaatgcccatgagttccgcatgtcttagcaatggcctttctgaagagatccctcctgggctcagccagggctcttgaattgtaattcccttcccacacagctgctggagctacctcatggtgcagcactaacattcaaagaggaagctttcagaagacagttccagacgtgaaaatgcttatcgctctccatgcatatcacatttgccggtgccctatgctgtaaaatagccacatggtcaaccccagggtcagtgggcgggcactgaacaggagagcagacacacaaaaaaatgaatggttctatgggaagcattggcttacaggctatcacgtgatgaggcttttacggttgtaaaagaataaaaaccatattgttcccattttgaggacttctatagacgcctgtagtaacttacatatgcaaatttgtatgtatgtgtaattatttccttgcatatctgagaaaaacctgtaaggagtcacaattaagggttgctgctttggaggattagggcgaatgtagaaagtaagggaagaaggaacccttgtccacccccagaagacccttgcttgcttcttgacctattccctatggaatttatattgtaatgttgcattacttacaatgttaagtagaaaagaaaagaaggaaagagaagagaagaggaaagaccaaaacaattattatttaagcttctggctggaagaaagatttaaatgcactaataaactcaacagctagagaagcattcatcattcagcttttgtagaaaatctaaatcctgaatgcagggtggcttctgtttcctgtaacgtagacactgaacagttgctgacccattggacttggggtggcgaatgggagtgtccgaagcaggcctgggttgcactggggtcaggggactttggtttgaagccagagcctcatccatacactccaggcttggacaatgtaactcctatgagattaaaaacatccttgtataatgttgtgaagattaagttaaatatgtctgtgaaaatgtatagttcaatacttatgtgcttaaaattttctgattggattttaaaagactgaggcttatatgttgtaactgtttaagggatgagtgactgctagtattagcttttctttaagaagtagttttctccccactttgatacttggtctttttgtctaaggacctctacaatgaaggttaccgaaatatgagatgttacagtacctctggtgcagaacaatttattgttaagggtatacataactggaaccagcttagttgagcctagaaaatgcataaaggaggtcttacattcaccccaatggtgcatctgttaggcaagttccagcagtgtaacgtgactcatgtcactcctgtgacccctgccctgtgtttcagaggggagtctctggacaatctggattcccagcggccgggttcttggaggcagtccccttggcacagccagcctgccggggtctatgcgtcttcctctgtccaggacttcagtcgccccccacctcagctgttgtctacatcaaaccgtgcctacatgcggaacccatcctctgcggtgccacctccagccggctctgtgaagacctccccagggtctccctctccacgcagccattccccttccatgtcacagtcaggctctcagctacggaataggtaaggccccttgtgtggtccctttgtcttaattttaagggtgttccttctttaaaatcatccagtaaagaagaaaagcaagtccttttgagtgcatggaattgggtgttcctgtatcaaagctgttgagaaggctttctcctgcctctgtctgccgcctgcctagtgtttacaaatgtctggtaaaggcactggagat

SEQ ID NO: 538 - DNA, 3807 bp, Mus musculus
acatggaagggatggaggacgccgaggccgattgctctgttgcattcgcagaggctcagagatgggtggaggctgtaactgagaagaattttgaaacaacggattttcgagcctctctagaaaatggtgttctgttgtgcgacttgattaataagctcaaacctggcgtcgttaagaagatcaatagactgtctaccccaatagcaggtttggataacataaatgtttttttgagagcttgtgaacagattggattgaaagaagcccagctttttcatccgggggatctacaggacttatcaaaccgagtcaccgtcaagcaagaagagactgacaggagactgaaaaatgttttgataactttgtactggctgggaagaaaagcacaaagtaacccctactataatggtccctatctcaatttgaaagcttttgagactcttttagggcaagctttgactaaggcacttgaagattccagctgcctgaaaagaagtggccgggacagtggctacggggacatctggtgtcctgacagaggagaatttcctgcccctccaggtagccacagaagggaagattcctttgagagcttggactcgctggggtccagatctctgaccagctgttcctcagacttcactctgagagttgggaaggaaggttgcgaaagtgacatcgattgggaatttacattcaaaatgcaggattacaacaaagatgatatgtcctaccgaaggatttcagccattgagccaaagtcagctctcccgttcaatcgtttcttgccgaacaaaagcaagcagccgtcctatgtgccagcacctttgaggaagaagaggccagacaaacacgaggataacaggaggagctgggcaagcccggtctacacagaaacagacggaacattttcaagtcagtttttattgcttcaggccctccaaacctactctgatgacatcttgtcctcggaaacaagtgtcaaactcgatcctacctctggccccaggctcataactcgcaggaagaatcgctctcccgcaccaggctatcgagcccatgaccttgagctgccagccctagatcccgacttagaaaatgatgatttctttgtcagaaaaacaggggctttccatgcaaatccgtgtgtccttcgagcctttgaagactttagaagtttctcggagccagacgatgccgtggaacgagatataattttgcagtgtcgggaaggtgaactcgtacttccagatttagaaaaggatgatatgattgtccgcaggattccagctcagaagaaagaagtgcccctttctggggccccggataggtaccagccagtccctttccctgaaccctggaccctacctccagaaatccaagcgaagtttctctctgtgctcgaaaggacacgcccacccaaagaacaaagcagcggctgtagagtgttagtcccttcctatcgacagaagaaagacgacatgttggctcgcaagatccagtcttggaagctggggactgctgtacctcccatcagtttcaagcctggcccctgcagcgaggccgacctgcagaagtgggaggccatctgggaggccagcaggcttaggcacaggaagcggctgatggttgagagactctttcaaaagatctatggtgagaatgggagcaagtccatgagcgatgtcagcgcagaggatgttcagaacctgcgtcaggtgcgctacgaggagatgcagaaaataaaatcccagctgaaagaacaagatcagaaatggcaggatgaccttgcaaaatggaaaaaccgccggaagagttacacttcagatctgcagaagaaaaaggaagagagggaagagattgagaagcaggcactggagaagtctgaccgcagctccaagacatttagggaaatgctgcaggacagggaatctcgaggttctacagttacgtcttggaggaggacctattcctctgatgacatcctcgatgatggagtgctccctcctacagtgactctgtcagaaactagttaccagagcgagagactagaagatgaggcaagagcgcatcctgctgagatgcccaaagaagattccacaacatttgcaaatagagaggacagtgtagtagctgagactcagcttgcttctcacagtcctgaagagcaacgtctggccccttctccttctgaggaaccgcgccaggcctctggatcttctgcagaaccgcaccaggccccgttgctgtccacagaaccacgccggacccctttgccttccgaggaaccacaccaggcctctctatcttctacactacagcgtccatcctcactctcttctcagcagtcatggagtacaagagcagagtccactcggatttcagcttctctccctagaagttaccagagaaccgatacagccaggttaacatctgtggtcacagcgagaccttttggcacatcttcaaggggaatctcctcactgcccagatcctacacgatggatgatggctggaaatacaacggagatgttgaagttgtcaagagagagcaactcgatttgggcagagccactggcccgaagcctgactccagccactttatttcgggctcagccagtgagaaggaggtcatagccacagaagatgtggcaagcttgtcctctcccacactcccttcctcatctctctcccacgaccgggcagtctcttccaaagccacgttctcatcaatgtctggtttggattcagtgtctgactctggagaaggaagaggctcaccattgagggaagtttccaggtccctggatcagttcagcgatatgagagtcagcataaaccagacgcccgggaacaaacctgtctttgggtttacgataaaatgggatatttctgggatcttcgtagcatcagtcgaacaaggtagcccagcagaattttctcagctgcaggtagatgatgaaattcttgccatcaataacaccaagttttcatataaggatacaaaaaagtgggaggaagttatggcaaacgcccaagaaactggaaacttagtgatggacgtccggcgttacggaaagtctgactggggcaaagaccaaccttccctgccatttatacggcataaaaccctcaatcttaccagtgtggctaccaaaattataggttcatctgaaacaaagtggatcgatacaacatcaggaatttacaactcagacaagtcttcaagtttatcagtcacaactgatttctctgaaagccttcagagtcctgaaaaataccagcgtgagcaggagaagctgagggaggagtggcagagagcccaacaggaggcggagagagagaattccaagtacctggatgaggagctgatggtcctaaattccaacagcatttctctgacctcccgggagcctgtggccgccacctgggaagccacgtggagtgaagggtccaagtctctggacagcgaaggcacccgagcgggagaggaggacaggggacagctggaagacgatgctgtgtatgaggaccaaagtcagaagctgcaggaacttgagcaggagaagaaacggaaggagcaagaggctcaggaagaggagcgccgcaagcagcgggaggcccaggcctgggcagaggcagaagctaaggcttgggcggaggcccaggctcgggcagaggcagaagctaaggctcgggcggaggcccaggcccgggcagaggctgaggctcaaaaacgagctgaagctcagaagctccaggcagagagggaacgtgaaacgtccgtcaaaatataccagtaccgaa

SEQ ID NO: 539 - protein, 1263 aa, Mus musculus
  VARIANT (1)...(1263): Xaa = Any Amino Acid
MEGMEDAEADCSVAFAEAQRWVEAVTEKNFETTDFRASLENGVLLCDLINKLKPGVVKKINRLSTPIAGLDNINVFLRACEQIGLKEAQLFHPGDLQDLSNRVTVKQEETDRRLKNVLITLYWLGRKAQSNPYYNGPYLNLKAFETLLGQALTKALEDSSCLKRSGRDSGYGDIWCPDRGEFPAPPGSHRREDSFESLDSLGSRSLTSCSSDFTLRVGKEGCESDIDWEFTFKMQDYNKDDMSYRRISAIEPKSALPFNRFLPNKSKQPSYVPAPLRKKRPDKHEDNRRSWDVYTETDGTFSSQFLLLQALQTYSDDILSSETSVKLDPTSGPRLITRRKNRSPAPGYRAHDLELPALDPDLENDDFFVRKTGAFHANPCVLRAFEDFRSFSEPDDAVERDIILQCREGELVLPDLEKDDMIVRRIPAQKKEVPLSGAPDRYQPVPFPEPWTLPPEIQAKFLSVLERWPKEQSSGCRVLVPSYRQKKDDMLARKIQSWKLGTAVPPISFKPGPCSEADLQKWEAIWEASRLRHRKRLMVERLFQKIYGENGSKSMSDVSAEDVQNLRQVRYEEMQKIKSQLKEQDQKWQDDLAKWKNRRKSYTSDLQKKKEEREEIEKQALEKSDRSSKTFREMLQDRESRGSTVTSWRRTYSSDDILDDGVLPPTVTLSETSYQSLEDEARAHPAEMPKEDSTTFANREDSVVAETQLASHSPEEQRLAPSPSEEPRQASGSSAEPHQAPLLSTEPRRTPLPSEEPHQASLSSTLQRPSSLSSQQSWSTRAESTRISASLPRSYQRTDTARLTSVVTARPFGTSSRGISSLPRSYTMDDGWKYNGDVEVVKREQLDLGRATGPKPDSSHFISGSASEKEVIATEDVASLSSPTLPSSSLSHDRAVSSKATFSSMSGLDSVSDSGEGRGSPLREVSRSLDQFSDMRVSINQTPGNKPVFGFTIKWDISGIFVASVEQGSPAEFSQLQVDDEILAINNTKFSYKDTKKWEEVMANAQETGNLVMDVRRYGKSDWGKDQPSLPFIRHKTLNLTSVATKIIGSSETKWIDTTSGIYNSDKSSSLSVTTDFSESLQSPEKYQREQEKLREEWQRAQQEAERENSKYLDEELMVLNSNSISLTSREPVAATWEATWSEGSKSLDSEGTRAGEEDRGQLEDDAVYEDQSQKLQELEQEKKRKEQEAQEEERRKQREAQAWAEAEAKAWAEAQARAEAEAKARAEAQARAEAEAQKRAEAQKLQAERERETSVKIYQYRX

SEQ ID NO: 540 - DNA, 79084 bp, Homo sapiens
cttgctttattgcccaggctggaatgcagtggtgcagtcatggctcactgcagcctcaaactcctgagctcaagctgtactcccacttcagcctcccaagtagctaggactacaggtgcatgccaccgcacctggataataattttattttttttggtagagagacagggtctgactatgttgcccaggctggtctctaactcctggtctcaaggagttgagccctgccttggcctcccaaagtgctgggattagaggcatgaaccaccactggccggggattttcttaaaatgcagagtgtggttcagtaggtctggggtgtagctagagattctgaatttttggcaggctcccaggtgaccctgatgctgatggtctgtggccacgctttgtgtagcaagtgactgggtcagtggtcctccattttgactgtgcatcagttgcatctgagggatggctgtgtgactccctctcatgagtttgactggggtcccatgtctataaatcataatgctaagatatggacttagctgaatttctctgcttcaagtaatagttatctcttgattgctggcacatacttgctaacatttttggcactgtcaattgcagggttagaggaggcagggactttgccagattataaatagaaaggagtcgaggtcacctagtatcttgtctttaggataaattgatcagcatcatcatgtactcagctcttttttcagctctttttttttttttttttttttttttttgagacagagcctcgctctgtcgcccaggctggagttcagcggcgtgatctcggctcactgcaagctccacctcccaggttcacaccattctcctgcctcagcctcccgaatagctgggactacaggtgcctgccaccaggcctggctaattatttgtatttttagtagagacagggtttcaccatgttagttaggatggtttcgatctcctgaccttgtgatctgtcccgctcagcctcccaaagtgcagggattacaggcatgagccaccgcacctgaccagctcttttttaaattgaaaacttgtttaaagtaggcaagaaccctttctgggaataccaggccaaagtaatcatgacaagagtatttggttaattgacagggaacacttccaggtggtgtcgttctgggagccttggtttaagctttgtaaggcctttaggtcacagccctgagaacaacttcactcattttcagaattaggattttgatcttatttaggacttttgtaataaatccttttattaaccttgtctctatttttacactgtttataaaagtgtcttttcacttttgcttataatgacagctcttgaccctgtacactcaggaagtttttgcagtagtgggtctaactggcttgatcttatgagtagacatttctgtattgctacattaaggttccctgatgcagagtattccctttatatttgggaggttgtcatgcttgaaattttatcaaatatatattttttgatccttcaagtaaaagtgaaagtgactttgggtagggtaagagcctagggtgttgtagtacattttcatgaggatttagacttttgcataatgaaatgattcaatgtataagagaaatctggagcataatgacatttatgtaaattagactctctctctatatatgcaacagcacttgttaaagaacattttattttattttattattattttttttgacagagtctccctctgtcacccaggctggagtgcaatggcgtgatcttggctcactgcaacctctgcctcccaagttcagcaattatcctgcctcagcctcccaagtagctggaattacaggcgcccgccactatgcccagctaatttttgtatttttagtagagacggggtttcaccatgagttattcaggctggtctcgaactcctgacctcaggtgatccacccacctcagcctcccacagtgctgggattacaggcatgagccactgcacccggccaaagaacatttaaaaaaatttatattcatggggcacaagtacaattttcctaccttaatatattacactgtggtgaagtaggggccttcagtgcattcatcactggaacattgcacattgtatccaccaagcagcctcccatcatccacccccttcccatccccacaatgctgtgagtccccattgtccatcattcacactctacttccatttgtatacattatttggctcccacttatgagaacatgtagtatttgtctttctgcatctgagttgtttcgcttaagataatggcctccagttccatttgtattagtgcaaaagacatgatttcattttttaatggctgaatagtattccattgtggatgtataccacattttatttatccagtccttcattgatggacacttaggttgattccatatctttgctattgtgaatagtgctgcagaaaacatacaagtgcaggcatctctttgatgtaatgatttctttttccttgggtagatgtcaagtagtgggattgctggatcatatggtagttctatttttagttctttgacagatctccacactgttttccatagagactgcactaatttacattcccaccagcagtgtataagcattcctgtttctctgcattttctccaacatctgtcattttctgtctttttaataatagtcattctgattggagtaaaatgatatagtggttttaatttgcatttctctgactagtaatgttgaacattttttcatatttttgttggccatttgtcttccattgaaaaaggtttattcatatccttggcccactttttaatgggtttagttggacttttgttgttccttataaattctggatatcagtctgctgttggatgtatatagtttgcaaatattttctcccattccacaggtgaccttttcactttgttgattatttcttttgctgtgcagaagccttttagtttaaatcccgtttgtctattcttgtttttgttgcccgtgcttttgaggtctcagtcatacattctttgcctagactagtgatatggtttggctgtgtcctcacccaaatctcatcttgaattgtagttcccataatccccaggtgtcgtgggaaggacctggtgggaggtaattgaatcatgggggttgtttcccccatgctattcttgtgctagtgagtgagttctcacaagatctgatggttttataaggggctcttccccttttgctcagcacttctccttccttctgccatgtgaagaaggaggtgtttgcttccctctccacaatgattttaagtttcctgaggcctctccagtcctgtggaactgtgagtcaattaaacctcttttcttataaattacccagtcttgagcagttctttatagcagcatgagaatgaactaatacaactagacatttatatttttaaacacattaaagaaggcatctttaaaaaataatttgagacaggtacactaaaatcccaggcttcagcactatatagttcacctgtgtaaccaaaaaccacttgtatccctaaagctattgacattaaaaaattaaaaaataatttgaggtgaaattcacataacataaagtattaaaaccattaaaaaccattttaaagtacacaatttagtagcatctattacattcacaatgttgtgcaaccattaaacatttctaatatttcaaagtaaaacctcttaacatcaagtggtttctccccatttcctcctcctccattcagcttctggcaactaccaacctgcatttcgtctctggatttatccattctggatattttatacaaatggaatacgtgacttttgttttctggcttctttcacttactgtaatgttttgtagcacatatcagtacttcattcctttttatggctgagtgctattccattgtatggatagaccacaacatgtttatccatttacctcttagcagacatcagaacggtttgtaccttttgatatgtacatgcacatgcatgtacatgtaatgtacttatttgggaatctttttaattctttgggatatatataggatatatacctgggggaaggcatctttttaatagaaaggaatgggagtgagtgggaatgtgggatgaggaggaaaataattaaaataacaaaataaaatgagagagcccttatactgactgataagagcttgcttaaataggaatgatgaattcaactttgggtcctgacatttcttcccaagcacttacattactgatgaaagagcaaggacatgtgctataatgatatgaaaatatgttacttgataaatgcttttggaaggaaaatgggttgaaaggctctgaaaggtgaggtgttaacaaagtcctgtcttacccttgacaccagtgtgagaatattcatattggccttatgctattctcattaacactcttttcaggatttataatggaaatagagaagagttaagattccattgaagtgtataattgtgtttgttgcaaactcaaaatattgggtggaggtggaatgtaaccctacatttggggtcaagagaataagaatgagcactgcttctctccccaccttttccctcaagggatgaggcattccaacactgaagggtcaggggagtggtagctttggcaggactgataggaggcttgagtaggagacagacttgcagagtgaaagaccaaggaggtctttcagattctgggtggtccctcacctgttgccagcggctggtcttcactgccgcttattatttactcatgagtcttctggagtttttgcccatgaaatgtccactttatttgattttcaaattctttgggtagtttttcttatggcgtcatctgcctctctattcctgaaagaaatctcttgttgttttctctcccttgttttccataatggtattctcttcccttgttttccgtatgctattctcttctgcttttcttctgatttatctggatgccaggtatttttctctcttgactcctctttctttaactgtcctttaaatgctggtggttgactgtgaatccttctttctctttgctatcagggcaaggagggcacattgacatccctaatttcaatgactaccaatgtgtgctagactcccaaaccatattttaaaatcaaatgtttctcatgggctgcaaacctaacttactactagctgggcatctgaaactcaacatttctaaacgtttatttttctattctaaatttttgactggtctgtattctttattattaaaatcttgtggtagccagcttccaaaatggtcccagtgattctcactttgtgatattctcttccttgtacctaggaattctacccaattaactaagtgatctactggggagattccattcttctagtgaggtgacctacagagtgttgaagtgatgcctcgattcttcttgtggattatagtaaaatgtgagaggagaaagtgaagaatagagtgacaaacatgagagaaacaggaattgctgcttttgaaaattgtcagtctctttagtaagtaaatgatgctagaactgagatgtggttttcaggcatagattaaattcagagcatttgcaggaaaataaggcctaaaaaggagttgaggatgtggttgtaaaattctttaagttcttagattcaagacggtaccttgcagatctgtcgagtcaagcaatagggcttctaagcaccttaaggatattgtcctccagtcatctcagcaagagaccaaggtagagaagagctactcttgaagagattgatgggtgcatcttttgtctaatggaatgaaccccaataagattcacagaagatctgtagtatctttgagataattgtatttgcagaaacactgccagctgagactgaaaggaatagagaatcatgaaattaagagacccttaattctctcaattgctatgggtagggtaaagaagtagattgaaaaacctacatagccacaaagataggctacttttcagtgaaaagcaaagatgacttttagggtggcaccaagaatccagagggtgtagccaaaaaccatgaagtattacctggccttgagtcttcatgaaggaactgccaacctgtgtcttgaaggatttcagaatttctgtggaccagtgactcctgtgttgcctttcatttctctactctctgacctagagtgtctatagtgattatcttaacacctgtcactctattgcatgttgggagtgtgggagcaggtaacttgtcttagttcactgacattcaagttgagaggaactttacttaagggccatacttaaggaattacacctgaagagcctcagacactcctggatctgacttagatgatgagattttggactttgagttcaccttgtaaagggatgaatattttggggccttattagggagtaagtgtattttgcacatggttgggacatgaatcactgaggtgggtccagagagtgaaatgtagtagacagtcccccagaaagccctccatgattctcacctcctggtgtttatgttcttttgtacctacatggaatagggctgatctgtgtaaccaacaggatgttgaggaaatgatggaatgtgacttcaaaagctatgtcataagacattgcaacttccatcttgctccttggatcacgggctctatcaagcagccctttggagatgtccatttggtaaagaaccaaggcttcctgttaacaatcagccctgatttgtcagccacatgagtgagccgccttggaaacagctcctccaagctccaggaaagccttgggatgactgtagtcatggctgacatctcaattacaacctaatgaagggtcccccaattcagaactattcagctaaggccactcctgaattaccttcagaaactaaatgaaatcataaacacctattcccttaagctgcttaatttggggataatgtattatgcaccaatagataactaatagggtactacagtgaacaaatacaaaccttgattatcttggtagatctttgtggcttccccatcctacctcagtggtaagaactgctgttcctgatcattaagctctctaagttaccctagcccactccaccccacacctgttatggctgctttataattgattcaaggataaggggtggaagggagattggagacaatatgaaaatcttaaagccatgtgtctgttcttgcctgcctctcaaagggccaattttagaacctttaatttgtagtgtctccctttattcatagtcatagaaaaatttaaagcttaaaggagctattagatacatttagggctcattgtttctgtgtgtgtgtgtgtgtgtgtgtgtgtgtatgttggtttgtctttgagaagccacttttggtcctgaaagtacagggtttacagatgtttagagcaggattttgacatgaagtattttatggaagttgggtaatgaaatatttgtgtgatgggttgggccagggagggttgggctcctcttcttttgcagagaaaaatgattgcccttgataatgggttacagattcacaaactgctcatttcagggatgaggaaaatggggccagaaatgttaactctctttccaaagccacacagttgtttagggacaaagttaacttggagtcctggtgactagtccaattagataagattagttttaatttgtcctttattttcccttttatttttgctaatttcaagtgaaaattatttcattaaacaactaaatacttcccttttaatgtgttgagctgggtgtggcttcttgaagttttaactgtcatgaaaattttattttataattttatatatacccttagggacctctttgcctgcatcctttgaaattgcaaggaataaattaccagtgagctcaaatccagtaggaatgactgagactacattaccaatcttagtacaacctcgtcctgctgcataggccatgtgtgactttgtttacaaagttgtactgtgttaaacttgagcatcgttgaatgatttaaaagatattctgctgttttggttaaaataaagtctttatttaaggctagaatttagccatattaatttgtatcttctcttgaactttgtcttcaactaagtatagtcactttagatgtcaagttctttctctctactttggtggtttttgaggagagtttggctttatttatctatccttatcaatctgtacctatttgtcaactagatgaatgctattatgtttgtatgaaatatgtgaagaatcattttggctctcatttgagtaagtttacttttagtttaaccttattttaatatttttgtaatactttaaacattcagaaccaaatcaaattggttgaattggtgtgaagacttctaatggtttgtttttcctttattgatatgagacttgcatcctgtgtgtattagttcattttcacactgctgtaaagaactgcctgagactgggtaatttacaaagcaaagagatttaaatgactcacagatctgcatggctgggaaggcctcagagagcttacagtcatgggggaaggggaggcagacatgtcttacatggtgacaggtgagagagagcgaagggggaagagctccttataaaaccaccagatctcttgagaactcactcactatcacgagaacagcatgggggaaactgcccccatgatccaatcgcctctctcccttggcatgcagggattacaggtccttcattgacaagtgaggattacaatttcagatgagaattgggtggggacacacagccaaaccatatcattatggaacttggggtattggtacatccaaccatcttttcttgcctgcttctcagagggccaattttaaaaccattaatttgtatcatttgataattacagatagtatactttttagaaactatgggcctaacaaaattatcacattttgctcctcttggaattttgccaataaattgtgtctcctttttccataataagtcaaatgaaaaacaaaataaacacctttcattgagctgttcaacttttgacttgcaagtttctttactctttgacttcatcttatttaaaacgattcgtggatttcatctttcagctaggtagttcgcactgccttttactcacagtagattggaatgaccaggatcctgcctgtacaaatagtgactttttagaatgtctctttccttagtaatcagtggcgcttttctcttgccacacctttccttgtgctttcccggaatccccttactctccaagaacccaagctgtagaatttagccactttatcttaggaaaagagtaattgcctttctccaagtggcagactatcttctggtctgtgaaagtcgcctcttagggagggaggtgaggtttcaaggaggctcacgccatagaggcagcattaccagctgcctcagtggacagatgtgtgttggcatgctgggaggccacccctttaccagcgaactgtaacagttaatatggagaacccgcctgggattgtcacaagttcaaccccataaagtgttttcttttcttcttcttttttttttttagagtagtagagatgaagcctaagttaattctggtaaccaaatgtatgtctctgaaatgtggctggctttaaaatagcatatactgtaatctgtgtttgcacagcagtttacattaacgaagagcactggtttgtgaatggaggatttgggttttgaaattagatatgagggcaaccttggagggaggggataggctttcatatttttggaggcagctcttgaggcaggtgcagggagtgagtaatgtgccacacaaactatgcaatttagccaatgaacactaggtttctcctcagtcctatagtatggtttccctgcctgtcaagagccagctcaacaaccaaacccagattccaggtgtggtattccacagtcgttctgtaatttgtaatcatagaaacagaatgttcctcctcttatttcttccctgccaacagtttctgggtgggtgaatgtcagtagctggagttatttttaaagaggagaggtgaggcttgccgtgcaaagctggaaagagggcgtttgtttgcagagcagagctgacatcaaagtgtagattactgctcagtggctaggcacttgtcctgtaacaggtaatgtttaacgtgccagtcacaaagatcacagaaacagtgtatgcccgggcataagatagcacgactgtgtatgctctggaggactgaaaggctgtacaagccctatgtattttttttcaaatatacatatgcatgggtcttgctgctgcctcttttgctgactgtaattggactttgaagcttcgaagttatatcataaaaatttgtaacctttgtctgagagagagctcagctaagcaatcactttccacttcttttcacaggataatataaacgttttcttgaaagcttgtgaacagattggattgaaagaagcccagcttttccatcctggagatctacaggatttatcaaatcgagtcactgtcaagtaagtttcaacagtttgttagatatatatatatatttaaacttagggcttgtagcttaagtgaaaagaattgctgagagttcatgattacagaaaaattcttctgttctctctgttttcctctgttctcattctaaaagagactgttttaaaaatggcttagggactgtgaaggtgaagctgtttgtaactcataacatagcatagtcttactataaatctctataccgacaaaaatggtagtgttaatattttaatgtgtgtccaacatggtagtgtttggttgctaatgttgaggatactcataaagtgaatttaggggttatattatagcttgcagagtaacaacaatctttaaatttttttatatatttggaattaagacataattattagcataaaaattagataggacagtagtaaaaaagaatctcttaatattgtgaaggcagcagcgcctgggaccaacatgtaatgccaaggaccttgtcagttgtggctgacttttaaaaatgagctgtttttcacgattttaatagtgtggatgagaaagtgaaagtgggggtgagaacacgtatgccagtatctgttagatttttggtgaaaaatggtgtttgtgtgggagtatacagtttcaggaaatctggttttaagctcttatgatatttatttatatttcctataaatctaatttgcttccaggcaatcaataatcatgttactagataaaggtgacaggaaaattatttaattttataataactatctctttgtcatcctgcctcttaaacctaattaacatttttgcaagggagaaaataaacaccttattctatctatagaaataatgaaaatggaaaaatctgtttctaccagttcaaagatttaacttatgtggttaatatccctgtgtaaaacctttaatagttatttttaaaattggatgaccaattattttttctgaagaaaaataaccagctatgtaagtatctttgatagtacacattgtcttccagcagtacacagaacagccccaaatccaggtagacttagtcttccaaagtctaacaatatatgtttttaaatgaacactgttttgaacctgcttctagttctgttgaataagcttttctaaactccatggtaattaaatgtacgtgggagggataaatctgcctgcatttctgactaatcgaaagatagtttagagattctaaatttcatcaccaaagtgaaatgtttgcttctgtagtatgtaggggtcatgtttactttccataaaaattaaatatttgggtgtatttgttttatttttccttatcaacatatttcttcataaggcctatctgatgggcaaagaaactttagactttgaaagtcttttccttaagttgttgatgcttgttaagcgttaacgtgcttccccctaaaataatatactctgttttgaaagtctgtagcctatatttgagtaggctaaagactaggtgaaacatgtttgttggctcccaagtccaagagttcttgcctggagcctgtttcatgagatgttgggcctaaaatgtttcagacaaattagtatctgggctctgccttcagtgaaattactgacaaactgaaactgcgaggtcacgtagttatagctgtagtgagaagcatgcagaacaacttgtttcagtggaaaccacaagttcgtcaaagcaaggtgtgcctaagtagtacctgtgagaatgcctgagtgggaaccttgacttcacttaagaacatttctcctgataattctatctcattggaccaaaaagcaaaggggttgaccctgggtatgctgcagtggaagcactggagcctcccagatgagacacaggaaagtggcaagcaactttttaaaaaatgttgtccaagttcttatgccctgagatagcacttttagtaaaggaagcagatttaaagaaaagcaaataattgctcactaaatagtaatgcattttagctttttaaaaatatataatgtggagactcctttgggtcaaaattcttgtcctgtcattattgtagatcaaaggacttagtgttggttagatcagtggttctcaactgggggcagttttgccaaccaggggatgtttggccacttccggagatacttccagttgtcatagctgggtgagtgtgctacaggcatctaatgggtcagggatgctgctgaatacactttaatgcacgggatagcctccacaacaaagaattttcctactccaaatattaatagtactggagttgagaaactctagctttagatttagaatttcttgtttattccctccctgccagcaaaatagtcatgtggaaatgaaggatactgactatgacacctttgacactctactaaaatataacttttatatacagacataatttatgcatttctgtgttagtatgtttattgtctgtttaaatgggaaggtgcattgtaacttgtctgagagtgtggtaatatgtgtgagtactttgaaattattttgcatatctgtatgcattaaatttaacaaggtgtagcaaatgatttgattatttaaaatgctgtattataactgcccagactgcatctaccggtgcatagacttgttgttggccttgctgcaaactcaatctaatcatgacgcatactgagagcaaataggaaaggacagtcgatatcctctgtgctggcaaatgaggggaacttttttgttagtgggcagtggtgatagttgctgtatggagcccaagcagagttgtgtatgttgaaaatgagtggcaatagcagaagcaagtaaagagctgttgttaatgaatagtttcaataatccaggactccaactgtttttcagttttctagctatctgaagtttacaatttaattcacagtaataacttttcaccaatcagacagagctagagtattctttatatttctgtaaattatcctcttatgtgttctaattttctaataattattttactttgtaggaagcagtagttttaattttttcaagtgtgtttgaattattctatttatttagggactacatgtattcaagcatcaggtgacacctttaattttgatattcctgacttaatgggtaggatccaacctcttttcttctcaaaatgctaataagcaaatttatgatttagtctccatgaatggtagattgagatctaccccgatctgaggccatgaaatcaatcttttgtgtggatgaaaaactggatcatcattcttaaccatttactaaacatccatactgagcacatactctccacaaagaaaacgtggtgaagttcccacagagccatctgtgcaggccttccataaaagggctgtaggagatcaagcataatggccccaccagcctgccacagcacactggagagctcctctggcaagcgtcatggtctttgtggtggcatctggtcattaggagaggtacagatcaatggcttgtagtagaaagcaacttgacagagtagcctagaggtcctgtattggagaacttgaagttggcagaaaggtagggtttaaccattaaaggttttaacttgggcaatttgactcagaaactaagtcttgtatttaaaccattgctctatatatcaaaaattttaagctgagaaattgaacagattgtaaacatgtttcttctttccacccccttaccattccaatccagtttttggcaagtcttcagatacattctgttgataatatcattacagagtggcaatgactttgaacactgcttgtcatgcaaagaaattcttttctagtgtagacttactctattatctagagtattgatattttaagtataaagtataactttaagtaaacattgatattaacggagtttgtttttttaagtcgattaaaatgaaagtacagatattaaaaatctattctctttacacatgctagttgccaaaggaacagtagttggaatgaaaattagtgttaacatattcccatcaggaaaataaaagagtctcaaaatgatattttaaggatgtaactgttcgctaaagcttcacaagagtgcttgattttgtggtagtgctctgaagtcatttcttaggaatcaggttcccagatggcactctgttttaacagtctgccaaattgggcttgaggtatgtaagtgtatatgtgtatttaaggtttattcatataagtaaaatatacctagtttgaattatttaatttctgctttttaaaataatttaaacctagttttactttttttttttttgcaagtacatgtctttcaaatgagtttctcaacatcttcatcttttttttttttttttaagcaagcttaacgatatccaaacttggatctgcaacttgagcatggtgacttccacctgtcaactcatgtgactattttaaaatgtaccctttctgccaactattagaagagcataaaatgaaaaggaagtttattgcattgtatatgtctctatcccattcaaccattctctgttgtgaagtgcttactggaagggatggaacattaattctgggtggctgaggctctgtttaagaccattggcaaaaatgtatggtcaaatttggaaatgctctttaatgacaaagtttgaatatctaagagtcctagctgcagggaacggttgtgggatatgaggcaggtctgatgctgggacaagccattgaataattcaagttttgtctatatctgtttttctccatttctagttcttaatctatttctcagatagccacgtttctgaatgccagtgcttcttcctttgctctctactccctcaaatccaaaaaagccctggggtctgattctgtcttggcctgctggataagccttcatgctgtggacttccctggccagggtctgtatctttaaaacgatcctatcttatgttcattactgcaaagggcctcacttggtggccaatctaaatagcagttgacatgagtcccttcatgggagaatgaaagttgttttgtctcctctgatcagttagcatttgttttacaacaaggacatttgaagggttaaaccaaagagatatttttgttgaagagattcttctttcaaatgattgtctgtagggccgcctatgttgacttaatccaacttttaaaattgctaatactgaaatacctgtagttccctcagtctttttttttttttttttttatgtgagctttaccagtaaccagaagtattaagcattgtttttctgactttcatgtcctattctggcctgatttaagtgattatttgtgtgagggtataggcattgggggtatgtatgcttaaatctatttctggagctacagagtagaaaatggcacttcatccagtaagaggaaattttggttttagggaagtcatgacttgtttgttatataatgagcattgattcagcatcttctatgtggcatatacttacacagacatagataagatggagacctgccctcagtggggttcacattatgactggggagatggccctgtaaattcacaggagatggccctgtaaatttaatacattatgtaaagataaatgcacagatttctctggaaatatagagatgtgcagtcatttcatctttttaatcaggaaactcatctaattggagatgacataggtttctcatctgggctttcaaaggactttttatttcctctacgtctagcttttctagagacttgaaactatttgaggacaggaagtatgtattattccctttatctccttggttcctgttaccatacatctttgcgtgtttatttgaaaactggatttcaattacaaagacttcctggatatcttaaaaccaggctttgaagatggggaaaaacctgtcttaatctttgccaactcatcctctttttattctcattataaaaatgcaaagcaaatctggcaaagcaggcactgaacttttggtttcagttgccttttacttataccagaataatgataatgacatggcatattacaagataatctaaaacttatgcagtttaagaggagcgtgtgtttcatttctgtatgtaataaactaaaatgggagctttggactatgtgcctttcaaggtagttcaaagttttaataaatccttgtgcggatgtgccaataataaatgttaagaatgcttaactgacatttaaataatttttttatataaagtgttagaaacatttcagtgtcttcatatcataatcactgatcactttttatcttgtgaaacaaatctaaagtgtatacttgagactttccggtagaaaaacatggtggttatataggtagttgtaatatcttggtagaagctcaagggcaaagaatagaacattttaaaagcaggaacccattggaaagtaattttttatgagaagtcatcaatattactttaagaaattttacgaacaagtttacagtaagcctcactccttctaaagtcaagttacctgccttagtacactttttacctttgtctagtattaaacatcaaagcctgccctcctcaaaaaaaaagtcacattaactttgactttggcataactagaaaaacactggaaggatctgaacacagagaaacttgaagatttcttcacagtttatttgagatgtttctactaaatcccaggctgagtttgtcactttccaggaaggaacaagcacattgagcagatgtgtatccgtggttgtgaacagaatcatctttgaagagagcagagattttggtattccctgacttgggtttaatcttatcatatcagttaatagctgaatgaccttagacagattacttttcctccctgtaatggatttgcttctccatgagtttaattttatggcaaataattatttattgcttgctctgtgtcaaactgtgtgctaaaccctggtaatagtaaattagacagttgtaattgctctttgcttggaacttggcaaatcatatcatttgggtgatacccctacctcacaaagatgttgtaatgattaaatgaagtcaggtatataaagtatatagtgcctgtatatagtaagtgctccataaatggtattgaattatcattctgatcattttcataatttggcttcccttgttttgactttaagaagatacatgtctcctgtaggaaaacacagaggaaaaaatctggcctctggctgcttaaattttgcttacaaactacaagctctttatttttgagaatttaggccatttaaaacttatcccttttctccattgggagcagatattaaaacaaatgtgtttttctgacatttatggttaatcaaattgttgataaaatcaacaatttatccattttattagaatagcaaagctggagaacagagaacagacagctaagttatttgctcttgcctctgtgtatgtggggccaacacaattgaattaactttttcaagaccaaacttctttctgtattttctaaaatctttgaaatttttaaatctgatttgaatgtttccttagaaagttttatttccctcactttttaaaatctaaactagtcagtgacaccaaatctaacccaaagcttcacattgtttgtgagtttatttttattgtcgttccatttttttcccttcatttctgtgaaaagtgtcattttggtcataaagaggttatcctttagataagaagctattatctgaaaggtttttgtagagcttaggaatatttttctttttggaataggtgttcaaaatcttgtctttactgaattcaaatgtacatcgcagtcacattttcctcttagagaaaacttagctgctccttttggacttctctcatttgctttattcattaaatgctattacactaacaacatgaaaaatcttgattatgttatttgaaatatttgtttttttaccttaggcattaaaaaattataaatagcaataggtactgtttgagatgaaagccatgcttattatttagttccagtgtcacttgtgtacaatgaaatgtcaagaaactgggaagtataatattatgtcaaaatgcattaagataaaactttattttttttctttaaaaaagtagaacctgactatcaaatgttaaatagagtaggcatgaatgttgtttattggctgtttagtgttccttttttagagtttaggttaatggagcagttatgttttaggggtaattgccctggtatggtttctgtcatgctgagcagcagtcctgggtggcattggttgttggtggatttatcctttgtttttcagagacatgcctttcagagtgcccctactaacctgggaggcaggattctgtgtcactttatattttgaagactttggtactagtgcttcagacaccattgaccaaatatgcacagtaaacctaagaaaacatgttcccaaagaattactgtaaaacttttaattaaaaaaaaacgtggtatacttgtacactcagtaactcatactaacattattcttaaatgtaaatgattgatatttttatagtgtaataaaatctcattagattaaaaacacatgttgaatctccacactgtagataagccaatttttcctaagctgttaaaggaaaaagtggggttcttgtgggcttgggagaagcacctgctttgaattaagctgtgtttgtattaaccactgtcaatttaacaagggtttgctctgtgtgctttgagcaatttgagggagaagtccctagatgcttatcaagtattactgtcattactatagttcactgtttcattacattatagtaatactgatggctgtcaattgttttgaaatgcttttttctgtattctatttaatttactgagatatggagaaaatcgtcgaaggaattagtgtatctgggtcaacaatttggctgaccaatcactagacttcttttggcttcatactgagaaataaaaatctctaacccatagttattgtttatctcatgctcaattttgtgtataataggggtatattcacttataaaatgcccaagagtagagcacacgcacacattattaaataagaacatagatttccaaggcctcacagaatgacatgccagatcctgaaggtacctgaatccttgtttgttttggtgatgaatttttttttttttccccaccgaaggggcctggtccatgtcctggaggagaaataggagtagtatcattagatataggtgtttatgccaagttattaagaaatagagctttttgtccagggtagagagaagcagcccaatgttgatggggatgtgggtgggtggtgtggggagtttggctagagcctcacatactctagccttgctattgagtcctctcagttgtggaccttttgtcttgtgccttgtcaatagcatccactgaatatttcatattcactatggacagatcccaaatcttgtgtgtacataagagaaataaaacctactcctttcctaccttgatcttaaagccaaaagtagagaagcagaaaaacatgcttaagtcttaatttttgcttttgggtcttaaggaacagaagtgattgagtgtgcaactctaagggaatgctggatttggagtgatgaatagcaacgaggttaggaaatctctgtattatagcctccagagtatctcagaaatattcctgtcactatgatgcaattaagtttagacaaactggaagataagagctttcgaacactgtcaagtgatttacataaattatttctaaactaataacagcccagccaggtatttctcttttgcttcacatgcctgaattgcaatgaggcagagaagagtaagttgcttagttagatgaccttgggcagtaatgaagctaggtttttcattcctggggtatctttgcctgcatgcttgtgcttctcccagtatgttgtctaaacaaacttatacagactttaaaaatttgctgacgttctttctagggctatgtgacagaaattatcatgagttgctttttaaccaggccagctatacccagaatggatttgtgtacatgattgagaatgccttatttgatatgtggcaaatatcttcacattatgatctaaaattttttttctgagtttgtgaactaagtaactttgagtggatgtattacaatgtgccatcaagtctcagatcatttatttgatttttttaagatctcctaattttaggaatgttaaataagaacatatgtaccttagaatagaagagatgtagtacaaatgtggtcctctaactggctagttgagaaataatggagtatttggattttgattagtgtatgtagatgcctttataggttttatgactttcatgcagatatttatgaatgttccactgtatttgctgtgataatggaacattcttgttaagtgctgaggattgtaaaaccttactaatctaaattgctcgggatcatactatcacactttgacctttatagcactggcctgaaacctttaaaaatagaattagtctttaaaaatagaatttttaaagactttaaaaacagaatttttaaagactttaaaaacagaattagtaagtatattttatttataataatctcttgtttaccaatttttgatgctctattttacttaatcttgttaaaaacaaactaaactgtgtctctctcctccaaacgtccttggctgggaataagtggtctttaaaaaagaaaacataacatgggatattattttgttgtaatttagatgattacatattaaattttatacaaataattaaagattaataatgtgaagttctattccagagaccaaattgtaagcagaaacataaattacagtaaaagtatctattctattggattaaagaagaaaaattacttcagtagcaggattgcccagaatcctgctatcagtgtagctattggagggttaaaaacaggtgataagcatagcacatcaagggtaacaataaatagtgcagtctaattccagtaagatgaaactcttctctggttgcagaaaagagagtgggtgatcaaatagtgactcagaaaagcaaatcccaagaaatgactcaagcacagaaacactttaagaatttctttaccaagatttataataaatgaacttatcatttcttaccaagcctttagaaataattatttctaactttccaaatgattgccatttattaggaggaagaaatattcattaatctttcatttcatgaataagatgctttagattgccaaagacacgtgaaactaatagtagcccaagatatgaatataccaaaagaagacaagcagggataattctcctttaaataactagtagatgggttagatgtgataaacacttgagttttaaagctattaaatgtataagtgaaggaaaaatactgcctttgagtgagtggagaatagaaagaaattgtttgaacgttttgctttcatgccttttctaatcttacaaccactttataagatagggtggttgactgagtttacaggtatggaaactgagatgcaggcttagtgacctgctcaaggtcataggcttagtaaatggtgcaaatggaaaccctcatatgactccaaacccagttctgtttctcttataaaattgtctctatgtccaaatgaaggatatgaagactaaatgaaggaattcttttttttaacaaaagaaaaacatgttaatgtgtatctgtcagacatggtaataaggaagttctggagatatgggggagtttgtaatttttagaagctatgggtaagaatgtactcagactttacagagagttagagtgctttaaacaagtgcttctcaaacttcaatgtgcatggaaaacaaccagggatcttgttcaaatgcagactgattcattaggtctggggcagggctgggattctgtatttttaatgagccttcaggtcttgccagtgaggaccacactgagtaacaagggtttagataataaaaaaaagtgatcacatgatggagtgagagtttaatgaaagtggtggggatgtaagtcttgagtgtggatctaaaggatgggtaggatttaaatgagaagttaaagaccactgcatgtccaagggcacagaggcaagaagtccaaatcaaacatttcacagagtcttctggaggtacagcattgagtaaagatgagttaagtagggtcttagctcttcgggcctacattctgatgggggaagcttaaggcatgagtctttaatggaggtgggcagattggaggcaggatgagaggtaggttgggacaagcttgagtgaggcctgtagtatcctggctaggggatttaaactttatctcacaggtaatgggattatcaccaaaaacttttgagcagataattaaaatgctaaaatcagagacttagaaagatagagtaatgaagtagcctacacaatgaattgaaggagaacaagtatggaggctgagagagaggtaaggtaattacggcagtcaatgagtgtggtgatagggaagccaactgctgaaagcagtgaacaggtagatgaagaaacagatgctaaagatgtttggagtaagacgtgatgaggattgagccaagtgaaggagaaagaagagttagcgtttgagctgtgcaaccattaaaagaaacagaaaaggtagctgatttggaggcaagagatggaaattaattttttgacacattgtgttggatgtgacagtagaacattcaaatggaaatataggcattgtcaatatatttaagtagaaataaacactggctttgtagatttgggaggcatctatgaagcaataatagtcatttgtaggaaaacaaagtccagctctgaggaagtgaaggtggaaagagaagtattcctcattccgtttttaaaaatgagcacttcctggtgttgctttttttttgttttgttttgttttttgcctatgctttcttgctggtgtaaaatgatcactgctgactccaaaaccaagccatactttttctatgctgttttcttctctaggagacacttcttacccatctttgccttttgttttacttttttttccagctttattgtggtatcatttacctataacaaaatttattctattttgtttacagcttgagtttttgtaatgaacagttgagtaaccatcaccataatcaagctatagaaccctagaagttttctcatgtccctaagatcaacctcttacctgaactctagccacagtatagttcattatagtgttgctttttctagaatatcatataagaggagcatacagtatgtagtctgttgtgttttatccctttcaatttgcctacttttttgaaattgattcatgttgagtaattccttattactaagcagtatttccaaatgtagatttgccacagtttgtttatctgttcaccagttgatggacatttgtgtatccaagttttggctattgtggataatactgttacaaatataagttgtcccacattctcctcgacatttaatattatcagtctattgaatttagtcattctacttagtgcatagtggtattttattatgattttagctcacattttcctcatgactagtgatttttgagcatctttccatgtacttaatggctgttttaatatacattattatctgaatgttttaaaatcatttgccaacttcttacaactgagttgtctttatctcattgaattataaaacttccttatatattgtggttagaagccctttgttagatatatcagttatcttctcccagtctgttacttgctgtcttgtttcacagtttgtcttttgaagagcagaagatttgatgaaattaccatttggttattttttcttttatgatccatacttttttgtgttctgcttaagaaatctttgcctaacccaatgttgcaaagagattatctaataaaaaataatgcgaggtgataaggactatgaagaaaaataaagcagggcgaggaagagagaatgtcaggaaggttcttttgggtataatattttaagtatgtttttagaaaaacctcttcagtagacttaaaagcaaataaaactagctgttggaattaatgttgtatgctaacaatatcattaagagttttgataaactttatctgcaaaaactcattgagttgagcctttagtatcttttaaagttctcggcagggaaagggcaccctattcaataaatgttgctgggaaaactggatagccatatgcagaagaatgaaacagaaccacacttctcaccgtatacaaaaattaactcaagatggattaaagacttaaatgtaaggcctgaaactataaaaatcctagaagaaaacctggaaaaactcttctggacattggtccaggcaaagaatttatgacgaagtccttaaaagtaaactcaacaaaacaaaaaatagacaaatgagacttaaatggattaaactaaaaagcttctgcaaagcaaaaataaataaataaaaataatagagtaaatgtataatctaaaaaatgggagaaaatattttcaaactatttgacacagggctaatatccagaatctacaaggaactcaacaagaaaaaacaaccttgtcaaaaagtgggcaaaggacttgaacagacatttttcaagagaagatatgtaagtggctaacaaacacatgaaaaacatgctcaacatcactgatcatcagagaatgcaaattaaaaccacaatgagataccttataccagtcagaatggctattattaaaaagtcaaaaaacccaaaaagatgttggatgttggtgaagatgcagatagaagggaatgctgacacgatgctgttggtgggaatgtaaattagtacaacctctatggaaaacagtgtggagatttttcagagaactaaaaatagaactaccatttgagccagcagtcatctatccagtatctacctaaagggaaagaatatcaaaaagatacctgcagtcatgtttattgcaacactatttgtaagagcaaagatacagaattaacgtaagtgtccatcaatggatgattggataaagaaatgttgtggatatatatatatatatatacatacatacatacatatatatatatatatatgccatgtatatatatcggatatatatatatatatatatatatatatcggatatatatatatatatatatatatatatataacgttaagtcgtagtaagtgattgtgtctaagggccacaagtctttttgaagttagttcattcataaaatcgtgggaattacagaaccaggaaggacttatctcgatcaacatttgaacttctgtatagtcatttcccttgcctccaggtgcattgttcattgttctcttccttgtctcccactcctaagtcaataatttgacaatctcgtgtttgatccctttttatactctattgaaactgtaagaagaaagttggaattatatgatttgaaagctttttaaaaaacttcttggaatagcttttatgaatgactttgataacatacccattttttgctaccaataacttcgattgtgatttcaaaagaattttaatttctgaagactttaaaaaattgacataggttaggaggagataaatatagtgtaaaaaagttattagccttcaacagctctggagcacgttatcccacaattctaatcgaggtaatacatgggaacatctaatattagttcagagtgcttcatcatgcatgtcatacagttgatgtgagtgttcactgttttatttgaacttaccagaaagcctctgagagagagcctctctagggacactagtaaagctctaggttgattttcctatcaatttaaaaattgtagtgtgaattgttaatttgagaaatgtgcacttttaagaaatgttcctttgttaagaggtaaaaatcagaataccagagctggaaggtactaaggacataatctcattcagggcagtccttttgcatgtgagaaaagtgtcccagatgaggtgaggtggcgtttgcaatgtcagccagtgagctaagatggagatgtggatggaagtgccacatccgctgtccaggtgtagttattttcactgcatctcatcgccagctcagctggcaatggacttgaatgagggcactgttttatttcttttttttcttcctcccccagtgttcactcatttcagtgaaactgtctatatgaatggtactttgtttacattttgctttattattatagttcggatttaggaatctgtataaaataaggctagccttaaattttaaagacaacttacctgctttaaccagcaaaccagaatatgttcatgctattccacatttaagaatataaagaagaaagtttaccaatggcaattaaatttttcttcccagccacggtatatttttcttcattcatgttgcatacctattttcagagtgttggtctgttttcctgttttaaatctggtgccttaactctatttacacatcactacttttgtggaaaatactttggtattataattctctgtaggatttggaaggtggccttaaattcatgttcatttaatgtttcatcacattcagataaattatttgaatgttatttacttctgattttcttttcttgtttttttttttttttttgagacagagtctcgctctgtcacccaggctggagtgcagtggggcgatcccggctcactgcaagctccgcctcccgggttcatgccatttccctgcctcagcctcccgagtagctgggactacaggcgcctgccacgacgcccgcctaattttttgtgtttttagtagagacggggtttcaccgtgttagccaggatggtctcgatctcctgacctcgtgatccgcccgcctcggcctcccaaagtgctgggattacaggcgtaagccaccgtgcctggccacttctgattttcttaactgggaaaaacaaattagagattaggcaatacaaaaatatctctagcctggtttctcactgattacccttcttcagagactacgacaagaatgcatggtattatgaggacattttaaaaccaatgcaaggtaacttattttaaccttctaaataggattcctttaaagctgtctgtggttgacttttcagacatcttatgaaagtaatttcttcggtgctacttgaaacattttgttctgtggactcaagatctgtggtttttatttatttatttatttatatttttttgagatggagtcttgctctgtctcccaggctggagtgcagtggtgcgatctcagctcactgcaacctccgcctcccaggttcaagccattctctcgcctcagcctcccgagtagctgggactacaggcgcctgccaccatgcctggctaattttttgtatttttagtagagatggggtttcaccatgttagccaggatggtctcgatgtcctgacctcgtgatccacccgcctcggcctcccaaaatgctgggattacaggcgtgagccactgcgcccggccaatcgagtgccttttaacaatgcgcccttaagcagatgtaagcaccgtaaggcatattgagtttttttgaagtcaacacttgaaaatcattggcagtcgttccaggcgtttcacttaacttcgagtttctttgtgctttttattgtttgtttttaattctagttgggtaaggctagaggacttatgtttcaactgaactttttttcagggtagtagctaaactcgttgaagctgtagtttcagttcagacgtaattttaactttggtatattgctagggcaagggctttcaatcattagcatgcatcagaattacctgcagggctcattaaaacatgtattactatacccccaactctcccaatattttaggaaggtcctggaggcatctctgtggaggaggagaagggtataaggcaagactggaggctggcaggaagtgaatgtcatctgaggaagaagaatgaattcaagagatatttaggagctcgaattgatgggatttggtgatgagagttttcaggaaagggagttgtttggcttaggcctcagcttctgatgctgaaagttggaggctcctcacccaagtgcatgcatcattaatcctcaagcctgtacaaccaggacagagcatgtggaaaggtgtgcaggcttgaggattaggtgatgcatgcacttaagaacttatcaaactttaaattctgggcagagataatgacagtggcattctaaaggacacagctgagaagtttcctgggaagtattagcataattgggttggaactaaatatggtgaacaggagatggggatggggggagaactcattcaattcattagttttgggaaggttttgcaagatattcaaacataaaatgggaacgttgaaattgattgcaatcaatgtaaactaatctgaaagacatctgattgaatgtatattgaacttgaaagttaactgaatgtcaggattatattaacctgaatttgaaagctagttatattattcatttgaagcctgtcacttctttctcaatgatttatacaggatgattggtgatactctaatattctgaaattccaagtgttatatggaaggctaaataggaagtgcatgtgcgtgcatgtgcatgcatttgtgtatatatatcaaatcaaggatagctatgtaaatggaaaaattgacataacgcatcccattgactttctgaagacaagtagctttatacaagttatcagaaacaaaatatttagttaaaaacagacattatgatttatgtttttattgggggaaccagcccccaatatttcaatgtaggttcttttctattttccctaagtgtcagccagtctaagaaataaagggaaagagtacaaaagagataaattttaaagctggatgtccgggggagacatcacatgttggcaggttccgtgatgccccctgagccgcaaaaccagcaagtttttgttatggatttcaaaaggggaggagtatacaaatagggtatgggtcacagagatcacatgcttcaagggcaataaaatatcacaaggcaaatgggcagggcaaggtcacaaggccagggtgaaattagaattactgatgaggttccctgtcccactgtgcatgcattgtcattgataaacatcttaacaggaaacagggttcaagagcagagaactggtctgactagaatttcgccaggctggaatttcccaatcctaacaagcctgggggtgctgcaggagaccagggcgtatttcatcccaactgcataagacagacactcccagagtggctattttagaggcctccccctgggagtgcattcttttcccagggctgttccttgctgagaaaaagaattcagcaatatttctcttattcgttttggaagaagagaaatatgactctgttccgcccggccctgcaggcagtcagactttatggttatctcccttgttccctgaacatcgctgttatcctattccttttctaggtgcccagattttatgttgttcaaacacacatgctctacaatttgtgcagataacacaatcatcacaggatcaagaggcgacatacatcctcagcttaagaagatgacgggattaagagattaaagacagtcataggaaattataagattattgactggggaagtgataaatgtccatgaaatcttcacaatttatgttcagagattgcagtaaagacaggtgtaagaaattataaaagtattcatttggggaactaataaatgtctatgaatcttcacaatttatgttcttctgccgtggcttcagctggtcccttcgtttgggttccctgacttcctgcaacaattttttggacaattactattgctcaattcctccaactttattcatgaaataggttggatttgcttttattagtcttgggaagtttgaaaatgtatttgcacagaagaaatttctcattcctttttctaatggcacctgtactttaaaaaatacatttataattatctaatggaaaagatgatgtcttgggagtatttttttaaccttactctattttcctttttttttttttttttttttttgctttttttttttcttttattattatactttaagttttagggtacatgtgcacattgtgcaggttagctacatatgtatacatgtgccaggctggtgtgctgcacccactaactcgtcatctagcattaggtatatctcccaatgctatccctcccccctccccccaccccacaacagtccccagagtgtgatgttccccttcctgtgtccatgtgatctcattgttcaattcccacctatgagtgagaatatgtggtgtttggttttttgttcttgcgatagtttactgagaatgatgatttccaatttcatccatgtccctacaaaggacatgaactcatcattttttatggctgcatagtattccatggtgtatatgtgacacattttcttaatccagtccatcattgttggacatttgggttggttccaagtctttgctattgtgaatagtgccgcaataaacatacatgtgcatgtgtctttatagcagcatgatttataatcctttgggtatatacccagtaatgggatggttgggtcaaatggtatttctagttctagatccctgaggaatcgccacactgacttccacaatggttgaactagtttacagtcccatcaacagtgtaaaagtgttcctatttctccacatcctctccagcacctgtagtttcctgactttttatgattgccattctaactggtgtgagatggtatctcattgtggttttgatttgcatttctctgatggccagtgatgatgagcattttttcatgtgttttttggctgcataaatatcttcttttgagaagtgtctgttcatatcctttgcccactttttgatggggttgtttgtttttttcttgtaaatttgtttgagttcattgtagattctggatattagccctttgtcagatgagtaggttgcaaaaattttctcccattttgcaagttgcctgtttactctgatggtagtttcttttgctgtacagaagctctttagtttaattagatcccatttgtcaactttgtcttaaactaattagaattaaaaagtttcatgtgaaaatttggtaacaaaattcagctgtgaactatgagcttcactgtcataaactgttggcattgattagctgtagatgaggattaaaagggagaattaggagtaggtgtttcattttcttcagccaaatgatcctcatatgctgtgaatagacttttaggtcagatcaactggggcttgaattataacaatataataaaggtgacttctggaaaattgcttaatctcattaagcttcagtctcacctctgtaaaatgtgaataacactgaatatagaactgcattggtgataaaattaagctgcatatgaaatgtgtagggcaatgctgtatagtacttgtgtttattttctgttgccgctataacaaatgaccacaaatgtagtgacttaaaacaacacaaacttactctcctacatgtctctagatgtcatgtctaaaatgagtcttaaggggctaaaaacaaggcatcagcagggttggtttcttcttgcagctccaggggagaatccacttctttctgtctcttctagggatagccaagcattccttggctcctggctgcatcactgctccaatctctgcctctgtggtcacaatcccttctcctctacaacagtcgagtctccctcttcctccctctcataaggacacttgtgattatgtttaggacccactgggataatccaggatgtctccccatctgaagatctttaatcacatttgtaaagtcctttttgccatgtagggtaacattcacaggttctagggattaggaagtagaccttggtggggagtggggtcattattcaacctcccactgaactcaataaattttcagtattttaaagtgtggagtaggaacaaagaattcaaaatggaatctttttctgtagctaagaaaaccatttgtgatggcataacatggattattcacatacagtatattttatgcacagatgtattttacagcatatacataaccattttggaatgcataaaaatggcatctaaaatgtgtaatattaggtaattgcttaaataaggcccagctgagggagcagggtcatctaagttggttacacttgctagaaatattttgcaatatcattgtaatggataaaatgaagatctgatatgttccttttttttgacacagagtctcgctctgttgcctaggctgaagcatgcagtggtgcgattttggctcactgcaaactcctgcctcctgggttcaattgatcctcccacctcagcctcctgagtagctaggactacaggcctcaccaccatgcccagctaatttttgtatttttggaagagaaggggtttcatcatgttggccaggctggtctggaactcctgacctcaagtgattaccccacctcatcctctcaaagtactaggaatactggcatgagccaacctaccgggccagatacatcatttcctgccactttgtatctgaaagacaagagagcttgaatgagtttttcttccaaggtggcaagaatgttgagctcttggctctactaaattgtaattcttcctgcatttactatatatgtttactgagtatctattaatggtttaggcactgaggtaggtcttgccctttggtctgatggtatgtttttcattaacttcttaggtgtgtattccttgcttgtctgtttgctttgcttatatatttaataccttttctaggttacagtctttaaatgagcctttcagctaattttagacccctgggaacctcaagtctgctttatctgattagtggagttagctaaattctgagatccaccgaaacagtggttctcaaccatgggaaattttgtaccccccttcccttggccccatgacatttgacaatatctggagacatttctgattttcatgcctggggccagggagtggcagtggtatctagtgggtagaggtcaggcatgccacttaacatccacaatgcatagtacagtttccccccgaagcagagaattatgaggttcaaaatgttaatattgccgaggttgagaaaccttggtctaaaattatattatctcgattaacctttggcataaatcaaattgtgaaaaatttagtgtgttgtatcttgggattgtgccagtaaacatgagataaagaggcttttgtggagcaggcaatatttaggactagagtgatttatgacataaaacttgagggtttggaatctcatttggggagggtactaattttcctcatggttgaaaattaaaattttgaaacctcccacttataggcagggtagaataatttatttttaagtaatatgtagacttctgaatgtgttgcatgcatacatagtttggcatgcattattttgaccagggttcatatcacacagcacatttaatatatattaaatcacagctaaggaataggtgcagtgataacttataaacaacaatttacatcagcttatgctttacagagaacttccatgtacatcagaaaggaaacaagtatttatgtgctaggcattttaaatgtgtttaatttccacaaaacctaaagatggatattatctttattttttaagataataaaatgtaacttcaggaaattgacagatttttctatttaatcttgtacatgcttgctttgtaatcttgtttattttcagttgatagatatttgttttacagaaatcttacttataaggacccagcagtggtaaaatacaggaaatgaatactgttgatctctcagtatgagaattgatggtatttcatttacttataagtcttttaaaaagtgctttggcaatatttcatttgtgaaattctgtagtgtgttgtatatacaggatagtggaaaatatctaaattttgtcagaaaaaatggcagtggggaacttctaccattgtctttgggtgacagatttaggaaagaaattattggcaacagggtttgaatcaatactttgagaaaaaaatgagttatagttcaggatatgatgaagataactttttgggattaagaaagaagtaatttattttaaaaatatagtaaggtagaaaatatttgtgattaccctcatactattaataaaacagggtcttgggaaagcctatgaatcacatcaaaccttaatagttttgtaaccttggcaaagtttcttaagcttttggagttgcagtttcctaatgtcaaaatcattgcattgttgtgtggattaaaggagataatgtacaatactcaacataatgattgatataaagtgattaataaaggcaattattacaattattatattacataattaagtataaaggaggacttaaacagatcacaactagaaaacacttcattaatactagtgtccttaagatttttaaactgttctgccaaaaaaataaatttttcaaagtttaagtaaaataggtctttgttataggacttctcataatttcaatttgctagtatgtgtattcaagaggacagcatagaattagtacttttaaaaatgttttgaccttcagacctattaaaatgttgccagtttctcctgtttcatggtacagtttgcaaaacacttggatgaaaacatataatcaggcaactttatttttattccaatatcatgatcctaaagactaaaagatttatattatcaagttttatattggttttgagcatgggatcaagtctggaaggacacctgaaatgtctagtttagtattcttttaagttgtgtcttcaggaatatcagtggtttggagaaaatttttgttgatgttaatactcatctctactctttgtcctcctttgaagagaagtcactagtaatttagtaattgtgtgtgtggcgtgaatgtgtgtgagatgtagagatgggtaagaagatgacccactagttcatcctcacccctcatctgctccacctctcgatagtactgttggctctgcctaatctcaacatcattacattgtcatatgggttaaaggacacaatgtagaatagtccacataatgattgatataaagtgtctgtgtcttgcttgcctgcactgcagtggccactcctgccacactgggtgtcccttctgttggtcttgctggtttctcctctacttcttaacccttaagtgttgggtttgtgagggttcaatccctggaccacttctctctctacttattttcttctttttttttttttttgagatggagtctcgctctgttgctcaggctggagtgcagtggcgcaatctcggctcattgcaagctccacctcccaagttcacgccactctcctgcctcagcctcccgagtagctgggactacaggcaccagccaccacgcctggctaatttttttttgtttgtttgtatttttagtagagatggggtttcaccgtgttagccaggatggtcttgatctcctgacctcatgatctgcccgcctcggcctcccaaagtgcttggattacaggcgtgagccaccgcgcccggcctctctctacttattttctaggtgattccattcagtcttatgaggttctatttcatctctgtgctgacaactccactaattacatctctagtctaagtttctaccttgatcatcttattcgaatgtctaattaccaatttacctactcaacatttttacgttaagtgtttgacacttaacatgtctaaaaccaaagcctactattttcattgctgcagttacctagcattatcaccttttaaactgtttggaagatcagtttaaaaatcttaaggacatagtatcagtgaagtgttttctggttgggatctgtttaagtcctactttatacttaattatgtaatataataattgcctttgttaatcacaggagaaaaatcatgtgtgagtttatttgcttgacatctactctctccctcaacacattttatataaccgaatgtcataactccatttaataaacagatcatacatagtggatactaaattctgtattcagtagtcaccttaatatgcactctgtttgtggtttaccgtctaatggggagacacacgtctcagttgtgaagttagctttacgtaataacaagcattttacaaaaagtagaaaagaagcattataagtctctggttgagagggttagggattaaacccacctttcggctcctgcagcagcactcctctgctgtgttacttaagtgggaatgtgtgccggtgtctttgaatgcgtgtgtgtgtggtttgtttctctttaagtgaaactatgctattcttagtagtgtgtgggagagctgtgaaatttaataacaaattatttttaacaagagggtacttattcacttatcaagattggaataagcattatgttgctagggcaaagtgttgaatttctaagtttttttctcaattaagtaagtacagaaatcgtcaggttcatatatttgggttcactaattgtctccagggatgatcttattttctcaagtgtcactttaatagtttccacaatgattatggcatgtttgtagcaatggcagattaaaaccaatgagtcacacgcctctaacgtcactgggaggttgtcaaatggaatgcagcttcatttttaggaatgaaggtgggagggaaggaggtagattctgtttcttagttttctttttaatgcagcttactttttttgagagaaggaaagaagtgaagtattctaagaattcatcttcaacttgttttattcacatatctcttgtttgacatagtgatgagagaatggtgattgcacttttctctattttaaatagtgcgatggatgagcttccattcatagaacaatagaacttcatttagtggaacaagaagccagtacctgatatattcctaaattcctattttgattcctaggttttgaagagcaatagccccttcccttagagacagtggtattaaaaatgattttctcattattctcttaaaatttcacttagtacatttagggtttcttatgacacctacacttttctcctgtttgcagatagactggcttgttgcatatataaaaatgaggtcaggagtttgagaccagcctggccaacatggtgaaaccccatctctactaaaaatacaaaaaattagccgagcgtgttggcgggctaatcccagctacttgggaggctgaggcaggagaatcacttgaacctgggaggtggaggttgcaatgagccgagattgtgccattgtaccagcctgggcaaaaagagcaaaactctgcctcaaaaaaaaaaaaaaaaaaaaaagccactgctctgtcctcagaagaacttctgctttgaattttccctactgtctcccactgccacacatgcctccgctcttgccccagacatatcttacatatttaaaccagatgcagtccatatactttttcttcctgtgactgctcatgaaatcatgattcacggcctcatttcttgatttttttttaaagttgtgaacaggtggccaagctgcataagcaacaactggagagcagagattacttagtggcttggagagggaccaagtatcttgtgagcccagctcttctaatatcagtccagtttcccaagaggcaactcccaggtcagctggtgccacccagggcagggcagggctggaactgacttttgaagggtggggtctgtaggaagaatccatgcattgctctgggaagtggcctcaggaagtagagggctggggacagaatcactcatgagttgcagttgttctgggcaacaaagcaaggcggatacttattctggtagcagggtggagtttgaactgggcagttacctctgctcaagccccttgaagaatttcagattccctgttaaccatggaggcatgggctggaagctgggtgtgggggcaggtgagttcaaacttcttaccttttctattaggatatggataaatcttcccccggggattctttggacaaaagcattcccattctgtcaaaaattccagtgtgaggtttttatcatacatgtttccctgtataatgattcagtcagataactgtatttgatcttaaacaagattggcttggacaggataggggctgggatttggggagaagagatgattttggagcataaagaattcaactcctaggaggttatgttatttaggcaaagcatggggagatcaggccttccagcgttgcaaatgagaatgctggtaccttgagaaagagaggtactaagacatgtgagaggaacacagagaagtgggattctgtggcaaattctatgaagctttactcccacgtggggaaaaatttcctgtctgtcttggccccgatctgcggagctggttctgtgagtggctttgatagctcatatatgaacatttaaatgcttggctgttcttagctaggcctttgatggactctggtatgcaaccatgtggccagtgtggctccagctccctgctgtctgggcccacacgcagactccttagagcatagtatgctctaaacataccctggggaaggcggtgctgggtgcatgtgcatgggcccagagttagctccttggataaacagaaggcatttagaaatatttttgatgcagccctagccctagaacataattggctggtgcactgcggtaaaactataatctcatccattagcaccttattccaaacccgatcataaatgaagatagattttggctgtgtaggcacattttccctcagattttggaaaatttaagggtatttggccaaggcaggccctggtaaaccaaggatgtgtggggagggctggcttggggccaacatggaagtttggacaatgctaataataccacgccagtgtgctttgcccttggtttgaccttctagaaattatttcttatccttctttaaagccttccatggcaaaagggcaaggaaagtataacatcgaagagtgccttgaattattcttcacagaaatgtctcttctgaggaagaaaactgtgttgggggtggagggggcggagttgactgtcctccagccactgccctgtcccctagtagtttggctgagatggataattaaggaatagccttgaattgtctcacttacttgtcctgctttgattaagcattttttaaatctctcactaaagcccagtgaggctggtactgttgttcccattttacaggtgaggctttggagacagtgaagtgatgcaatcaagttctcacagctagtgaaagtggagccagaatttacacactggaggtctgaaccccaaagtcccgcactcaaccaagcttcctcctcagggaacgacccggcctgggatccctgaagacccacagcatctatgtagacttttttacccactggtcctttggttagaaatgatatttcttgattgacttggtactagtattttaaaacctttgagtaaagaaaagaggatcagacctagagcttcctggttctaagttaacatagtagcagttaggataagatgattagagctgcatgagtccacttgagagcttggggctcccttgttcttactctctggcagaaagctcagatgtccatgatgggcatatagtttctggccctttgccagaaagcaaaggaattatcagagctattccattaatagagtggaagattgtgtctatgctgtatttgctatttcttgaatattaaacatgtaaaagttaatgtatgatccaagtatagagtaagggctatcaacatacccaagataggtattttttttgcaactattaatatttcatatctaccccttttttttttttggatggagtctcgctctgtcgcccaggctggagtgcagtggcatgatctcggctcactgcaaactctgcctcctgcatatctacccatttttaatgcagatttggatttcagtgcaagtatggattctttgggctctgtctttcagagctctgttaggaagctttttcatcacataggccaccatgtaagctttgtattcagtcctttgaagtttgtacaaagcactttggtctttgtttctgtatctgttttttggagggattattgatttgattctaaagaattctattttattgcaatttaaagataacaggttagtaagaagtataattatgagtatcaatacaatttgagttgaaattggacatatttgaagtaggttaatgcaatttaattgttctctgacattgtatgagtattgtctcctgagcttttatcatttcaggctttttattgctaatttacatttctataggttaaataaatgtatttaaccagaatttgagagcatctgtttgccatgtactgtgcgaggcatttttaatcaaatatttttatgtgcttgccaagtggtagaccctgtcttaaggcagttggaatatagcagtgaacaaaatcacaaaagtccttttggattcaggtagaggagagaaaaaaatgcctatagtagatggttataaatacaaaaataaagcacggatgagagattgggtgtgtcaggtgggctagttgcagttctaaatattggggtccactgatgggccttgccatcacatggcttacagccttgtaataattctttgttcacagagttgttgttctttgatcatagtgtagagtaagggctatcatcatacccaagataggtatttttttaaactattaacattttatctgtacccatttttattgcagacttgggtttcaatgcaggtatgggttctttgttctcttctctctcccctctcccctcttctcttccttttcttgagagagggtctcgctttgtcacccagcctggagtgcagtggtgtggtcataggtcactgcagccttgaattccggcattcaagagatccttctgccctcagcctcccaagtagctggaactataagcatgtgctactgtgcctagctaatttttacattgtttaagaggcagggtcttgctatgttttccaggcttattttaagcttctggactcaagcgatcctcccatcttggtgttccaaagtgctgggattacaggaatgagccactgtgcctggtctgtttcttgatgaacacttcaccattagaaggaaatttccttctaatctactgaaacagagggcattatccctactttgtccagaaggaaatcaaagctttgagagtcaagtaaattaccaaatgaacacagtgagacccagatctgactccaaagcgcaggcacttaaacatggtatcagaccatgtcaactttggacatatttgttgtggaaaaattatccaactttggagctaaggctgtcttatatttcattctgaggtgtcgtgcagtaagtaggctggttcatggagtgtgtgtgtgttacctgtgttactgtgagcttccccttcaccattgcagtagttctattttaaaggactttgggttatgccctgtggccacatgacaggcaaaggagctgcttggttaccgacttccatgcagtggaatgcatttgtatgtgagagagtgaactctgtttactccagcaaatcattgactacttgaattcctggcattgcatttcagagataggacactaatttggctggcctatgtatcatgtccaagagcatgttataaatgctcatatttagaagggaatgtaaagtgagtaaaaggtaataatgcgaaggtcactgcttatggtgtttatcacagaataggacatcccttgtatttccaatgattgttttatcatgataaaaagtgaaaacaaatgagtatgttggattagaaacctttttgaggactgtggaaatgaggtcaggggttcaagagagctctgtttttccttctgccttgagtgtgcttatgatcaaagtgggaggatgttcagcccagtgcattctttgtcctgtgcattgatgattcttttgtgctttggctaatttaatgtttgacatgtgtatgttggttattagtccaaaaaaggggctatatgtttgcaactctgctgttttttgttgtcagtttctagtgacttttcccacttaccacttctaagttaaagtgctgggtttttgtttgtttgtttgttttttgagacggagtcttgctcttgtcgcccagactggaatgcagtggcgcaatctcagctcactgcaacctccgcctcccgggttcaagctgttctcctgcctcagcctcctgagtagctgggattacaggcgcccaccaccacgcctggctaatttttgtcctttcagtagagacggggtttccccgtgttggccaggctggtcttgaactcctgaccttaggggatgcaccctcctcagcctcccaaagtgctgggattacaggcatgagccattgcacccggccattgctgtggatttttataagataattttctttttactcaagagttaagctatggtttgagcacatgggctgtggaatttattctacttgtttacttttttgaaggataatatacagaaaagtatacatattacaaatgtacaacttaaatactttttggaaactgagcacacctgagtagccagcttccagatcgaagcacaaacaattgtcatcctagtgccccatcctcttctaatctcttctgtcattctcttcccacaagggtaaccactaccctgacttctaacagcatttttttattcagcctgtctttgtactttatatgaatggaataatacagcctgtactcttttgcttttggcttctttttctttccattatttgagaggttgaacttgtggttgaatatagttgaaggttattttcattgccatatgatatttcattacgtggatatgccataatttatccattataatgttaaggacatctacgctgcttctagtttttgttgcgatgaatagtgctgtgataaacattcttgtatataactttttgttaacatatataagcgtttatgttggatgtatacctaggaatggaattattaggtcatagaatatcaatgtatttagcttgaatagatattaccaagtgacttaagagtttaagtagttgtaccaatttacatttccatcagtagtgtgagagttcatgaatttcattgttgagatgtttttttgggaggtgggtaagaggtgcatgctcttcttaggttcatttcagtacaagtttgttttctggaaaggaatggtcttagttgccttgttgattctttgaaagctaagttaaaaattagtctctgtgtactcacattctctttttactttttctctgtatatatgaatatatatgtgttttatgttgatgtcttctacatgcatatatagatgtgtgtatattttatcttaaagtatactactgtgctgttagactggacaggccaattagaagctttcttaatcaggcttctacaagtctctgaattcacaccgatcctgcttaagtgtctctaatgaggggaagtgctttctttttaggatgacccatccctttgtgaagtagcatattgttgcttcttcaacactgtggtgccatctgcctctttttaacttctcccataagtatcatgccctttcatatgtgagcaaaaaacccatgattcttataatacagtgaagtttcttcaggcagaggttcatggctgttttttaaactgccacttttcaacatttgcagggtcaaagtctctgagcagtttgctctggggaacttggatgaaaaaccttatggatgatgaaaaaaaaaccccatcagtgcaaaaaacccctcgcttttatttttcattgtgtttttaaggtttttttccccccatttcccagttcttttttcatgaacacactgatcccccctcattgggtttaaaccttgtttaagaaggaaatacaaaaaatgcacataatgtatttaaaaattagactgaaatgaataaaatgaaaaaacagcactgctttttatagaaaactgacaattatattaatgcatatcaatgaatacagaaaatcaatgcattatacttttgtcaaatcaatgaatatggaaaaattcttctgatggagataatatgagctctaagagatttggacttccatgtgatattaatattcatagaattttagaataaaaatgagtttttttctagctataattaataatttaaggttcacggatattacctaatagatattttctttctttacaggcaagaagagactgacaggagagtgaaaaatgtaagatacatttaccttaatggagcattataagtggctttcactttcatgttctgtaagaaggcagtgaatctaaaagtatactctacatctcttttctaattaattttttgctacaaaccaatcagttacaaacagtaaatatgtttaaatatatgcattacaatatatggttaggttgttcagctcccacttataagggagaacgtgtggtatttggttttctgttcctgcattagtttgctgaggataatggcttccaactctgaccatgtccctgcaaaggacatgatcttgtttcttttaatggctgcatagtattctagagatgaacaatgagaacgcatggacacagggaggggaacaacacacattggggcctgtcaggtgatggagggaaggagagtcttaggttaaatagctaatgcatgtgggacttaatagccaggtgatgccttgataggggcagcaaaccacaatggcacacgtttacctacataacaaacctgcacatcctgcacatatatcccagaacttaaaataaaattaaatttaaaaacatattgttagagtggtataagaggataggttagatttaggaagctgtttgttatgtgttagcaatacgctaaaggcaagtaaacacattttaagatttttataggagtaaataggaaactaccaatttagactttaaggaaaagcactgactgtttaaggactctgggtaattcatcaatgtagactcatatgtcttacaatattttatggaaattgcaagaatatctaaaaatgttgcagctttattaaaaagtttaacatccttattaaggaagctgagaattattgatgtttaggtgatcattctgtaagttcgatgaaaaaacattgattgctttaaaagtttcatttgtgttttctcttatttttttccctcttcgtatatactagtagagtatatgaatgactaccttttggagtctggacttttggtctaagaacttgctcagagacaggaaaatttagcaagaaaagttaagatttttaatgacttttacctttcccataaacttaaaagaaagtctacttttcacttacagagtaatatgtgctatcatttatctacagtactcacctatatttgagcttgcaattggttgctaatcgactgatcttgttgttcatggatttttttttttttaaggttttgataacattgtactggctgggaagaaaagcacaaagcaacccgtactataatggtccccatcttaatttgaaagcgtttgagaatcttttaggacaagcactgacgaaggtaagtaaactacatctgtgtgagattactgctgtaatacagtatcactgctttcccttcctcctctcttctttttcttctccttctcctctataacaaatatggcaactccgactctctttgtcctactatcaattgggctgagtaaagaggaatgttactcatttactggctttatatgccaccaccaaggagtcagttgggtctattccagagcaatttccaaggtagagaaacttgcttaccttttaattctacataatttgatgacacatgcattggcttccttccttacacactttatgtagcttaagtattgctatactcatcgtaaactcaacctgtagtagagaggtgcttcctggactgttcacgcgcatggaatttactcaatttctttgtagtaatatgttcttgtcatagatgatagtctttaatgcccacactttcatatccccacaattctaccatgccgcctctgtttcctaaagagtaggacatggtgttaactggaacttgatgtaaggtttttaatttagaatcttttgttttatacacatttctagtcattcatattttgcaatcaatgtgacagccttttgaatgcttgaggatcatttgcagagagccaagtgccaggactgaccgtagttctgccaaatcttcatttataagatccacatgggaaaaacgaatttctctgggtagggatatttattcagggaaatttgtaggactcagaagagcccttttgtgtagtcacaatggtgtttcatcatctaattagtagtcattgtttcatgggtttctctaatggttaaatgataccacaccagtaaggcatttagcattagcctctagcacattgtaaggttgcaataaatattagttgctgtgattggaagaaattttaggccaggatgaacatgataaccttggcttgcacctaccctgatctttaaataattttgcctgagcccagccacatgtattatagcaagaggtgggattatagagcctagaagatacaggtattcctgttcacccccaaaatgtaaggagtcaataacgctgtattcaaattccttgaataagttaattcaggaaatagctgagatattaacatgcatacacatagtactaagtgttaggaaaacactcatgagagactacgtaacctcataaagcacaattgtctaagataggtgagcatattggtcactgcaatgaagaatggtgaggctttagtggaggaatttcagggggctttgagcacagggagagccttgatttacagttatttcagctaacaaaacttttgattaaaacctatgtggggggctgggcacagtggctcatgcctgtaatcccagcactttgggaggctgagacaggcggatcacctgaagttgtgagttcgagaccagcctgaccaacatggagaaacctcatctctactaaaaatacaaaattagctgtgtgtggtgatacatgcctgtaatcccagctactcgggaggccgaggcaggagagtcgcttgaacctgggaggcagaggttgtggtgagccaagcctgggcaacaagagcaaaactccgtctcaaaaacaaacaaacaaacaaaaaaccatgtgggactttggcttatgtactagggctgtctttgtagcctttggtccttttaatgacagtctgactcaggttgaataatcctagtacagtgtctatgccaggaatgctttatcaaaggctgtttcctgttaccagtttcaaaaccagaggaggtagttgaagaccttatggtgtataaaactaaggttgtggttccattccattataataaactgggggtagctgttagaggtatgtgactatatcacatgttttgtatcagttctattaaaatcaaaaccaatgtgttcatcaggcatttcccatttaaccagataatgcttaaaagctaacataaaataccaattaaacaatcgttggtggaagttgtagcacctcagtcagtcatcttggaagttggaggtgactcattttaattgacttgtcagcgtgcctccttaaaagccaggcaccagggccaaaggttattttataactgaagtggctgtcatcaataactttaacatttatgaggtcaaaaatccatcttgagtgttgaactctaaggccttaacaaatacgtgtttgagaaacctgacagatctaaacgcttaaatttaaaaaaatctttctgtattttgagaagcattttggcagcaccagcgctaggcctggcttccccatctgcttggaagtagcaggatgtaaggtaggcacttgcattttcatgacaggatgtcaactctaatgccagggtgtcggcatctaaagcacatgaaatctccttgaaatctactagactttattggtgctccagacacttgtcaaacaattgaatcatgaattgacggtattagatcaaaagtatgcctgagacagctgctaattattcactgcaaactcttcagctttttcataagttgaaaatatttataattaaaagttgaaagaagagtacaacaaatacccagatatgcaccgtctggttcaattattacaattttccatactggctttatctacatatgtgtttatccatccatctatgtttttacttaaccattttaatataaactgcagatgtatttctcccccaaatactcagtatgcatctcctaagaatatgaatattcttctatgtagctacagtgtttattatacttaagaaaattcagatattccccattatctaatattcagttgacattaaaactttcatgcttgtctccagctacttttcacagcactttttattttgaatcatgacttaatcaaggttcacatatgtttgattgttagtaattactaggttctttaaattgtctctgtattagtaagctcatctgaaagtaacatttctggtttttactatgacaaaattatcttcaccatattaaaaaattatagttacgagatattcatgattactataagtcaggactacaccatgggctttgtaaattttactcacatcctaatgtttaaaaagccaggttatattttgtcactaacattcacagaagaatgttagttaaaagtgcttatcttgagtaagttctatataattcacaaacctacagttaacatcatttgtgatgttcctgtgtgtcctttatatgagccaaacaaatattttatttaggtccatagaaaataagttatatatgtcagcaaacaagtatgcttcccttgattcaacaagaaggataagccagctgccaggaccttagaactaggttgtgtaattagtaaaagtgaatgaattctgtgaaatttgtgcccacttgctcctttttatttttctggggggagagttaactaacttcagttgttaaggttttatgttatataagccatcacaaatatttcctggagatagagtgaatataatcttgctgatttatctccttttggatgactaagttaaggttagtttttctttttgactcttttcacatttattgctagagaactgtaataactgagtttagcatttcaatgttactctatgaactttcattaaactagtaattttccttatttttaaatagaacatatgtactagtttattaaataatattgaatatctccttattattactttgaatattgaatacccccttattgtatcagttgtgggcaaacaattacaaatttattttctgtttttcatcagctttttgctgtgtccgacagagaaacctcatgccttacatgtcaaataaaacccaacttaaattaggcaaacaagcaagtaataaccgattgattatattttttggaagtttatttaacttactattctttaaaaaacgttttctttaggcactcgaagactccagcttcctgaaaagaagtggcagggacagtggctacggtgacatctggtgtcctgaacgtggagaatttcttgctcctccaaggcaccataagagagaagattcctttgaaagcttggactctttgggctcgaggtcattgacaagctgctcctctgatatcacgttgagaggggggcgtgaaggtgtgttgtgttttggctgtcagtttatttgttcacatattaagggagaactgggaacaggagagaatagaaaaatggagcaaaaactaggcaaaaatttcacttagaagtggattttcatagagactggagtataattgggggttttgttatttttttctccttcatgatggtgatagtttcatttttgaaaaatttcatttctggaaaggactgagaggtgacagttaattgtggcctgttttatcagtgataatctatcctggctcttctctctccagattcaggcttaatttgtgttcaagagttctataaactgatatatctaaacatagaaaggaatataagattctgcaaaaaaaaaaaaaaatcttctagtttctgagtaactttcatccttggcttttttcaaaagattaaaaaaactctcttaagcaaaaaaagaaaaatatttttacaattatttctatagatgagaagaaatgattgctatctatcatgatagaatattatgttaaactttgtagattgagtaatataccaccacctaacatgcaggtagaaatcctcttttggtcctttcagagtcagagctaacccaggacagagcaagtgtgaaaggaacatgttagagacattctgttgcgggaaggaaccttctttcaaaatcccaagcttatggtcagttcagttatttcaatgcacatcttattcctgtggctactgggtatagcgtcagcaatttctgagtgtacatctccagctattcagatttgactagattgaaaccacaagtgaagttttttttttgaaatatttctgtgcttctatcgacatcaatgtgaaaacattgagttctggctgtgatttgtgcttaattgttagggattttacattgcttgtgtatttggaatattacttttctatttctagatatttttcctagcatatctatgacaaaaatgtcaaaaatcagcaaacttaaaataattgtacagcgaacacacatgtattcgctgcctaattccaccatgatgttttactatgcatgctttatcttatactcatctctctctcctctctctctctttctctttctccctccctcctttctctattataatttagtcatcttattttttgaggcatttcagaatatatcacacttgtcctaaatacttcagtatgaacatcattaactagaatttattctttgttttacttctgatgtgaaacttatataaatacaacatgctatgaatttgttttccaaaaaaccaatcaacaatttattaagcatggtaacaaaaaacctgaaggctttatcttttagagtagtagtttttaaaaataaaaaatgtgaaacgctatttcagcattaacctttataattactgccacacgtattggctgtttgctgtcaaggtgtgacattttcatagcccagatgacgattccaatacgtttaaggaaatgaatctgagtatgtgattcatctgagtggttaaagctgtaaaagcagaggctgaaattctgaacccgctgtatttcttttcccttactgaagaacctactccatgtaatgacagaatttatatctagtcaaggaataaaaggggaagggatagagggcatgtgggaatatgcaggcttcagtcagttcagatgcagtggcccacccagcggtgtggaatctaagtcgtcttctcagatccttgttggaatgggcacctgtccatgtaaccaaaagcagaaggccactgtcacatccctttctgatcttggaaatggggctgcagaccttgtttaaagagtgcgtaagtgaagtcttggaaattacaactaagcggggaaaaaaagcctgggatggaggcaccaggccgataaagctcttttgtgatcagtgtgttaaaattctactgctactctctagattgtagtcctaaattgatgagcactataatgtagggtaatatttttaggataacagaattgcaatgtcacattctctagttttacgtgaaaactcatatcaagaatgatactttgggggaaaaaattctctgcaggacaccgtactgggctaaaaaatactttttcttaaaagttaaaaagtaaaatagtctctttatgactttaaaattccacatgtatggatttcggcaggagtaattgatatacttattggaaatgagaaataaatgtctgattttttagaaggtggtaaaaagaaagcaccagtttattgactactactcctcatggtcacagctgcgtttactttccctcttttgccaagactctactctccttttactctgtccctgtctcatagctgtatgttaagcgacttcctgtagactgttctcagtgttatttactgtagcttcctgccaggcaggagggaggggaagagactgcatttaactcaggttaaccctgcaggtgctctacctgctgagagcttgtagctgtcaggcactgtgcacagccaggcctggagagaaccctggtgagaagcaagtaacatttccaaacctttacaagtgcacaggaggcaggaagagaagggtgtgaaagagggacagcttggcttggatctgtagtgttgttctccccccttttcttcctttgtctttaaaagagtagattcattcttcttcttttaagaaagcagattactatttgtatctatctgaccttgaggagtatcaaagggtgttcttttgaatttgtgtttaaatgattttgaatcataatacagcgttcccaatataatttccatggccactctgaagaaactgtgagttctgtgctctcatttgggcataagacttcagattcctttggaactttagaagtcatccagtccagcctcatatctaatgtgtgattctggtttatagaatctatccagaccctttacaagcttgtttttttttttcttctctttctacatccttcctgatctctctcctcacatatattatagatagctgcatgccttattttaaattactgagttctcccagaattatttttgcatgttgttttaagtatctgtgactccattgctagattttatttctatgtattacatcaacaaatcttatggaaaatcatggaggaagagattgagaaaaaaggggctcactagtaaaataggacttattcttcttagagcctacagcagcaaaagaatgtactgcatgtgcctccagtatgcaaagcaagttcctcctaatggatcttatcacaacttcgtgacaaatttctaaaaatattccctgcagttagcagtggcagcactgggtttctaagggaaagacaaagcaggcgcgctgtgtgggtttcagttaggcgaataatctggagagtaaagcaaattcttgtgccttctttataggttttgaaagtgacacagattcggaatttacatttaagatgcaggattataataaagatgatatgtcgtatcgaaggatttcggctgttgagccaaagactgcgttacccttcaatcgttttttacccaacaaaagtagacagccatcctatgtaccagcacctctgagaaagaaaaagccagacaaacatgaggataacagaagaagttgggcaagcccggtttatacagaagcagatggaacattttcaaggtactgagatgggtgtgattattgagtttcgtatgcttttcgaatatggtaggatgttaaatgtggtaaaaagaatggctcttaaatgtgtttcatagatcatatattaagcttgactagtgagaatatttttcatccctctatttttagttatacatatcttgaagccatttcttctgttttagaatgtcagcatatgatttgctaggtctttttttagatgcatgacttcagtttattggtatttttcagcttaccagataatttgtattgttcatgatgagccatgccatgtaatgtttttccttttttgattgatcttagtggacatgaaaagaatcctttaatttctcagcaaattagcagaacagagtgtggttttgcaaatccagcttcctctcatggggaggcgtacggttttgaaagtggttcggactctgaggatgaacgaaggtttcctgacatagttttggatgacttagccaaccgtagattccaagtgaaaaagaggccccagaatttcatctcgaaaatcacctatcctaattcttgtccgcaaatattttctcctgctgatatgtttgccatggggctatatggactgacgaggtcagaaatacttgtcctggatctggctgtctattatgctgctgattttaattcagaaagtaacaccccaaattgtttgttatgtgcctcttccttttaacacagcttctaatgaagtatctttggcccgtgtgtatctagctatccttgagttaaaatgagatgctgttataataactttgtcctaggagctgtggtggtgatgagaatggaaactaatttgctttgttcacagtggtgtaaactttgtgaaccagaaagcatgccatttgtgttctgtgtcacaaatgctcatacagtgtcttaaccggttggatgttttgaacagtaatcagaggaggatttggggcaccaatgtggagaactggccaactgtacaaggaacttcaaagtcctcttgttatttggaagaggaaaaagcaaagacaagaagcatacccaacattgtaaaggatgatctttatgtgcgcaagctcagtccagtcatgccaaacccagggaatgcttttgatcagtttcttcccaaatgttggaccccagaagatgtgaactggaaaagaataaaaagggaaacttataagccatggtataaagaatttcagggattcaggtttgtcgttgtgcatgtttctgtcacaccagtgttcattcagtaccccagctggggttctatgtgcatgttttttataataataagagagacagagaaagtctaattagttctctagtatctgcggaacctatataatggaaatgaatttctgtttaaatttaaacctgaggatctagatcttaaaaagccctgttctatacatagtcatagcacggcattatttttagtagttctgtttttctccaattctttgtctcattccctcttcccttcttttcttcatgtcactcacagtagaaggaattcagactctgaggatgaggactcaggttctgacagaagcgccaccgtttttagtagagcacaaaaagcagagcataggctagacggcaactgccaaagaccttcactcttgctggaattagctaccaaacgggctgtaaaatcaccggactcccatgcagccaggagaagcagtagtgcttcggatgagcccaggtgcccctgtctgcatgagcctgcctgctgcgggtctggcctcagacaaccctctgcctgcttctgctgctccattagcctgggacctgattgcactgaatcaggaaacctgactcacttagtggacttagtacaaaagcgtaatgtataacacgctgctttctgtgcaactacatcagcttggaagtctgtaggattcaacattcttctttagcacaataatgtgtgagacaggatatatttacatgtggcagttcttttgaaaagccggttcaaaaaggcttgttagaaagtttacctaatttcacggttttgttgtgtgtggagatgtggaaaaaggaaataactttcaggtggagactgggaagggcaagtctagggaaaatgcaaagggaagattccttgagctcttttataaaacttcagagcaatttattttccctttttcctgctgattacatatacctattgcataaagtgcatgatgcacaacttgtgaaactttcaaagattattccttcttcttcaggggacacttaggccactgtggcaaatggaatgagaaagggataccaggggccaggcggggtggctcacgcctgtaatcccagcactttgggaggccagggcaggtggatcacttgaggtcaggagtttgagaccagcttggctaaaatggtgaaaccttatctctactaaatatacaaaaattagccaggcatgatagggggcccctgtaatcccagctactcggaaggctgagggagatgaattgcttgaacccaggaggcggaggttgcagtgagcagagatggcgccactgcactcagcctgggcgacagagtgagactctgtctcagaacaaacaaacaaacaaacaaacaaaaaacagggtaccagggagtggcttttgtgtgtgcctgggaggggtacctagtccatgctccagccccatccgtggcctccatggtgcccaactttcctgagaagtatgctctgctcttatttctttagggattatccaggaaagtcatgggtgttggattaaatgctagtctgttttcctagcaagagtccccacaatggtcctctaaaatgatttaccctcagtaactggctagttggtctgctaatcacctttggctagtcgatctgctaattaccttttctccctaagcttaataagattctctttcctttttcctctctgtgcatcagtcagtttttactgcttcaggccctccaaacatactctgatgacatcttgtcttctgaaacacataccaaaattgatcccacttctggcccaaggctcataacccgcaggaagaatctctcttatgcaccaggctatagaagagatgacctcgagatggcagccctggatcctgacttagagaatgatgatttctttgtcagaaagactggggctttccatgcaaatccatatgttctccgagcttttgaagactttagaaagttctctgagcaagatgattctgtagagcgagatataattttacagtgtagagaaggtgaacttgtacttccggatttggaaaaagatgatatgattgttcgccgaattccagcacagaagaaagaagtgccgctgtctggggccccagatagataccacccagtcccttttcccgaaccctggactcttcctccagaaattcaagcaaaatttctctgtgtacttgaaaggacatgcccatccaaagaaaaaagtaatagctgtagaatattagttccttcatatcggcagaagaaagatgacatgctgacacgtaagattcagtcctggaaactgggaactaccgtgcctcccatcagtttcacccctggcccctgcagtgaggctgacttgaagagatgggaggccatccgggaggccagcagacttaggcacaagaaaaggctgatggtggagaggtcagagtgtgtttctgcaaggattttgcttgtaatggatggtcttgtgtaacttttctcatgcgagaaagcagctcatcgtgttgctcaactctgcatgtcgcgtgccattttgaagcatcccgtaaaatttaatttgctttgaaaaaccctcagtcgttttgtacaaaaagtgcaattccatatttgcatatctctaaataacttatttaggcctgtttaagactgtatatacataaaccttgcctttgacttaagcagtactgtggtactatccaccaatatgaagtttctggacttctcatgttcaggcatttttgtaacagtctggttatagtttggttttatgtgttgctcacattttagagtgtctgatttttttgggggggtgaaattttcccttaaaatatggcattgcaaatttcatttaacttaatttttggttttggcctaggtttcttggactatcatttgtaacttatttttatttatgaagttcagagtaaacgttgatgttaaaatgcatgaatggtatttgttgtctgctgaattttatgtgtatgtaatcatggccattttgatagtttgtattatgcaacttgcctttttgatgaatgttcagtttgtggaacttagagatggacaaatctgattaggttgaataaaattagaggatccaaatctaacttaacagttcctgacaatgggaagccttttcatatggatttgttagctcagagtaaattgaggaaattcttcattttgcttaatctgaatttcctgagataggaaattgatgagaacttgagacatgatcaagaatgtgatggaagaagtgaccttttgagatttgtccgtctccagttagattcttaagtggaagacattgaacgtttagaaactaatatgactgggaaaaatgactttttaatttttggttttctggtttcttagactctttcaaaagatttatggtgagaatgggtaagttgtgtggttcacagtaaaaaatctgtgcgtgttgtttgttctttgtataacttactgtatttctggcatggcatgtcactaaatggggttgttgtgtgctgtgcatgatattttttaagtgggaaatgtttatcttgcaacctaatggtaatatttctgtgtcttggtgcccagtgcaagataaaattatttgttttattaaaaatttaaacttcagcttcatcccttcttttttcctttttaaaaatttaatgagttgattaaaagtcacaaaagcacttgcctaagattaggtatatgtattttggtatttggttgctacatagactaaaattctgatttatggatgctaaagcccaaattactacattttagaaaatctgtgatggaaaaagaatattagcatttacttcaagtttagaatacacccagttgacattatcctataatcggccaactgggagcttcgttagtagggatgcattaaacttccctaggtggtatttggaagtattatattttcaagattcctgattaggaaaaaaaagttataacatggctatatttatagtgcaaaatagaccttcaaaaactgcaaaaatatttttaatttctaatatcactgttgcaaaaactacatttttttttttttttttttttgagatggagtctcgctctgtcgcccaggctggagtgaagtggcgcaatcttggctcacagcaacttccacctcccaggttcaagcaattctcctgtctcagcctcctgagtagctgggactacagttgcatgccaccacactctgctaatttttgtatttttagtagagacggggtttcaccagattggtccggctggtctcaaactcctgacctcaggtggtccatccacctcagcctcccaaagtgctgggattacaggcaaaaactacatttacagtaaatcatttattcattcttagtacaaaatcacaaggtggctatatcttaatattttccaccaaactttctgtaactttgtgaatctaagggctaatagtgtttgagcaagaggaagagagttaaaggatgacagatgttttaatctgctcaagcctcagtagctaagtatcttcccttacgaggatttacttcatctataagaatctctagttttgatagctttttataactttgataattcagaaatgttggaagctactaaatgtaaagcagtataaccattctagatgccaaaggtgtaactgagccacaggcaacaaattgcaagtacttgttagccactgattttaaaaaccagggtccctgcatgctttccgtgtgccatgcaaaggcacattatccgctttccagctcatctgcatgatgcttaaacatttgctactctcaagtcataggaaagctgttttaacttgattaaaaatctctttgcagctttaagcatgttgaattgtaactttcagaaaaattttcatttgtaaattaaatataactttataatgtaagcagctctcagaaatagttgcttttcttaaaggaaataaaagtacccagagtacaagtatgtggtggaaatgtcaacatgtacaaccatttcagtggctggatgtgttccctgtagtgaggggtaaattatatgactgagttagagaagaagacagaaacctaaaaccaaagcttgaaaagctaaagatttttctggattagagctaacagcagcaaatgttttctatcccaagatagttgtttcggatagtacaatatttgttttaaaggctgttgtgcatgcagttcaatgccaaggtaactacacaaataaagcaagattgtctgtaaattgagactgaataatatatgacatgtcaaacagtgggaagtattataatatgaatgtgtcctcagaaaattcaagtgtgttttggaccacttgaagtcaaataagtcaaatttataacaaaggatttctctctagtctgtcagttaccactactttttctttttctttctttttttctttctctctttttttttttttttttaagagatggagtcttgctatgttgcccaggctggtcttgagctcctgggccgaagcattcctcctgccttggcctcccaaagtgttaggattacagatgtgagccatcatgccctgcctaccggtgcttttcttaagtagatctgctgcagtgaaaagaaaatagaaatttaaattggattaagtgtaggcttttaatctagaacttgtttcatatttatgctgggtgatatttctctgaacataatgtacgttgtcaagcttggcatacttacctggaaaagcattattgctcaacatgctgtcattgaaaaataactgcctataacatgaatgctttcttttttgtaaggactgggttaaagagaaatgtgcagtatcttttgaagtctgagactgttaatttctggcttgctctttgtttggcgtttaacacctgtcagtttgtctgtttatttttaagacgctttgtatgtggtagtcgtttcttctatgtgctttcgtcttgcatggatttatgtctgtatggtttcatgaaacttgaaaatttggtcatgtgttttggcagaagcaatttatgacaaatttttttgtaagaatatatagaaataatcttgtatgtgattaagctgttgaatctgttgccagtattaataggaaatgaacactgatttcacatgaagttgtaataaaagacaattaagtcacccacagttcacttatgggtttggccaaaagattctgtagaattataaaggcttatgacagcaaaaaagaaagggaaaaaaagccaatttcggttatttctagggatttccctccacccccaggagacatttggcaatgtctggaggcattttttattgtctcattgggtgggtgggggtgtgtgcgctactggcaactagtgccttcatagccagagatactgctaatgtcctacagtacacaggagtgccctacaacaaatagttttctggccccaaaatgtcagcagtggtgctactgaggaaccctcattgagactataaatctataaatgaaaaatctacatcacattgcctttttattatagtgtatggtaattccaaagcctcttgcccaagttttagcattgattgctcttcagagaattcctatagtacctgatggaaatatacttagaggtacataaatcagtatgttcctatctccctctgaaagttggggagccttaaccctagtatcatggaatttctgtttgccgtataaggctatccatgattttatatttgagaaaatttgccacatgctggttcttttcgatccttactccttagatagtcacctataaagttcctgaaagtgagttctaaaaggaaatgccttaaaactagccaaaaagtgacaggagcatagtaggcaatctgcatagtgggagaagagagtaagactttagcaaccttgttttatgattgacaccttcttccttaaagttcctctttttccttctaaatgttatttttaaaaaattctattcaacagaaaggcaagatgctagatctgtattttttggaaaaaatccagttgcagttctaaattggagcctttccaaataaggaaatacaaatgaagcaggacttgtaagagacatacgatgtgatttgccagctaatcatccttcattcaacacaacatactagagctgtgcaatccttcatagttttcccaaacaattttcctgatgctatctttggtacttatctcaaatctgtgaggccgacagatagggatgtggagatagagaaacaaatattgccgctttcccaaggacatgtggcttgtgagtggtagaaccagactagggcttcgcctctgagataattcacgtagactgcttggcgaggttgctggcacacagtaagcactcagaagctgaatattatgccattaatgctgataagggagggaagaattctttgtgatctggctgagagactccttcctctactacaaaagttctggattttatcactgtggtccggggtgacctctctgatttgaagcagcttggagagttagcttttgggagatcccaaacaatcatgtttgctttaatgagaattagtatatggcccagacggttttaaaaatgctacccacacagccaaatccagttctcataacaatcccttcctcacttagcaggtgagaaatgggggctcggaagtgatctgatgtgtgttagggtggggtgaaaactggcaccatggctgggcctgcagccctcccttcctggcttgttgcagtgcctggctccagctgctgtacagtgtgtgcaggcttgatgtgggtaactttttgtaccctagggagtgaactgtgctcatgttcctgccttacacagggacttgtctactccagagtgtatttggttcactttgttcacatgaaggaccacctgtgtgccaggctgtgctccgtgttgggggcacccaggaggaggatgcagcctctgtcttgagaagcacatttcatgggaagacaccttagcattgcatggtgtaggaggattagggccaaaggagagcacccctgggagatgctgggctttctagccttcctcccatcaaaagattattaaaatattagcatccttttttgtttttgttctggagtttatgtaatctcatgtgttgagtgtctagatacccctcatacctggttcttgaaaaatttttcctgcctcttcttagtgagtctgtcatagtattagttcaaatagcctcattcttcatagtatgacttacgtgaatctatattctcaaattcacacaaatcagctttataagtagtcatacctagttagatatattacattaatagatccatctatattcatatatgtcctcatatattctctcaatataatttattccttaatagtccttaataaatcctataaaactttcttcatagaactgtggatagccataataatcttacaaaaagaattagaaacattttaagtatagcaaattttgctggattaaatgtgagaaaacctacctcattcttaccgtagacattgaatgagtatatcctgcctgccttgtgctgctaatatgttttcctcctaagcaacacgtgacttgtgaggaagagaatccaaacatgcacatgcacacacagacacacatgcactgtaacagacataaggctgagggttcagtactatgaaaaaggtatagctgaagcagtagagggattgagaggagggacagagcagctttgatatggatgagctgggaagacttcatcaaagtgctgaatattatctagatcattaatttaacacatttatcgggcacctactgcaggctgggctccccttcaggtacaggtgatgtaccagcaaacaaatcagaaaattcctgctttataatcttacagggcaaggcaagtgataggtaaataaatgtacatgatggtgagaaatgctttgaaggagaaaggactagggtgggtcaggggagaggggcatttattatttctggtaaggtggtcagagaaggaaacacagagggcacatttaagcagatgcctggaagtgagagagaagctatgtggatatctgggtgaagagcattccaggcagattgaatagtagggggaaaagcaggaggtgtgagcagggcagggaagccagttggctggagcagagggagtgggggcatggtactgatgagcacagagaaggaggtaggaaccagggatggcggacctcttagattttggaagaacctgtctttaactctaatgaaatgggaagaaagtagtgggtgctgagtagaggtataccatgatctgagtgcagtctgaaaggaactctctggctgctgttgggtaggaaggggtggaagcagggagactgttgtaatctaggtgggtgatgtgatgtgattattataataattgtaataatctgggtaggagatgatgtgataattgttataatccaggtagcagatgtgattactgtgataattgtgatcatccaggtaggagtcacttggatcagggtgtaatggtgcaggtggtaagaagtggttatgttctagatatatttagaaggcagagggacaggatttactgacgggaccagttatggtatatgagagaaagagaagaatctgggatggctccaagatgtgtgacccaatgttgtgaaggatagaggtgacctttactgatataaggagagtgagagctgagcaggttgtgaagaggacaatcagttttttatctatgacaaacttgagacgcctattagacttccaagtggagaatgaacaggaagttggaaatacctgtccaggggtcctgaggtatgaatggcatttaagaagttatgtatactggtaaagggcttttgaatcagaggaaatagtttaggaaagatgtttgttgaaactggaggttgggtattaatttaagaagccattttggaagtctaggtgagttgactgtactctgatctagggtgttggcaatagagatggaaagaaagagacactgaatgaaagggcttgataactaatggaaagtggggagaagggagaaacaaaggtgaaaagtggttgttaggtttcagatgtggatgattggagggcaggtagcaacattagtaaccacaagaggaaaagcaggtttggggacaagattgagtttggtcacatcaacaataaccatgcatttagtgagttacagtttacaaaatcccttctagatattattttaatctgtcctttggcaattgaagtgcctaggggatatccatgcagaaagatttattcaagaagcaagtggaaatgagtcaaaggacggactggttccttaattatggcactgggaatagtttagaaattacaattccatgagctagctaagctaggaattcctgaactagctaagagcaaacatgctttaaaagaaataatgatggcaacatcttggaaggcaaaatttagatgcccaggcaagaggtgtacagttacttaaagtcaggagagcagtataaaaggtcagtaggaaagagcttcaaaggctcttgctctcattcctacttctcctcagtgtttagatctgacctctccctttccttgagaccacccttaatctctctttcccctctggtatagtttacctggctcttttatgtgcatgtagagagcacacatgtgcctgtgcccaacaccccactctgttcattggtttctgttgtggattgagctcttccaaagcttaacctcagtccatccttgtgttacaagttgaaagcatgcaagctgccctaataaaagaagagggttatagaggtagtataaaggactattagaaactacctgtggtgcgttgagaacaagtctagtgcagtggtagggcggatcttataggatcttttagaatcaacagcacatttattcatggtattgaacttgagaaaaatatcaggtaaacattaaattattaatcagtgcccagaaaaggcagccaaacctcaacagattatctttgaaggagatagaaaataaagagagataattctagtgactattttttcctaaagtaatcctttcatgcattgacctctttaaatatgaaccttgggtttttgtttgtttgcttgttttttgtttttttgtttgtttgttttttttgagacttgtatagggctaatctagccattttgtgaaaaaattcacactcgagtgctcttgtttctgagttttggaaaaacaccatttatctctgtagtgctacttctgtgacactatcactgaagcgtctaggtagaaatttaggtggaatttccaaatttaactccaacctcagtttaacccctaagtctggtcatgtgaacttccgtagtaaccatgagtctttttgttgtaggagtaagtccatgagtgatgtcagcgcagaagatgttcaaaacttgcgtcagctgcgttacgaggagatgcagaaaataaaatcacaattaaaagaacaagatcagaaatggcaggatgtgagtattttggggattggaggggagagagtgtatttgtctaacttttctttgcttctcttaaagtcaatatactcaagaccattttccttgctattacagaattcagttctgtataaaatgtgaccaactttctttacaaagatttttaaacctttttttttctattattattgcatattttaaaggccattgtgaaaaatatacctggatgtttattttctaacattctctgagttctcaaaaatgtgagttgcttccttgcagtatagtgaacttacttacttgttttggtggttgaatttgggatatgcacattaactatactctaatgggaaagacctggccaaaatttagggagagaagaggaacagggttctggcagagaccttggcatcagtaaggaaagatgaaaagggttagtaattaagagttaattaaggagaattggggagaaataagtaatataactcagagcaatattttggctgaagaagtcaataatatgaaccaaaatgaaatgtttttgcagagttgacatatatccaggtgtttacatagatatagacttactctttagttttgatcctgaagaaaaaagcttgaccattttttttaatagagtaattgtcataaactgaagaaatgcaaagaaatacagtagacaaactatcagagcaaacccaaaggaatttgaggacaactttatggtaagagttgagcaaaagcatgagcaaaggagtcagagtaaatcttaattttcaaaggaattaatagtctctgaaatgaagaaacccctgctctggctacccttctaaattccagtgcctcttttaattgggaactcaatttaattgtcaagaaacagtaattcaatatcactttgccaaaatacatggttaattttctggtgtgaaagtaagtattacgggcttatctattaggttaaatcagataaaaattcatgccagttatgctataggactaaatgcgcattgcttttgttctttctgcaaggagttcatattggtctcaggctgttttaaagcaggagtggctctgtgggcttgcaaggggtataaatcaaacgtactttgcatgccctgggggtgaaattcggttttgtctgagaccttgaatgtgcttctgtttggactggaatgccactaacagttcttagcagttctctattttggagacatggaaaactttataccttgtaaaatgtcttaaccccctgggtgtcagaaccagcctaggtttctgggggggattgaaaagctgaattaggttgattgtccctggggtcacccagcaaggttaggcttaacgttcctggggatatgggggacaggtgttggtttgttcctgccacgtgttccttattgcgctgacctaggtggacttaacccttctgaaattgcatactcaagtctcaccttcccagttaaagcctttccaaagccttcccttccggaggtggaaccggacccatggtcttcttaggaccccactgtctcatgcaatcctgtcacacttgttactgaacttttgtttatatgtctgtctctcccctgtagactgagagtttcttgaggggaacagtgccctatgcatgtgtgtattaatagttcctacacttgggcctgcctcaaagtagggattgaactctgtttgtgaaatgaaagagactatgcatctgcgcgtaaccatcacaatcgtgtttctgttttggccttaccagtgaaacatgtttcgcagaacagccaggtttttggagtgagatgaaaacgaactggaaacagttcctgatctatctaactgtcacctaattacaagcatttagcattctttatgaagtgtgcaatgaggcagatactttctgggaaaacaaaaatggggtctatcttattaggtcaggtttttgagacagacacatgagataaaggcttggtacagaaacgctggctataaaaagcaaaattagggcaccttggcatccagttggagtgaatagtttcagtgatgtaataagatactctggcacattctgtctgctagaaagggtgtatagaaattcaggtgtgcccctgctgatgtgatttttctgtcaggaccttgcaaaatggaaagatcgtcgaaaaagttacacttcagatctgcagaagaaaaaagaagagagagaagaaattgaaaagcaggcacttgagaagtctaagagaagctctaagacgtttaaggaaatgctgcaggacaggtaataatgctgaatgcacctcggttgtaacagggttggagatgccagtgttataaatagatattttatgtaagtgtagtgtgacataggtgtccaccaatattcaactttagtcaaatatgcaaagaaacgtttaagattttggtctgcggtgaaaaaacaaagcattgttgaaatagtgacttagagtaatagtaacaaaataaatgaggacttaaaataggtgttcattatttcttcttacattgtgcattcacatgcagaattggatggtgttggctgtgtctgatgcaggaaatacactgctttttactcttaagtgaattaaggaatgagatggtccaataaaatcagctcactcttttaactaaattgtgtaaaatataacgaagttctttttcatgtttaatggtgcaattcattatattttaaagaaagtttttatgaacataaatgtgtgtgttttacttactctttgcattgcatcttaacagtataaaggtcaaatttaaactttaatgtaaagcattcattactgtgtgaaacatcaggatatttacagatcaaggagaaggaaaatacgcttttagaataatgtccaaaaggaaatatgctgtcaggtgaaatgaaacaaagccactttctgccctaaaagccaaagataagcagtttcattcacttaaatgcaattcagttattttgggaggtaggtattcctttctagatgtgagagatgagggtgttttatgaacctttctataaatatgaatggtgacttttaatccctgataaatgttcatgcaagttctgtcaagctatgtgaaatcatacaccagtttgatctccacaaaagcctgagtcttttgtaatcttttatttttactaaattactgtaaatttttgcaggaagaaaatcctcacaagactgtcaattaatccacgactttggaaggttcaaattggttgtcaatcatgatatttatagtgttttaattttaaaagttataagcttgtggataaaattttgtgaataatcctttattaaaatttccttgtttcattaaaatctctttacaattaataatatcccagtgaagtatttgagaaccattttaattaaagaagtcaagttattattctttcttagttgggacattaaagataattttatacatcttgctgggcatggtggctcatgcctgtaatcccagcactttgggaggccaaggtgggcagatcacaaggtcaggagttcgagatcagcttggccaatatgttgaaacctcatctctactaaaaattaaaagaaaaattagctgggtgtggtggcgcatgcccgtaatcccagctactcgggaggctgagtcaggagaattgcttgaatgcgggaggcggaggttgcaggtgagctgagatcgtgccactgcactccagcctggacgacagagcgagattcggtctcaaaaaaaaaaaaaaaagataattgtatacatctttatgctctgtaagtgttgtattgattcttgtgtgaagttagcatcattttattcccagtccgtttcatgcgttgattactctctcaccacctctgtgtgtcaaatgtgtgtctttgtggtgatggtgcatttctctccgctaagggaatcccaaaatcaaaagtctacagttccgtcaagaaggagaatgtattcttttgatgatgtgctggaggaaggaaagcgaccccctacaatgactgtgtcagaagcaagttaccagagtgagagagtagaagagaagggagcaacttatccttcagaaattcccaaagaagattctaccacttttgcaaaaagagaggaccgtgtaacaactgaaattcagcttccttctcaaagtcctgtggaagaacaaagcccagcctctttgtcttctctgcgttcacggagcacacaaatggaatcaactcgtgtttcagcttctctccccagaagttaccggaaaactgatacagtcaggttaacatctgtggtcacaccaagaccctttggctctcagacaaggggaatctcatcactccccagatcttacacggtaaaaaatgttctcggttcatttagtctgttctgaagagcaaaatgttggtgaacttgtgcagaggttggggttacatcaacttgatgtgtaaactgtacataacatatataaggacattttattttatgccagtttagatgcaatggaaacttaatgcttaagatatatcaatgatacagaatttattaaactttaaattctgtgaaagtagggctgatacattttaaagaatgaataagatatattctaaggcagagtattattttataatgtcttttttttagatgtaccttttgtaaagttttaggttgaaaaatatgaagttgtcagtatgattgttcttcttgacctataaaacagcaattcatatggtttagcctagagattttcaggtgcttatgtacacatttctgcttttttcagatttctcactttatcagtttgaatgtaattattagaatatatcttacgtttatatatatgtgtttctactagtgtcaggattttgaaggggttagaatattgcagcattttttctgagaatgaagtggtaccatatccgacaatgagtgtgttaatctgaattatgtgaaaggaagcaacacagtcctaagattaatgttcaaattctttttagctctgctaatgtacaatcctaaactctaaaagggtataaaaaattggatatttggggtgagagaagcttacctaagctaattgggaaactcctgatcattatataaaggaaaatgtagacatatttgacattataagaatttcatggcagacccccttaatgtagtcaaaagacaatatatagactcagaaaaatattatcaaaatgcattttagggttaatatctctaagacagaaaatgtttctacaaattggtaagcaaatacactagcaaaatgaatatagaaaagtagtggccaattcaagggagaggggattcaaatgtctggtaacaaagcacaaagaagtatgttcagcttccctggagcaagaatgaggcatataactttttacccatcagagtgaaatagacttaaaaacatcgaaaatatctagtgttggcaaggatgctgagaaacagatgttcctcatacattacttcggcagtgtgttgctacaattatttttagaaactatatatatatatatatatatatatatatatatagtttctaaaaattatatatatataataaaatatatatatatatatataaaacttttgctccagcaagcctacttttggaaatctgtgctataaaaataaaagttccaattataaagagttatagatatttgttgcagtagttttggaagtgacagaacatttcaaacaactttaaatgcacatcaaatgaataaattgttgatgtccatactatggaacattcagcaagtaaagggactggtttagagttctatctgttgacctggagtgatcaatagatagaacaccaagaccttttggctctcagttaaggggaatctcatcactccccagatcttacatggtaaaacatgttctcagttcatttagtctgttctgaaaagcaaaatgttggtgaacttgtttagaggttagagttacaccatcttgatatgtaaactgtacataacacatgtatatatggcaatttcattttacgccagtttagattcagtggaaatttaatgcttaagatgtttgcttggagtaaacaagcaaagcaaatttcggaagtttgtatgtgatatgaatgcttttgctaaaacaattttccctcactacgtgtttatctgttggtgtgaaagaactcagcccaagcttttagcaatagttatgttactgtgggaggtatgttattttagttttaaaatattaatttaataaacaacttttaaaaacagaaataaaggtaacagaatatcaagtttaaaatgatgttttcttatttagatggatgatgcttggaagtataatggagatgttgaagacattaagagaactccaaacaatgtggtcagcacccctgcaccaagcccggacgcaagccaactggcttcaagcttatctagccagaaagaggtagcagcaacagaagaagatgtgacaaggctgccctctcctacatcccccttctcatctctttcccaagaccaggctgccacttctaaagccacattgtcttccacatctggtcttgatttaatgtctgaatctggagaaggggaaatctccccacaaagagaagtctcaagatcccaggtgagtttggaaaagttctttatcatctgtggctcagacacttacacatttaaatctggaaaccatgtctcaaatgtcacacctctaggtgttaatctgggctgaaaatgtgcaaaatgatattctggtttactttgaacagatcttggaggaagtaggtctctttccactctgagtgcatagatccagataacacttgtgatatgagtgtatggagactttgtgcaccagtctccttgggatttggctggtgttttctctatattccatgtttcagtagtggttgccttatactgctagtgctatagtcccaggtttcaggtacagcagtcactttaaaggttttacatgcagatctagtgtatatttgggtgacagaagccctttcccagggaactcaactggccgcaaggaaaaacatgataggtgctggagtctagggacatggcatttctttttcgataattttaaccttctagtgacttttaatactattttgtactttagaacgtctataattttcgatggtcccttgtctctaaatgggactattgaggcttggttataatatgacaattgtattccacaacatttggagtccaaacaaaatataccatcagatgaagaatgactgggggcatgtgtagtttttcctacttaaatttctaatagatgacttctaagagaatgattaggtaataaatgttttttgtagcctacctgtaaaacatactgaaagcatttggggaacagaaagtgtctctctcttagaaagattctttctaagcattttgatagttgtatgaaccccttagcatggaagagcttttgtggtcctttggcttggtttagtattccctgttgccctgcaaaacattaagtgtgtattatatacattaagtatgtgtatatatatgacttgtcctaagttatattagtattagagtgtgtgtgtgtatatatatttatatatatgacttgtcctaagttatattaataaaatatgtgaaataatttggcattgcatatttattattattgagtttttatttgtatgggaaaacttaaaaaatttaaactttcttttctggttgtaaggtactatgtgcttgagaaaatttggaaatgcaggaaagtataaataatttaaattgctgataattccatcatttagagataatcactgttaacatctaggtatatttcttttgtttttttttcccatgcatatttacatatatctaaaaacagtttcttcagcttgctgaaataattagttgtaaattatcattacatttttaaggaattggaaatatataattaacatgctaagtctcagtggagaagaacaatagcctgtgttatacttgggcaacataaggtaccagtagatgaataataaaagcagaagcgaagtgccttttgtttcacagatttgcatgtttgcctttacctttttcaaatagcaaattcaacaaagcagcctgaatcatgtgctgcacgctgggtgttggtacctccctcagggtggcagctgactaactgcaactgtggattaaggaaaagaggctaagtgtggtgcgtggttgtgtctcaggttatcgcaactcagaggagcttcaattaatgtggcactgtttcagatttcctcattaatggatttatacttctttgttcccaaacttgagagggtattccaccaagaaaaattaggcttgatttgacaagtgaagccattggaattctttaatgtggatataattcatgtggtgacttacgtatctctgatgcttggtgtgtccttttctgtgccactagggcagtagcttctatagcatccccttgcctttgtctcagaaggagcttactgacttgagagaaggatgtgaatgtgtgtgacagctgctgagcaatatgtaaagggcctgtgcaacactccctgaaactctattcagatgttataactctaggtgttcagaggacagcaaaatcaagagtagcatgtggctgatcatctaaatgtttcggtagctttgtgaaagaatgttcttcaggtcatttttctctttcataccttggacttttgctggcactgtcctttcatctcttcctccagactcccccttgatgttattcttttctttttctttctttttttaaaaattaattaattaattgatttttttagatagggtcttgctctgttgcccaggctgtagtgcagtggcatgatcatggctcattgcagcctcaacctcctggactgaagcaatcctcccaccttagcctcttgagtagctgggactgcaagcacatgccaccacgcctggctaattttcgtatttttttgtagagacgggcttttgccacattacccatactgctctcaaactcctgggctcaaacgatccatccatcttggcctccaaaagtgctgggattacaggtgtgagccaccacacccagctgatgttactcttttctatcctggcttccactatgctaattcaggcccttttcctatcagtgcaaatagtcacaggtgttagtgcatgctacacaagactggcatcagattaacttgcctgatgccaggttggactcaataatttctctgctctaaagcctctagtggcactgtgtggtttgctgaatggagttcgtggcgctcagggaagcagtgatatctctcactccctttgtagcgcagtcacagctgaagttagtgtgcttactatgtgccaaccaggcttctcagggcagtatcttagttaatcctcacagcagccctgtgaggtaatcaacaatccgaatgtggactatcatgattatacctgttttagaaacataaaaattgaggcatggcatgggcatgttacttgtccaaggccgtgcagggtaccaagtggagtcaggatttgaacccaggcagtctgactcaagatttagtatcatgttatgctatcatgctatgtcctgggaaagagacacgattcacctgcataccactgcttgctttttcttggacacatcacgtactttttggagcacatcactgctcccccatttgaagatgcttatttcccacatctctgccttttgaggtccaattatttctcaaaagcccaggaggaccccttcgttcatgaatcatgatgtcacccctcccccattggaatcaaacttcttacccttgaaaagtttcactcactgaactcttccttgtcccatagtgttacgtgttcctctttcactgatattctttgtacattcttacacataattgacacttaagttttacggacttgaactgcattcaaggccttaattactaggctgaagtatgaacttgatctggcaggtaatttaaagtccttattggtgctttagtgtgtgggaattttaagattaagggctgttttaggaatgtaagcactatggtgttccctagagttattttacgaaagctaagtctggaagcagagactggttaggagcctatcacagcattgcactaataaggtggtgtgtgccataaagtagaacaatcataatgaagggaagaacttaatatggtcttatttaaaatctgccgataggaatttccttttcatcctcatagctgagctgggggttttgtctcttgctgttctttttgcaccctttcttttgtggttttgcttttttctctacctttctggacaatctaggctgccaagctcattctagaggtgacccaaggcaaggaagagggagtgtgactcctggagtccttcatcccccctccgtctgccatgcagatgtggttttcatgattttccccaaaattggtcttgcctacaggtttctgttttttctgccctttcagagctctatgtttttaaaccctctacaaatccactttccagaacctctgctccagattttttaaagcagtaacccccaaacgggatgacacgtgtggaaggaaggaaggaagctttctgcatgtccatttcctgatctcatccccatgattactgccccttgggatatagtagtcagagcttcccttatcatagcttcatactgtgcattttgcttgcttctcaccttcactaggacctgctctctgtaagggtggaacacaatcctacatttctcactgtcagcgcagtgtctgcatctgtacatgttcactgaatgctgaccaaattttcttgactttagagctaagtatgtgagaattaaatgggattttctttaattgatccagaaactgcttagccggcacttgtattatgtttaacatttgcttccattggaaaaagaaggcaattactgggcatcagtcatgtgtgccttgacaccttttaaatgtttcatttaattatctcaataactctgcaaagtaggtgtattatccccgtttttaccaatgaagtacttgagatttgaaagttatgtaacttgccccaggctggtgaaatgcctgcgccacaactgcaatttatctgatgttaaagttttttgaaatatgacaggctcacgtttgaggactgccttatgtatagttaagagaccacatgttgacttatttggactttgctgtgtctttagaattttagagccactggggacagaaatgtcttttggtccataaagataaaatcatccttgaaaccattttgaggaaaggtggtattatatgtttattgaaacttaccagaactgaaatgtagagtttgaaatcttccaagtagggcagtaaggagctaccagcaatttaaaaatggagtgtgatataatagcatgttctataactaaagttctggcaactgtgtggacaatgaacaaaataagggctggaggcaagagagtaacttaggaggggtaaccacaggagtttaggggagatcatggcctgaaccaagatgataacccaagggagggtggcaaagatggggtgattcaagatggattatggacttgatagaactttgtaaaatgcaagtgtgtagggtggagagtaggggtacagggattgttgtgtggcattcgagtggggaacagttaggggaaagaaggagaaagaggcctcgaaggaatccagtgtttctaacgtgggcacctgatgaactattgatgcaattaaccaaaatatgaaaaacaagaggtggaagaacaggtttgggcggaagataatgaattcagttttcgaattgttggacttaggcatcggagacatggcaatgaatgaggttgctcacaaaagcatgtagtcagagaggctggagactaaggaacaaacaacacaatgaaaagagaagagaaaaaagaggaacatgctaatgaaactgagaagtggcaagagacatgggaaaaaaggctggagaaagtgagataataggtgactttagaagattgtttcccagaaagcaagaatagtgggcagtgcctggagggatgaagactcaagatgtatttggtaggtagaagataatcttggaatgggatgaggacagtggtgggtgtattatagaaacactacctgccacagtgggatgaaggaaggagagatggatcaggatttaga

SEQ ID NO: 541 - DNA, 1717 bp, Homo sapiens
gtcacaaagatcacagaaacagtgtatgcccgggcataagatagcacgactgtgtatgctctggaggactgaaaggctgtacaagccctatgtattttttttcaaatatacatatgcatgggtcttgctgctgcctcttttgctgactgtaattggactttgaagcttcgaagttatatcataaaaatttgtaacctttgtctgagagagagctcagctaagcaatcactttccacttcttttcacaggataatataaacgttttcttgaaagcttgtgaacagattggattgaaagaagcccagcttttccatcctggagatctacaggatttatcaaatcgagtcactgtcaagcaagaagagactgacaggagagtgaaaaatgttttgataacattgtactggctgggaagaaaagcacaaagcaacccgtactataatggtccccatcttaatttgaaagcgtttgagaatcttttaggacaagcactgacgaaggcactcgaagactccagcttcctgaaaagaagtggcagggacagtggctacggtgacatctggtgtcctgaacgtggagaatttcttgctcctccaaggcaccataagagagaagattcctttgaaagcttggactctttgggctcgaggtcattgacaagctgctcctctgatatcacgttgagaggggggcgtgaaggttttgaaagtgacacagattcggaatttacatttaagatgcaggattataataaagatgatatgtcgtatcgaaggatttcggctgttgagccaaagactgcgttacccttcaatcgttttttacccaacaaaagtagacagccatcctatgtaccagcacctctgagaaagaaaaagccagacaaacatgaggataacagaagaagttgggcaagcccggtttatacagaagcagatggaacattttcaaggcagccctggatcctgacttagagaatgatgatttctttgtcagaaagactggggctttccatgcaaatccatatgttctccgagcttttgaagactttagaaagttctctgagcaagatgattctgtagagcgagatataattttacagtgtagagaaggtgaacttgtacttccggatttggaaaaagatgatatgattgttcgccgaattccagcacagaagaaagaagtgccgctgtctggggccccagatagataccacccagtcccttttcccgaaccctggactcttcctccagaaattcaagcaaaatttctctgtgtacttgaaaggacatgcccatccaaagaaaaaagtaatagctgtagaatattagttccttcatatcggcagaagaaagatgacatgctgacacgtaagattcagtcctggaaactgggaactaccgtgcctcccatcagtttcacccctggcccctgcagtgaggctgacttgaagagatgggaggccatccgggaggccagcagacttaggcacaagaaaaggctgatggtggagagactctttcaaaagatttatggtgagaatgggagtaagtccatgagtgatgtcagcgcagaagatgttcaaaacttgcgtcagctgcgttacgaggagatgcagaaaataaaatcacaattaaaagaacaagatcagaaatggcaggatgaccttgcaaaatggaaagatcgtcgaaaaagttacacttcagatctgcagaag

SEQ ID NO: 542 - protein, 271 aa, Homo sapiens
QKKLGKPGRSRWNIFKAALDPDLENDDFFVRKTGAFHANPYVLRAFEDFRKFSEQDDSVERDIILQCREGELVLPDLEKDDMIVRRIPAQKKEVPLSGAPDRYHPVPFPEPWTLPPEIQAKFLCVLERTCPSKEKSNSCRILVPSYRQKKDDMLTRKIQSWKLGTTVPPISFTPGPCSEADLKRWEAIREASRLRHKKRLMVERLFQKIYGENGSKSMSDVSAEDVQNLRQLRYEEMQKIKSQLKEQDQKWQDDLAKWKDRRKSYTSDLQK

SEQ ID NO: 543 - DNA, 1663 bp, Homo sapiens
acagtcgttctgtaatttgtaatcatagaaacagaatgttcctcctcttatttcttccctgccaacagtttctgggtgggtgaatgtcagtagctggagttatttttaaagaggagaggtgaggcttgccgtgcaaagctggaaagagggcgtttgtttgcagagcagagctgacatcaaagtgtagattactgctcagtggctaggcacttgtcctgtaacaggataatataaacgttttcttgaaagcttgtgaacagattggattgaaagaagcccagcttttccatcctggagatctacaggatttatcaaatcgagtcactgtcaagcaagaagagactgacaggagagtgaaaaatgttttgataacattgtactggctgggaagaaaagcacaaagcaacccgtactataatggtccccatcttaatttgaaagcgtttgagaatcttttaggacaagcactgacgaaggcactcgaagactccagcttcctgaaaagaagtggcagggacagtggctacggtgacatctggtgtcctgaacgtggagaatttcttgctcctccaaggcaccataagagagaagattcctttgaaagcttggactctttgggctcgaggtcattgacaagctgctcctctgatatcacgttgagaggggggcgtgaaggttttgaaagtgacacagattcggaatttacatttaagatgcaggattataataaagatgatatgtcgtatcgaaggatttcggctgttgagccaaagactgcgttacccttcaatcgttttttacccaacaaaagtagacagccatcctatgtaccagcacctctgagaaagaaaaagccagacaaacatgaggataacagaagaagttgggcaagcccggtttatacagaagcagatggaacattttcaaggcagccctggatcctgacttagagaatgatgatttctttgtcagaaagactggggctttccatgcaaatccatatgttctccgagcttttgaagactttagaaagttctctgagcaagatgattctgtagagcgagatataattttacagtgtagagaaggtgaacttgtacttccggatttggaaaaagatgatatgattgttcgccgaattccagcacagaagaaagaagtgccgctgtctggggccccagatagataccacccagtcccttttcccgaaccctggactcttcctccagaaattcaagcaaaatttctctgtgtacttgaaaggacatgcccatccaaagaaaaaagtaatagctgtagaatattagttccttcatatcggcagaagaaagatgacatgctgacacgtaagattcagtcctggaaactgggaactaccgtgcctcccatcagtttcacccctggcccctgcagtgaggctgacttgaagagatgggaggccatccgggaggccagcagacttaggcacaagaaaaggctgatggtggagaggagtaagtccatgagtgatgtcagcgcagaagatgttcaaaacttgcgtcagctgcgttacgaggagatgcagaaaataaaatcacaattaaaagaacaagatcagaaatggcaggatgaccttgcaaaatggaaagatcgtcgaaaaagttacacttcagatctgcagaag

SEQ ID NO: 544 - protein, 261 aa, Homo sapiens
QKKLGKPGRSRWNIFKAALDPDLENDDFFVRKTGAFHANPYVLRAFEDFRKFSEQDDSVERDIILQCREGELVLPDLEKDDMIVRRIPAQKKEVPLSGAPDRYHPVPFPEPWTLPPEIQAKFLCVLERTCPSKEKSNSCRILVPSYRQKKDDMLTRKIQSWKLGTTVPPISFTPGPCSEADLKRWEAIREASRLRHKKRLMVERSKSMSDVSAEDVQNLRQLRYEEMQKIKSQLKEQDQKWQDDLAKWKDRRKSYTSDLQK

SEQ ID NO: 545 - DNA, 1577 bp, Homo sapiens
gacttttgaagggtggggtctgtaggaagaatccatgcattgctctgggaagtggcctcaggaagtagagggctggggacagaatcactcatgagttgcagttgttctgggcaacaaagcaaggcggatacttattctggtagcagggtggagtttgaactgggcagttacctctgctcaagccccttgaagaatttcagattccctgttaaccatggaggcatgggctggaagctgggtgtgggggcaggcaagaagagactgacaggagagtgaaaaatgttttgataacattgtactggctgggaagaaaagcacaaagcaacccgtactataatggtccccatcttaatttgaaagcgtttgagaatcttttaggacaagcactgacgaaggcactcgaagactccagcttcctgaaaagaagtggcagggacagtggctacggtgacatctggtgtcctgaacgtggagaatttcttgctcctccaaggcaccataagagagaagattcctttgaaagcttggactctttgggctcgaggtcattgacaagctgctcctctgatatcacgttgagaggggggcgtgaaggttttgaaagtgacacagattcggaatttacatttaagatgcaggattataataaagatgatatgtcgtatcgaaggatttcggctgttgagccaaagactgcgttacccttcaatcgttttttacccaacaaaagtagacagccatcctatgtaccagcacctctgagaaagaaaaagccagacaaacatgaggataacagaagaagttgggcaagcccggtttatacagaagcagatggaacattttcaaggcagccctggatcctgacttagagaatgatgatttctttgtcagaaagactggggctttccatgcaaatccatatgttctccgagcttttgaagactttagaaagttctctgagcaagatgattctgtagagcgagatataattttacagtgtagagaaggtgaacttgtacttccggatttggaaaaagatgatatgattgttcgccgaattccagcacagaagaaagaagtgccgctgtctggggccccagatagataccacccagtcccttttcccgaaccctggactcttcctccagaaattcaagcaaaatttctctgtgtacttgaaaggacatgcccatccaaagaaaaaagtaatagctgtagaatattagttccttcatatcggcagaagaaagatgacatgctgacacgtaagattcagtcctggaaactgggaactaccgtgcctcccatcagtttcacccctggcccctgcagtgaggctgacttgaagagatgggaggccatccgggaggccagcagacttaggcacaagaaaaggctgatggtggagaggagtaagtccatgagtgatgtcagcgcagaagatgttcaaaacttgcgtcagctgcgttacgaggagatgcagaaaataaaatcacaattaaaagaacaagatcagaaatggcaggatgaccttgcaaaatggaaagatcgtcgaaaaagttacacttcagatctgc

SEQ ID NO: 546 - protein, 242 aa, Homo sapiens
  VARIANT (1)...(242): Xaa = Any Amino Acid
LDPDLENDDFFVRKTGAFHANPYVLRAFEDFRKFSEQDDSVERDIILQCREGELVLPDLEKDDMIVRRIPAQKKEVPLSGAPDRYHPVPFPEPWTLPPEIQAKFLCVLERTCPSKEKSNSCRILVPSYRQKKDDMLTRKIQSWKLGTTVPPISFTPGPCSEADLKRWEAIREASRLRHKKRLMVERSKSMSDVSAEDVQNLRQLRYEEMQKIKSQLKEQDQKWQDDLAKWKDRRKSYTSDLX

SEQ ID NO: 547 - DNA, 1149 bp, Homo sapiens
gtcacaaagatcacagaaacagtgtatgcccgggcataagatagcacgactgtgtatgctctggaggactgaaaggctgtacaagccctatgtattttttttcaaatatacatatgcatgggtcttgctgctgcctcttttgctgactgtaattggactttgaagcttcgaagttatatcataaaaatttgtaacctttgtctgagagagagctcagctaagcaatcactttccacttcttttcacaggataatataaacgttttcttgaaagcttgtgaacagattggattgaaagaagcccagcttttccatcctggagatctacaggatttatcaaatcgagtcactgtcaagcaagaagagactgacaggagagtgaaaaatgttttgataacattgtactggctgggaagaaaagcacaaagcaacccgtactataatggtccccatcttaatttgaaagcgtttgagaatcttttaggacaagcactgacgaaggcactcgaagactccagcttcctgaaaagaagtggcagggacagtggctacggtgacatctggtgtcctgaacgtggagaatttcttgctcctccaaggcaccataagagagaagattcctttgaaagcttggactctttgggctcgaggtcattgacaagctgctcctctgatatcacgttgagaggggggcgtgaaggttttgaaagtgacacagattcggaatttacatttaagatgcaggattataataaagatgatatgtcgtatcgaaggatttcggctgttgagccaaagactgcgttacccttcaatcgttttttacccaacaaaagtagacagccatcctatgtaccagcacctctgagaaagaaaaagccagacaaacatgaggataacagaagaagttgggcaagcccggtttatacagaagcagatggaacattttcaagactctttcaaaagatttatggtgagaatgggagtaagtccatgagtgatgtcagcgcagaagatgttcaaaacttgcgtcagctgcgttacgaggagatgcagaaaataaaatcacaattaaaagaacaagatcagaaatggcaggatgaccttgcaaaatggaaagatcgtcgaaaaagttacacttcagatctgc

SEQ ID NO: 548 - protein, 308 aa, Homo sapiens
  VARIANT (1)...(308): Xaa = Any Amino Acid
AITFHFFSQDNINVFLKACEQIGLKEAQLFHPGDLQDLSNRVTVKQEETDRRVKNVLITLYWLGRKAQSNPYYNGPHLNLKAFENLLGQALTKALEDSSFLKRSGRDSGYGDIWCPERGEFLAPPRHHKREDSFESLDSLGSRSLTSCSSDITLRGGREGFESDTDSEFTFKMQDYNKDDMSYRRISAVEPKTALPFNRFLPNKSRQPSYVPAPLRKKKPDKHEDNRRSWDVYTEADGTFSRLFQKIYGENGSKSMSDVSAEDVQNLRQLRYEEMQKIKSQLKEQDQKWQDDLAKWKDRRKSYTSDLX

SEQ ID NO: 549 - DNA, 1125 bp, Homo sapiens
gtcacaaagatcacagaaacagtgtatgcccgggcataagatagcacgactgtgtatgctctggaggactgaaaggctgtacaagccctatgtattttttttcaaatatacatatgcatgggtcttgctgctgcctcttttgctgactgtaattggactttgaagcttcgaagttatatcataaaaatttgtaacctttgtctgagagagagctcagctaagcaatcactttccacttcttttcacaggataatataaacgttttcttgaaagcttgtgaacagattggattgaaagaagcccagcttttccatcctggagatctacaggatttatcaaatcgagtcactgtcaagcaagaagagactgacaggagagtgaaaaatgttttgataacattgtactggctgggaagaaaagcacaaagcaacccgtactataatggtccccatcttaatttgaaagcgtttgagaatcttttaggacaagcactgacgaaggcactcgaagactccagcttcctgaaaagaagtggcagggacagtggctacggtgacatctggtgtcctgaacgtggagaatttcttgctcctccaaggcaccataagagagaagattcctttgaaagcttggactctttgggctcgaggtcattgacaagctgctcctctgatatcacgttgagaggggggcgtgaaggttttgaaagtgacacagattcggaatttacatttaagatgcaggattataataaagatgatatgtcgtatcgaaggatttcggctgttgagccaaagactgcgttacccttcaatcgttttttacccaacaaaagtagacagccatcctatgtaccagcacctctgagaaagaaaaagccagacaaacatgaggataacagaagaagttgggcaagcccggtttatacagaagcagatggaacattttcaaggagtaagtccatgagtgatgtcagcgcagaagatgttcaaaacttgcgtcagctgcgttacgaggagatgcagaaaataaaatcacaattaaaagaacaagatcagaaatggcaggatgaccttgcaaaatggaaagatcgtcgaaaaagttacacttcagatctgcagaaga

SEQ ID NO: 550 - protein, 300 aa, Homo sapiens
  VARIANT (1)...(300): Xaa = Any Amino Acid
AITFHFFSQDNINVFLKACEQIGLKEAQLFHPGDLQDLSNRVTVKQEETDRRVKNVLITLYWLGRKAQSNPYYNGPHLNLKAFENLLGQALTKALEDSSFLKRSGRDSGYGDIWCPERGEFLAPPRHHKREDSFESLDSLGSRSLTSCSSDITLRGGREGFESDTDSEFTFKMQDYNKDDMSYRRISAVEPKTALPFNRFLPNKSRQPSYVPAPLRKKKPDKHEDNRRSWDVYTEADGTFSRSKSMSDVSAEDVQNLRQLRYEEMQKIKSQLKEQDQKWQDDLAKWKDRRKSYTSDLQKX

SEQ ID NO: 551 - DNA, 62444 bp, Mus musculus
  misc_feature (1)...(62444): n = A,T,C or G
tgaaggaggcagaggcaggaggatcacaagtttgaggccagcctgggctacacaattttggggactggagagatggctcagcagttaagagccctgactgctcttccaaaggtcctgagttcaaatcccaacaaccacatagtggttcacaaccatccgtaatgagatctaacgccctcttctgatgtgtctgaagacaactacagtatacatacatataataataaataaatctaagaagaagaagaagggggaggaggagaagaaggagaaagaaggagaaggaggaggaggaggagaagaagaagaagaaaagaaagaaaagttgaagtttccatttttcttggaacaccttggttgatctatgacctggacacagcacttgataggttcttttcttccagctcctgtgtgacaagccagacagagtgtgtgttgcagtttgaagaggcctcataactaatacttctccccctgacatctccttttccatccctgccctgagacatggccctaaggctgtactgctgataaggctgccatggggaattcgtgcaaagggacagcctcgaactgaatggcagagcagatgagggttcctcctacacagcggcagcctccatctcctgcgttgcctggccagatatggcagagggctggcgctatggcaggtaaggcttggggccaagcagtgctggaaggggctaagttggtgctggctcctacgggtgcctggtgagtcctccatatagcatcaggagaggtccagcatgctgtcctggtaggtttttttcacagtaaacagttcatgtctctgacaggagtgaggtctccctcaactacagggtcttctctgttgtgagttctgggagatgataaccaggctatagaaactttggaaagactcaaggctgtcagagcttgagagtcccaggacccagtctgcccacattcctataggcttctccacctatcaattgcacaggtcctgtctatgtccagaaggcagaacagtaggatatttggggaaaccattctgagatgtaaaatagccttttgattgtgagtgagtggctctttctttttaaatatgcacatatatcatatctacatatatatcactcataaacatatatgagagtaagcaatttctttctttctctctttctctctctcttcctttctttcctttttttttacttaagcagtctttaatgaaagctgtgtatgagatgtctctgctcctgcatcttctcgatcgatcatttcttccttgtatttgcccttctcctttcctgtttgtcaggacttggctttcctctccaggatcttcttgtccagctttagcctggtgatgcccaccttgctggggtggatgcccacatggacagttgtgccattagccttctctcgctggactcgttcaatgtagatgatgtatctctttttgtacacctagaccaccttgccaatctgctggcccttgtagtgtctgcgaacaccctaaactacatcatcctctctttctcttctttctttctttctttctttctttctttctttctttctttctttctttctttctttctttctttcttctttctttctttctttctttctttctttctttctttctttctttctttccttctctctctctttctttctgtttttttcaagacagtgtttctctgtgctagccctggctgtcctggaactcactctgtagatcactagactggcctcgaactcaaaaatcagcctgtctctgcctcccaagtgctgggattaaaggtgtgtgccaccactgcctggcttcatcatcctttcaaatgggcatagactgaacattatacttctgtctcagctctttggaaagaagggaagatatgatcttcctctgaatgtgaaaaggtgcattgaaatactgtttgtggttcttgcttcagtcagaagtcatgaggggattgaacttcattttggctgctgtaatccagccattcccacagaaggaaagagcaatatgtatatgtgtgtgtatatatgtatatatgtatatatgtgatatatgtgtatatgtgtatatgtgtatatgtgtatatgtgtatatgtgtatatgtgtatatgtgtatatgtgtatatgtatgtacatatatatgtatatatgtatgcatgtgtgcatgtatatatgtatgcatgtatatatgtgtatatgtatatatgtatacacacacacacacatatatatatatatttcactcattcactcattcatatatggtgtctagtatgtgcaccacatgcatgccacaagtatgcatggtgagaaggtgtcaggtcccctggaaccacagttacaggtagttgtaagctaccatgtgggtacttggaaccagaacctgggtcctctgcaagagcaacaagtactctcaaccactgagccatctctccagccccaacttttatctttaaaacaaacaaaacaaaacaattttcaaaatgaaagccagtctctggaaatgtatacctatgggccccagactgctttgggtgggtctagaaggaaaacatgcaggctctaaaaagccttgagaggaagcaagccgccccagtgtggtggaggccctgccatcaagctggcgtactgggcaatcattccatcattctgttggctctctgagcaggtttcttcactctgcaatgagacagatgggtgggatgtgcagcagacacgggaacaatacccactgctgccagtcggaggataccgatctatctgttggcaaggtactcttccttttgtagagcaaatgaggtgtttgggctgacagccaaggtggaacctgctaggttggaagacccatgggcaacaattcaggctactgtagatcacagatgaggggaaattccgtccgtggatatccctggttctaaggcctagaattaccaacagtctttattcatgcagagaacggagagtctgtgtggacaggcctgcagccagcctgtcgtagccctacctccccaagccccatgaggaacagcccctgctactggtgttgcctgggagtaccaagcgtgccctgagagacaaatgttggacccaattcatacaacagatgctaaatctgggctatggagcataaggcaaaggatgtacatgcacatggtctgtgcgcatgtttcatctggcctgaagagcatcgtgatggaaaaacaaaaccaaacaagaaggctcaattcattgccaatatttaacaattgagagatttcatatataaaaaaattataatttggggctttttgacttgggttatcatcagcaagacagggtccacattccagctggaccacagccctcccagttatcctgcttgcccaagtcccaagggccttcagtctgccacatccttgtctgtcactaggccagggtctgaagtgactgccaacactcacagttaatgctggggcaagggccagccccagttcctggactctttgggctccaccacccactgttctgcattcctgaataaggtccccagggtcacctgagggcccagtctgaggaattggtttggaaatagaaatcagccaagtgactgagccaatttcttagatgtcatgaagatggagtcatggcacactcagtacatgcctcagaattctatttgctggcgtgtcaaaaagatttcatttaaaatttttttttttttaaaaatggaaactggaaaatctccaagtctatatgtatatctcaggatccagacagctacagggttaatgagccatcatcactgccaggaagaacactcacggttctgtgtttggttcatataacagatctttactatgctctatctcatacgaggctccatcctaggcattgagaaaccagggcttggatggccttaccttgggggtagggcagacagacagaggagactcatgatttataaatgcttaatgtttttgtttgcaactaaacaataaataacttttaaaaaatctggcaaatagtttcacataaacagatttcctcacataaatcgtgaatctgcacagtaaagacatgacatctttagaatattaatcgtctttgtgagggctaaataggctttatctagactgccccttttcttaaaatctgaagaaaatgggatgaaagattaatgatcgttaaacctaaagtagtgggtacctatctgttgactgactttcctcctgaaaatttaaaacatcaaacagggtttctatgtatagccctggctgtcctggaactcacactgtagaccaggctggctttgaactcagaaatctgcctgcctctgcctcccaagtgctgggattaaaggcgtgcgctaccactgcccagcaaaacatcaaaatcttgaaatggcagaataggggctagagctatggctcagcagttaaagtgctgggtgcttttctggaggctctgggtttgatccctaacgctgtgtataactccagcccctggagatccaacgtcttcttctgacctccaagggccctgcctgcacacagagtacgaataccacccatgcacacaacaacaaaaatagaaaaaatatctttaaaggtgaaggaatacattttcagagagggtctatacctttgtcctgggatgtcaccgctgtgactgttgatctagtcccaaactgtgctgcaagccccaaggagctcctgaggaatgggctgtgcatatgagcccaggcactgttttcttaattggtatgtgctctgcatcaacctctgcctcttcatgaccagctgtcctgccttttacctggtcttctagtctgttgtgcctcggggaaagcagagcaccaagcctattagaactcagtgatggggctgggactgtagttaagttggtcgagtccttggctagtacgcctgaagccctgggtttaatctctagcacttcataaaaccaggtatggtggcagaagcctgcagtcttagcacctgagatggggggtaggtgggctggacaatcaaaaactcaaagtcaatctcagctgtacagcgagattaagggcagcctgagcctcaaaacaacagcaaaacagacaaaacacaaaataaggatggggaggaggtggcttaatgggtaaagcacttgcatggatgtacaaaggcctgggtttggatcctcagaacccgtgtagaactggacagagtcacacacatctatgaccgcagtgcttcatggaaagatgagatgcagagaggggagccccggaagctcacaggccagccagcctggcacaggcagtggtgaacagccagcctgacataggataggccagccagcctggcacaggcagtggtgaacaaggtgaggcccaacctctgatagaggttgtctttccttcttcatgtgtgaaacatggcacaggagaacacaaaaccacatacatgttcacacacaagggcacaaaaaagaagcaaagaactcaatgagaattgtgacacgtggactttaaggggaacctagaaaacctcgaaacacacacgtaaattactgttaatattttggtttggggcgatgccttgggaagtcaaggtggttaagggaaaagacttctaggtaaaccatgccatgactagttgtcttcctagcagacagacaggatggggcaaggtctgggaacccagctttggcagtgtctgctcatttgcttatgatacattgcccgaacatctacagagccccaggcgctgccctagctagcaaaccagacagacaggagggctggcctttgtggggctggagcaaataggagcgagtaagcaaagcaacttctaagcaactgtgggctggaagggggcactgtggatgggaagctggctaggaaatgctcccaatatccaggcctttggatgaaaacctaggggaccgaacacacagggctgctagatatggctgtttgctgagaaggggtgggggaaggcctgaggaaagaggacccctttgaaacaatcaagaggggacgtaacactgaggaaaccaagctcagagctggagatgtggctgaaggcctgggaacggaggagatgacctaggaaggcaacgtactcagataagaacctgatctgggtacactgagctgggaaaggctgtgtgtgtgtgtgtgtgtgtgtgtgtgtgtgtgtgtgtgtgtgtgtgtttggggctcaaatgtgtccagggtgaggtagggaagtgtgtcccctggaatcagcaagccagaagtaaatggcagtcttgacaagagaaatctgctagaggaatgagcagtttttgtccaatggctccagcttgccttcttgtaaaccgagggtatccaaacaggtacaacttgggactccttccttcttctaattgacccacaggttgaaaagctagaagtgtttctttaagacaaggggacaatgattaaaagacaaaaaaatttaatattggaagatatgctatctgggagttattagccattatcaatactcttttacataaaagatatttatgtaaactgttaaaacagctatgcgcaacgttcttcttagcgagtggtgctgtcaaaactaaccccaatgcgccttggctctctgtcctggagaactccttaccgagctttttagatgtcacacacacttggacagagtcgaggggcacccaccctctcacccaattgtttagaatggacctgtcacccttccagaggcatggaagaaaatcccaatgctatcaggaatttaagagcagttcaggggactctataagacttgtttctccatggcacatgttagctaatgaaacattatgtttgaaagaaatatttcagtcctagagaggaggcaataaaaaggcctggggtaggccaccttgacaaagttttaacaatgttggatttccctaaatgcctcatctccttatccccagagtccccgtcctgaatttttatccacggttaaccaaggttggccaagggcactctataggactttgtttctcaattgcttattgactgtcctttcaaagctagagattgccatactctttgatgacttggtttaattggttgagataacctggcacctgtgtgcagacaggctctcaagggggttgatagactagaggaaatgactttctcaaactgcctgtggccagggcagtccctgtctgctttgggtttaaccttgtcccaagaactccgagcaaggtgtgaagagcctggttcctgaggaagacacgtgatcactctccccagcctgaaaagcagacaacctaagatatggattcagctagagtaaatgaccagacaaatagctactgggacagtatccgtgagtcctggccacactgctttctctttgccttcagaggtacctgttatcctgttatcaaaacagtgctttcagatacaaaaggtaaagagacatacaaggtaagtaatgctcatcagggtccttctactaatctatcctcagtcagaggttctcagacttacatgtgtatcacaatcacctggaatgggggtatgggatggcatgtcaagggcacagatttccaggccgctgtcctatgacagtctcatagactgccttggaattcagactcctgaaagtgctgagttgagggggactaggtcagattaaaaaaagatgacacagactggagagatggctcagcagttaagagcattgactgctcttccagaggtcctgagttcaattcccagcaaccacatggtggctcacaaccgtctataatggggtccgatgtactcttctggtgtgtgtctgaaaacagctacagtgtactcatctaaataaaaataaataaatctttaaaaaaatgacacttcccctctcctgaaaaatccttctaaaatacttttaggtgtaatatctgtggctttattggaaagaggttttaccctgcacagtaacatctaagtgtaagttttagggtttatagtaatgggaaaagtacatatatggctttgtaatgttaatttatgcaacaaataatatacatatgatgaatatgcacaagtgttctgcaagttactccagggagaagatggcagccgggattgtatggctcagccagtaaccagctgggaagtggtggcgacggaatgcagcttttgtctaaaccctgtcatctttttattttttactacaccacacaggctatttttcaaaaattcctttggaaggtaaggttcaggaaaggaaggccccaggccactgctatttcaaacatccactcaaggagacagtgtactgtaaacggagctcagcgctggacggagcgaggtcagcgctggatctgacacatggaattctccaggcatctgaggaatacggcagcccaggcagggtatgctcagagtatgtccagtgtgggatgctcttgctgtaggtgatgtgaacctcttccataatttccttcctatccactatatagtttattttaataaaaaaagaagttgtatctttcaagggaatagactctgctgatgagaggtcacttcagccatggcctttgccaggtccttaaagcacctagacaagcagactggaaccacgtgacccacagcaggctgggttagtatttacctagcacggcactaatttcacgtgtgtattcattgaagtctacatctgtgtagatgttgctccttggatccctattctacaaattaggattaccgggtcccaaaggaacttttcccattctggaatggatatactcagccccggaacggagttgtgcacatgtcacattcaatacatctaatcctcattacaactcacggaacagatgtcttacgatggggcaattttgcaaataagaaaactaaggaatcaacccttccagtgcagtaccccaatagaaattcaggagcagctcgtatctcaaccctcacccaacttcaaccacctgaaactttcatccccaggtggggctttgaacccggctttgagaaccaagactttaattataccccaacagattccaccagtgctacaggaaaacattggactattccgcggggcgggggaggacttttagagttagtttttaggcagacttcagagaccactacctgtggagccttttgctacaaattagttcttttaactaaggcatcccgggcaagggtcttccacgcgcatgcctgtttcagaggctgcccaggccacgtgcacggagacccggggccgtgaccagggtgagacccggcagccccacccacgaacctgcccggtggccgccgctccagcacgtgggagtagcatttcggcgactccgctccgtgcagcgcggggcctgctgcagcaccggactccaaggagtcctgagctagggctcgcggaaggagagaggtcctgggtcccgtccgctctgggtcccgcggagccgcggccatcttggcgggctcacctcgcgggtcgtgcgctcgggctgggacagggtggggccccgggaccccannnnnnnnnnnnnnnnnnnnatcgggggcgggggacacgccaccggaggagtgctccgtgtgccgtcacgtgcgctccaaggaggagagtgatggatggggcgaccgcctgtgcgcggacttgggagtccccacgcgtgggggacagtggagctgagcctccagtgcagctcgagccgctgcgtgaccctccgtcccggggtggggcacccttcccgaagccaaggccgagcgcgggctgcgcggacgcgcgccccccttccggccgatcccagtttgtgaagaaaaggggcaaaaagaagtgttaaaagatcccggaattgcggtttggctctggggcaacggttgctacacgaagtgaaacctgcggagcgctcgggcgcgcgcgccgcgccccgccccgatcgggcgtgactcatcttgggaccgcccggccggttcttatactcgggactgcggagcgcgcgcagggcttccctccgcctgcaggtcccgacgcgtctccgccgtcgccgtcgccgtcgccgtccgccgtacagccgaatagccgaggacccacgcagagccaccaaccagccaagatgcccaagccagtaagttgtccctgtttcggagcggctgtgcgccaggccgggtgtccccagggaatcaccttgcactggctgctgggcagcttctgtagaacccagttttctggtgaagggcctcttgttacctgtagacgcctttgtggcactctctagtcccctttgtgggtggttctttttcggttgctaacgaaccccctaccaggtttccggactgctttaaaagtgcttagtgcaacctccaagtttcttaactggtgcaagtagcactgaagctttggtggcttctcacacgaccgacacctgttcgcccagttccttcgagcgaccgaaaccacttgcagcccacaccttcctgggcggtttgaagggcatttgggagaagagaggctttgtgcctgggatagcctggtctcagcccctttctaggcggctggagaggcgcggccggtctaaacagggtttttttgctggttgcagcaggatccctatctcggggagggttagccgtggacttgaattgcagatgaggcagtcccagaggcttgataaggaggctcactgggcactggtcgtgaacttgggctaattaacgcgttgcgagctcgcctctctgttcttgaatctgattctgttgagattgctggcgggacagagttgggggtgagagcgactactacgcaggtcctcactatatatattccacccgcctttacaatgtggaggggtttgatgattaggtggagggagaaactgtgatgtcttgtttaatttttaagtagagatggagaaaacaagactaataaaactacaaagagttttcttaataaactacagagttcacgtctagtccttagagcatatatctgtttttactacttttacgttttttgtgttctctgaaaggacgttcttctctagaaattgtatttctgtttctatcggtcttaagcctattttctgacaggtcaaagaacttactctaaaaacgataatagacccagacatcagtacggtttttggcctaagttattcatgggagggtattttgacctcacacaaatgcatttcaaactcaaaagtggttcctggttccactatgcctgtggtataaaactggcccaggatgtgttacggtggcgctgcagcagatgctgggggtggtcagtacattagttccgggtgtgggttttttttttattattattattaaaatattccgaggtggtggtgaggtgctggcactgtcttcagttgctccttgtttctcctctctttacaaactgtaacttctttattcttagttttttccaatatcactattctacactgattctcagtactcatacagcacaaatctgtttccctagaccctggtggtgaccatactcatcttctgtatattgagtagggacctcacgaggacagaatctgggtatttgttccttccggtttccactagtataaagtgttctaatcacagacactccactccactatgtcaaaattacctcagttttaaggctaacccccccccccccccccatggctggtatgtttcgatttcctcctgttttaagtcttctgtggtaagaactttgttaggaaaaagtgaagaactgttcaggtgttaggaaagagggtagccatggtctgtgtgcctgtcagcttcagtaacagagtaacttttttgaagtccgttctacaatagccagagttaacaatttccagactttgcagagaggactcctcttaggcgcaaggtgcatacctgcagaaggaaatccccagcttgcccctctgccggtgggaggagtgagaggtggcctgctagagtgagcactggaaatagccatattggccacctctaccactgttacttggaaactgaatttgtttgttgttgttgttgtgtgtgtggtttttttttgggggggggtacctaattggggtttgtttattccctgcctggataaatgttaaatgaagcatccaccagcaaacttcttaggtatgtcttttaaacaaaaggttattgattctatttaagcctaaagtgagaatttccttgtggtctgagtgggtgaggcttcactgggttaaggggcaatcccagttaaccacagatacacctagattttggcgtttgtttgtttgtttgttttggcctttcacgtggtggttggtttcttctccgggcccagttagatgactttgttcataagacagcaggtagaaatgacgtgacatttagaccctgagtattaaatgttggatgtttttcattcagcaagcagagtgcctgatgcagaggggcaatatggttatttccccgtggagactcacagtctggttcttcaaccaagacacggagcttagcacattaatgtgccttcaaagaagaaaatgtctcccagaaagagcagaggttaagagagcacctgggtgtggtgtggtggtagggaaactggttggtggccctctggagaagcctaaattttgtcttaatcgtgctggaaggaattggggtggggggtgtctgtcacctgaggagggacagcggtggcctgtgactgctcttgatttccgtggtcactttggcactccatctgataggagtgatggacttccaaggaagacatgggtcctctggagggcaccttggcctctgctcatatggtgcccggattgggggcctccttggggacactggtggggttagcacgaggagctggtgcaggaagcaattgcacaatcctttcaggcaaggtagcccgggagctcctctccccctcccttccccctgctctcctgaacctgctatcctggtctggtgggaagctgcaggcaagccttaagagagaagggtgttacctttcaagccactgtgatctcagatgtctcccagcttcagcagagaactgcctgtctgccgcatacatacatgcacgcacgctcacacaaagatgccttaactaggctcacgtccaaagtggtgcactgggaactaaaacttttcattttgccctgctaaggactggacttgaggctctgtgcatgctaggcaagtgagtcaagttaatttctgagacaacctttgggaattctctttgggaatattgcctttcactagagattttaacagggacagattttaataaatatacccataggtattatttattaagtgcacacacgcacgcaccccttcattgagaagaacgcgtggacatactgctcccctccccctttcacccaggggcagatggtgaattaggtggctaagggtttgtctcatggcagcgagaaatgctggctagggttaccgacgggccatcgtcacacaataaggcatgatgaatatagctcatcccggagttcagcagacttttgcttgagttcctgtgagaggtgttgaggcgccggatggtagacagagaagtagcccctggcgttaggattcccagactggttcagggcagacagtaatcgcagtaaatgctgagctgtggctctggctgttgtgggaaggagtgctgagcagtcaggaattcagagcggtaggaagggggaggttccagttggagcctgctcggctgtggaggcaatcaggatgctgtgccgagtcagccacgctctggcattttaggcttaactcgggttttgacctggaaggagcaacaggatggtaaaagtggggaaagaaatcccccaacccctccctggtgatagattggacacactgggcgccaagggctgggtcaggtggccttccggtttctgcctgcatgaacgggtgctgcagagcagtgatgggggcgagggcggtgcctgagaacctgtacatgttaataaagttgaaaagcagttcttatttttttttttttttaatagtctgacctcagccttactttgccattttggactctggcttgtaaccaaggtgggaaaggaggctagtaggaagagactcttaactccaggaagacgacgctagcccagcatggctgcagagcagcaccagcgatggcttttctctgcgtggggttcaggggctgagcttaatttgttagtggctcttggttttcagaggcggggaaagcccttcgccctgtgaaacttttctctggctatttcttcttccgcttctgtctgttgccaccctaaacagtaacattgtgatttcttaacaaagtgcggactaacttgactaatgatgttcagacccagagggaggaaaacagcaccacctagcgaattgtaacaccttttcttcattttttttttttttttttgagatggaaacttctgtgactctttgaccttttagagagagacttttcttcctttttaacattagttacgagacagattcttgactcttcgtttttaacttacactatcacttttgaaataagaaccgcttatggaagagaccggaagtttgtagcatacttcctaacgtgcttactctcctttacttttgacttccggagtaaagattactgctacgtcagtcagataatgatggagagtcctcttgtagcccaggctgcctcactgtgtagcagaagacaaccttgaatttttgctcttcctacctccagctcccaggaattggggtttcaggttggtgccagcgcatccagtttgtgatgtgctggggaccaaacccagaattctgtgattggtaggcaagcactctaccaattaagcttcatccccagtgtttgtttgaagaaccaagcggtagtgctggcggtggatggtaccttggtttaaagcacttgctgctcctggggagcacctggagatctttcccagcatccaccacggcagctcaagtcttcattgtctccacttacaggaaatgtgaccctccccctcttccggacccctccagtattgtatgatatgcaggcaaaacactcatttatataaaataaagttacaggaccaaataaaaccattgttataatgtgacttagaaactttgactaagatagttgttatattttttaataaaactgcagagaaccacagcagtctcgtgatgtatactgcttgctgttagagaagccatttagtacctgtggacctcagtttgtcatccagaccggaaaaagtgcaaaagatgctacctggggtaaactgaggcaaggctttgtgacatgcagacagctaatcttaacataccataagccttgttaatcctgtgtgcacttctccgtgtaaaccgtcagcagtacacccctgaccctcgtggggaaagagccacagaaaatgtccggttgtctcccacatctgccgttgtcagaatcccctgggaattctgtttcctgtctgtgtagtgagtgggcctggtgctggggtgtgcctgggaggagttctgttggagaaggtgagtataggcaaaggtcacagtgaggtaggacagtgatcaggagccagcggggccagggcagttccccatgttggctgcttgctagggggaaggctaggagcagttctggccacaggctggttccatttttattttatttcattttttcattcactaaggaccttttatttcctacggatagatggcaatgctgtttcagaggagaggaaaactctaggaacactttacccttttatttaatatatctgagagaacaaagtttaaaggcggaacaaaaattctaacttcagcttcaactctctctgatgcaaataagggtggggtggggtgtcacccaagagggggcacacggctcagtttgggcttagcttattctctctttttgtgaacttgaggtccctttcctcagacaacttctttctgttgttggtttttttttccttttgcttgggagaaggtactgcaacggtactggggaggtgggggtggggctatgcttgtcccggaggatggtggaggcctttctttgtttgtaaggaagggacaggtttcttcctacggtctcccagctgagaatttttttaaggtttttgaagccttgttttaagacaccaaataaggcccttaatgcctgagctatttaccctccagccctttacagaaagaagggccaggcccttgcttccaggataaaggtaactattgtgagggtctggttagacttgtgtggattttatgactcggccaatatttggaaggcgaaccactcctttggttctagtttttacaaaaccattctcgtaaaacaaagaaactgttcctggtcggttcattctaagtccatcctgtgccctgagcagaaactcctaatgggaaaagtgtcacagggcgcaagcagggttgaggttcaacaaggctggtgccagcggctgccctttgtttcctagggaaagtggcagtatcttgtgtcacctcctaagccattgtctaatggcagatctttggcacacactgagagcaatttgtacctgatatttgagttggaaagagactgtctataaattagttgctttttttaatcattgaaaatttaaaaattaaacctagcaggagtgacccccgacccctcaccctcctcattatatttcacagaccttggctatccctttttgatgtttgataaactgtgtctttgtgcctttcctggctctacagtgaggtcacacggttcaaacatcaacaacaaaacacccaaaacatcatctgcttccagaaagacctttaaatgcttgcagtattagctgattcatagagggtggtagaaggtacaaagttgcctctctgggtgattctactctctctgtgcctttaaacaagatcgtgcctcctacttgtaagggctgaagagatagagaagtacgtgtctgtgtgagtgtgtgtgtgtgtgtgtgtgtgtgtnnnnnnnnnnnnnnnnnnnntgtgtgtgtgtgtgtgtgtgtgtgtgtgtgtgtgtgtgtatgtgtgtgtgcatgtgtgtgtttatgttttcacatgctcgtccttgtgcctgaccctggttggtgggatctacttgcaactacaaaattctcatctaattgaaagttttcccatcccatgatggtcttttttttttttcccccgtctgatttagacagcctgatgaactagaaagcaaatcatgttcgctgtttggctctcatggtgaatactgctcacacccctccaacatacagtgctggggtttcaggtcctgggaacacgctggctgacaacagagggccttctaagattggatggttgttgcctccatggttgtcatggttaccacatcatggccgaccggtttccatttgatgtgcaaactctcatttcctgaatgtgcccccaccaacccttagtggccaaagtctgaggaaagttagcacagccgaaaacagccttctgtaaggaggtcacgggagcagtggctcccgctgctcctccctagggagcacctactgctcttaagagttgatacgttgggggttggagggacagagatgtggaaaagcagacagttggccattgcatataatcaagcattgccaaggggtagagttaactttttttttctttttccccccgagacagagtttctccgtgtagccctggctgtcctggaactcacttttgtagaccaggctggcctccaactcagaaatccgcctgcctctgcctcccgagtgctgggattaaaggcatgggccaccacgcctggcttagagttaacttttattattagtttcttcttgggtgaagagttaaatcgtggggcagaaggagcagagtgggcgaggtgtggtaggctcatgctgtcaatgagcccttacagaaagaaccctgtcttgattgacatgcctctaaaacttggtcttcacatagatttggtggtgagtgtgtgtcagtatcttcctggcccgctgagacatggccatcatttctcaagtgctttaggtcagggatgttagttgagaaatgtttgcctgtgtctccatgatggtgtctgcagatatcttcagtgtgtcttggcacaggatccagccttcttcgtctttatgtttgtgaagagaaaactgatctagaggagacatggtcagcactgtttagcttggtctgtctttatggaacaggatgctgttagcgatctcactgagatgctgaggtgttgggcgtgcatactgcatcgcttttggatgagcctcctcaggggccttagccagggagggaaggttgggaccactgtgtgccttcctaagaagtgggctggagaggaagcagtgagtagcaaaatgtattagatggatttggacagaccaaccataaaaggacctgtggggctatgtgctgaagtttataggtagatgggctttgagatccttaaaatatacgaagttcatatcctctctctctctctctctctgtgtgtctctctctgtctctttctgtctctgtctctcattctttttcattctctcattcatagtctctcccctccccctccccaatagataaggcattccagggagtaagtggtgttaaaataggagggaagtgtgctcagagtctctgtgtagcttcccttctttctattgtgtgactgtgcctattggaaaagtttagttcctgtgggaagggagtcaatggcttggtgtgtaaaggagctttaccatcgagtctgaggatctgcattgagttccatccccagagctcctgtggtggaaggagaggatgccctcggatggccatatccaaagcacacacatgtgcacgcacatgcatgcacgcagacacatgtgcccacactggcatacaatataaaatgtattacaggagggtgtgggaaaggggagagtgattcattccccctgtctcctcgcaggctgtatgcaaagtccagttggaaaccaggtgaagccctggcctgcccagagtcttagtatgctgagggaggggttctccacgaggccccgaagtggtgtcacagtgccgtaggtcacctgtttatggccgatgaaatgaacagttgatggcattgcagctgggcctccgccctcccctcagcacacctgcttttaaggcactccacatggaaacctacaaacaaactcttggttcccgaaagctagcccatacatacgggatttggggtggggaggaggtgttgtggcccaggacggtatctcactagcaagtctgtcggccttgacaattggaaaggaacacaataaaataggaggtatcttctgagtgcagatcttatgcagccattttaggaggtttgtgtcctggtgctgttggcggggtgggcaggaaaggggcggggaacacagctgacaggggttgggaggagtggttagctgaaaagtacctcctatcttcttacccccagttaaatacttgtgtacagagtttggtttaacctaatagaacctcaaaaacagagacattttaaaaacagaaggcttttgttttttgtttttttaacgtatgcttattcaaacagtttataaacatgccgattgtttgtttgtttgtttgtttggaggaaagttaaacttgggctggagagatggctcaaaggataagagtgctagctgctctttcagagctccccggttaaattcccagcacccatgtggtagctcacaaccatctataattataatactatgagatctaatgctctcttccggtgtgcatacttacatgcagacaaaacacccatattaactaaataagttaaacaacaaacaaaagcaaaaactgttggaggtcagactgtaattgctgaaggcaaaaggaaagactttatcggctaagattaaagatctcgtatctaagtctctcataggaaaatgttccttaaactgcagaatagtcctgcttgtaatggccttagctatgggcagctttgtctcagaagtcagtgtgtctgtattagaggcgcgtccctagaacaaggcggtctgacattctcctcccattcctagctcctcctcctcctcccctccgttggaaaaaggaataacttcacagacttctaattttacaaagaaaataaagcagtccaggtgggtttagtctacaggcctttcatttcttacgtgctgtgagctgagaaccaaaaaccagtgtagcgtgtagcagccatcttggctgtctctacctcagtctttatggggatctcctcggtgtgtgtaattaggcaggtatttcagggagctatatcctatctgaagtgtgtgcgacacagctactgaaaccaaaagccaatgtctccatttccagactccactaaagagaaagtgaccttgaataagaagttgtttatttagtctgccttggtggactgaggggtgtatgctgggttatctgtgtttctccttagcaacaggtaaactcctttggctttttctctcccctagtctgtgtgaagtagtctctgagaattcttgtttgatttctttggaaatcccggactgaaagaaatgggtaccaccgtacaagcacacacacaaagtgtgagaagttacaggtccaggcaccgggagcagcggcctacgactgttagcagcctgtgcccttcccttctgtgggttctgcccacaggccctcctgctctggtatgggccgggggagcagtctctctgctacccaaaggtctgtgggaagggctcagcacaccctgttcccagccaggtttggaagagagaggttcagaacggaccctcttcttaacgctccgtaagttcccttctgttttaaggtcagattttccccccctgatcataatgagtacaaacaggactggtttgtccactctttgtgtgtgttaagtagccttgctctgacaggaagtgggtctgggggcaggaagtagcttactttctgaggcagaaaagagctattgagaagaacttgagacttcattgcgtgtcctcaaagttacggggaagcgttagcccttccaagcccttagccattctctgggatttactaatgggcttttccgtccattgacgtagatccagccgtagaaatcaaacacaagggttatacagagagaagagcgtcagaagttgagagagttgcctaaggcatctgggtctcactgccctcagtcactaaaaagatttaactctcaatccaggaaggagatgcctgcctgctgcccaggacgctgaggcaggtggattgggacttcaaggctgaactaggtacttaaatagactattttctcaaatgaagagacaggtggagcagtgcatgcagatgcagagatacatgcaagtgatcatgcacgtgcatggggtgggggtgggctgacacatgcacgtgtgcacacacacgcgcactcgcacacgcgcgcgcacgcacacacacacacacacacacacacacacacacacacgaaggctaggaatgcccaggcaggaagcagtagccagttacagtcacctatagagtaattaaccttgtctctgtgatagtgaaaacatacacattatgttacagggattaaaactgtcttggaatagttaacaggtagttttcaggcccagcatctgtgccagtatattaagaatttagtgtttatatttagtctggtggcggtggtgtcatagtgaggacagtttggcaagaagctcaaagagaatgttgtactaactttcgtaattaaagatacccaccgagttccttcagagtgcacctgccatctataaagtgaggtgaacgcccaccatgttcctgggaagccagatcagcctggctgtgcgcagccgggcacacgtgtacaagatggtttattatgctttaaaatattgggggtcagccgggcggtggtggcgcacacctctaatcccagcactcaggaaggaaaaggcaggcagatttctgagttcgaggccagcctggtctacagagtgagttccaggacagccagggctatacagagaaaccctgtctcgaaaaaacaaaacaacaacaaaatatatatattgggggttggagggtgcccatcctacttaataaaccataaatatccaagtatcccagagtgaaggtataaggtgttttatagatagccatgaatgtgaacattagcagacatgaatcatgaaaaaaaacccttaaatttgacaacttccattcagccagacctgcttgcaattaaaagtcaaaacgatgactttatactcttatttgatttaaaatttatggtcaacattttctggacaccgaggaaggcagggcatagcgtgaactgggatcccacaggaagaactgcttgctttttcatggagtcaaactggctcctttggctttgacctctgaggtcacctccttgctcttcattagtggttgatgctggggcagactcttaacaggactggctgcactaagacagagagaggcaggagcatggtggtgttggtcttaattcatgttgccatcaggagttcttctcacagccttgctacttgacctttttggtggtgagccacaactgtccccaagaacagagtcttcatcggaatagctgatgttggcctgtgctccaaacattgctaccaggtctccttatatgatcagtggtgtgactggcacgcgtcgttcctgggagagctgaagagagaatagagctgcagagcaacacttagggctctggagctgctctctgcttgtgtgacaaatggattcttgtcagctctgacattattatttacaacaactactactacttaggcagtaagagacacatgtcctagtattgtgccatcatgtggaaactttattattttgagaccatgcatcctagccagacacctttataggcttgctgtagagcccatgatgagcagattttactgcttgcctgactgacagttttgtggtaatggacctacagctgagtgagcttccttttacgtctggcagtcttcctactcgtgctgatcaagctgctctgaacactgttaagcaagcagtacgctggtgaccagatctgacttagagctccagggagcctggtgtccatgaccaggccagctgtgtgtgtttatcatcatcctcgagctgggggttcttctcagggctagttcatccctattgtgtgcttatcctgctatttccaccttctccacacatcagcaagaatgttccggaagcctggcagcaagggcttgtgcttagatgtatgccatcctgcctttgaatgcccagggacagctgtagctgtggttgggagctctaggggagaacctcatttgctaatgctggagtgacaggccttatgtgaatattataactgataagttcaggaaataaaggagcccttggcatggcacttctctctgagatacccttaatattttggttaactctggtttagcatagacttcgactgcttagactactgcttgctttggccctcttcaggaggagggatagtttggtaatttttttttttttaaagagtcactacaaatgaatgctttttagaaacagtgacagtataaaacatggtcctgggagttggccttgcagcgattttctagactttatgagtatataaacggtagtcagccccagtgcagatgtaggcagtcatcttgttacaaatggaggctttggggcgtggggtcccaggttaggggccagaggtggctcagcaggtctagaggtgcttgtccacaagcttggctgtttaagatcacactctaaaacctccataaaggtgggtagggagagccagtgtcagcgtcctgtgacactgtgctgggtccaagcacatagatgcacacagtttaaaaaaaaaaattgaaaaaaattgaaaaaatttaaattttagttagcttttgctgcgacagcttccaaaggggcagaaagaccttcagaagaacaatccagcagacaccaaagccacagacgccattcaccttctgcgagctgcctttgcccaccttagctgagttccagagtcagccttttcaggcagggtggttaaagtttgctaagttactggaactattttacagagttcagttattcgttagctagcatttgtgcagagtggccactgtgtcttagcagatgctacaagatgacagttattggcagtcagtggtttgtgtcagagattagaagggaccaggattcctaggcctagactgtgggcccctctgttactcccagggccagtgctttccaagcaggtcatgattagcaggcgctttagttccagttaaaggatttgtggccttcactgttgggctctttccaatggtcacgtgttgtcattgacttcacccctgagcttggcagagtaaatttacacatagccctgctatatctggagcctgggaagcaagtgccttacttattgggctaacacaggctacaatgtggtttacatcccagaggaacaccacagtgttgaggtgtagctggccataggaaaggttagaccgttaggaaggttatagttcctcttgaggtcagatagcataaagcgtgtatttctgacatctccttcagcaggaacaggcccttagggtcgaggatctgttaatgtgagagagcgtttcagaataggactgaattcctgcttctgtctaggggaaaccagaacccagggagagcctggtcctccttctgccccagggctgcagaccacagcttaacagctcggagctcagcagtcaaccctgttctgccacatagggtaaaaccaggtcgtggtggagtgacctcacacattgtcacggtcaggccaggctgtgtgacagctagagccctgccttcccaaggacatggaatattttcatttaaaactcaaaacaaaaaaagtaggcttagttacatgttgagttcttgaaaattagtctcctttaatctttgtcccatcaagctgaccatacatagtgggtttgagtgacattgcttcttagctgccctgtttgagatcatccaagcaacatcgaaccaactgacaaaatgtttacccaataattccagtggattaaggaagcggtggtatttggcactaggaaaggatgaagtgctgatacaggtaaaacagatgatttgaaaatgtgctaactggcagacagatttcttttctctgatacgcccagaataggaaatcatagagcctacaacgtaggttgtgggtcatcaaggcttgggagtttaagaacgggggtgatgctgaccggcacagtggttttcctgtaggtggttgagaacattctaaagctagtgcatgcctggaacccttgactaagacaggaggattgtaaattgaagccgactgggctatgtagcaatattgctctatctcagaaaggaaaacaaaaatctaaaacttgacggcaatgtttgttgtgtaattctgcgaatgatagaaatcccaatttgcacattacaaatgggtgaatcttacagcatgtaaattatatctccttaaaactcctaaaacacagactcaacatgagaatgaaggtaaatacttgtctcagttttccaggcccgacacagcaggcgagtgtttgtcatttgtcattgtgaagtccccgtcctcgctctgagggagaatggtaatatgtccactccctatttctagcatttcctagcctttcaaaggtcatccccagtatttgaaggttgttagaagttgctgatgggtcaccctcagcagggctgttggcaaacagcacctacatttgccttgataaggggagctgggctctcagcacaatcctgggcccagattgagctttgagcccaggcaggtgtgataaccaggcacaatcttatcactgcatcccctgcctgaaatccaaacattccagtgccactgtttgtatttcctcttcattcctgatacatgaatatagaagaaaaatcaccagagatgtttgacccacagtggctactgtgtgtgtgtaaggctcagtctagaatgcattcctctatcagaagttccattgatatttgcgctaactctaataagagtgagtgagcgtagacatgaatgttgcacattgagactacgcgtgctacacaaccttaatcccagtactcgggaggcagaggcagctgtggatctctgcttttgaggccagcctggtctatatatggagttccaggacagccagggctatgtaatagagagaccctgtctcaaacagaacaaaacaagcaaaaaagtgaacaactgtgggagaaatcttaagctaaggtaaatctctcagtgaccttacccatgacaagactgatttaccagagaaatctgggagataacttagcataagtcagactcagcatttacactcagatggagtggatggttaaggtttcgttgtcaagtctgtcttttttctttttcttccttttttttccccccttaggcccttagatgttttagatgacattttgataaactataaagacccagaagtgtgtgtcttcagagtgcattctgaaaagccatgcatctttgagatgcctctgaccaacagagcctgggaattctagcctgcagggtcatggaatctcacagcttgctttatttagctaaacaaaggaacaaaaaacttactccagactcacgtgaccctggcacaaggtcccaccccatggattcctgttctctttaaaagtcacatactgtctggagaatcacacagccactgacatggccagaagactcaagacagattgcagaccttatacatggtaaaagtcagggaatcccgctctggctggaaagtggggtgtgtcagaacagagagattctgacacttctgcccaagactggggcaccagcaaggatgaggctgggcttatttaccttaacagggtagctgctgctggttttactcaaaacaaaaccaagttggctgtttaggtttttaatctccatggcacagaagcagtttggcctgccctgtgccgtgtctgcccagaaagatcatcctgaaaattgaaggaggtgttctcactgcctgcttctggcctccattgttacttccttatggtcaggtgatattattggctgtcctgtgctctatctgcatgcccctaagaaagacggcaggccatctgcacccttactttccaccccacgtttctagacagaccccattcctctggaccagccagctgagaacattgacctaacttgcatgtagcctttcagacctgaaagggggcaaggctcaggactgtccttttgcagctcaagtgactgaggccaaggacagggagagagcattctctgctctgagataaaggacagcctttgacatcttcattcttgccagtgtcccagtgatgcttttatttaagctgtgctcagaaactcttagcttgattttaagaactaagaatgcctgagccaagcccggtggtgcacacctctaacccccagcactctgagggtcaaggcaggaggattgtgagttctagactgacctaggctatatacctagaccttttctcaaaataacaaaaggaagggacaagttcctagactcttgagactaacaggggggcatctaagaattgattccagggacgtcgctgaggcccaagggagaggaaggggccgaggacacaggatagtgggaggcctaactgtgctgtcctcatggtgatcacagatcctgaatgagcccagaacatgggagatacccaccatagggccaggcctggaaactcctcagttctgggaacagtagatttaagccaagtgacccagtgctttgagaagatttattaagcaaaggtgggcggagtcagggtgaccaggctactgttgaatcctgatacatttgcagttgcagtgtgaatgcttgtgaaatgctagttgttgcttttcattaaaagcaaaaacaaaacaaatatctaatttttttactggccagtttcattcttgtttcttagaaataataaaaaaaatttttagttcatccccatttttggttttaggcagtttgtttttttaaaaaaaccaaacagacatacctccggcaccatgtttgtgcaggaaatgagaaactggcccttgccaccaaaataaaaaccattcacctaagttgtgctactgcccgggcatgaaacgtacacgtttattagaaactctctttcggagcaccctactaacttgccttgtatccaagataacttcctttaaaagggatttttaggtgacagacatttattggtttagcgagggtatgctggtgcccccctgctgtgcatatggaggtcagagtacacttggggggggggagtctgtcctttccttctgtcatgtgagtatgagagatcaaactgaagtcaggcttggcggccctcgccctaacctgccaagccatctcaagtcaagataagttattttgaagttctgaccttaagtagctgtgggaagattccattgttattaacctgaagaatgctgcacatctgcacagatcagtatgcttctgttttaagttgcataagtttatgagcacctgcttgggaattttaacatcttagaaccctaggtctgaattatcttacatgagcctcactccccattgtgagaggccggagaggcacatgtgtaactctactctccactgtctgtctgtctaccctcccctagataaggaccaatgctttatggtattttggcaagtctgagataaatcctactctttgggggggttgttggggttggattttagatgactaactggtactggggtgtgtgtgtgtgtgtgtgtgtgtgtgtgtgtgtgtgtgagatgtacatgtacacaagattatgtgctaaagtcagtattggcgatgctaggataaatatccaggacccccagcagtaaaagctctgagctacacccagcccttcagcattgctactgacatgcaaattatcaggacccccagcagtaaaagctctgagctacacccagcccttcagcattgctactgacatgcaaattatcacaaattataagaactgccactctcccatcttggtggcagtttggattttgaatttgtgagtcaactctcctcctgtcaatagggccacttagctctcctttatttctgtgacactgttgccattcaggcaccagttgtatccaaatcctccaagttcattaaaaaccatcgtttaccatgcaaacccagcacgagggcagcaccagggaagctgggtttacatgtgtgtcctcagttgaagtctgatttctcccaggctcccgactgtgtatataaagagtctcactatggctagtgaaggttgcactaaatttgatgaagtttatgctgcatcgcaatatattcattattaaagatttataaactgaaaaccaccctagtggtctttctaagcacagaaacagtttagtgtgctgtggagtaagctggcatgtgctgtatttggaaactggtcagtggtgcttttagatctttggggtgatttgtaacacttgtgcttaggaactggctggctctgagtatggatactgaaatgtaagggtctggaaatcgctgaaggacgaccccagactcagatagcatgcgaaaacaaagaatatttattctgcagaaacaaccagcctgtgggggtcaaccatgttttgaaatggcgaccccagacaaagatgtgcaggccttcttatagggaaccaggagaactctctagaaggattcaataatctaaaatttcattggtggatgctggggggtcataggtgttgagtggtctgcattcccatgtcatgcatgtttaaccatagcctgagctagggctgcccagtgcagatggccccttctgagataagatagttccccatttttgtgattattcctaggctgttctttgggaaggggtttcatgatcttgttctggatttcatggcctatccctggggctggtgtcttatggtctttttttcaaaatcaggcctggtccttaagtggagacaaatggggtttatgctgccctctcagaggctttgtgcgatgctttggcatggtcttgtggcatgatcgctgtgtgtctgggtggcagcaacgcccttggtggaaacattggtacatctgtcggtctttagtatcaagattgtggacacaacactctgtgtgtgtgtgtgtgtgtgtgtgtgtgtgtgttactattgacttggtggattttggttgattggttgggttggttggtttggtttggtttggttttggtcttttgagacagtgtttctgtactcatggctgtcctggaacttgctctatagacaacactggcctttaactcagagatctacctgcttcagcctcacaagtgctaggattaaaggtgtgcaccaccacatgtggcttagggaagattcttaaaaacctggtgtatgcccagatcagagctagggattgtccttttgaactgaacaaatatagcctacattagcagaagtatttataaagctactcgcttaccttccagagctgtctgaactttggcttgaataaaacctaatcagaaccctaatgtgacacatagctgggtgtggtggcatacgcctatagagctggcagaggcaggaggattgcccgtgagttagaggacagactggtttgcatagtgagttctgggccagtcagggctatatagtgagaccatctcaaaacagcctccaagaggagatgggtattacatcttaaattcttaaatagtgtgcttcatgtagttttcagaatggttgatatcaacagtctgtgtgtgtgtgtgtgtgtgtgtgtgtgtgtgtgtagatatggatctacatatttgagcagatgtatatgtgtgcgtgtgcctgctaaggcttggagttgatgttgaatgaaggagtcttccttcattgatgtccactctgtttaccaaggcaaggtctctcatctaattctttacctgttgaaccatctccacagcccttgcagcatctttgtggcaatcactggctttggcatctgcagattccctacatttagaaggcttgggatattctctctctgcctctgtcctgctgtttgttatgccgggggtaactgaagatctgccaacctgatatagggatatttctctagattatgctttttttttgttttgtttagtttggtttggtttggttttctgagacagggtttctctgtgtagccctggctgtcctggaactcgctctgtagaccaggctggcctcgaactcaggaatccccctgcctctgcctctgagtgctgggatcaaaggcgtgtgccactgcccggcttagattatgctttcttactggctttttttttttttctttaaattaagagtattgctgtcaggaaaatgactaccattttaagttttaaaaatcatattaaaacagcaagtttctttggagtaaattccagtttttcaacttgtagataggcagagacagtttgggcattctggagactcctgcctcctgggcactagtgttgccagctagcaagcctcctgatctgggatgggtgttagagaatcccttggcttgcccaacctttcacattaggggcaaatcttttatttttccttctcttccttcttcttggatttgagatgggggtcagacgggggtggggagggttggataggtcctcactgtatagccctggatagtgaaattgatagtgacacttgctatgtagactaggctggcctcaaactcagagatctgcctgcctctgcctctgcctctctagtgttgggatcacatttggtgcctgccccctgctgttgtgtcctggctggatactctacccagtgggctaagaactggctcactcggtcctgtcatcatgacaggtcacctgtgctgtaaagagacccctctggtcctgtctttgtcacccatctctaagcatcacagctgctgtgggctctggtccttctctgtgggagggtgatacagaagagccagtgagaggtttcctatacatagtaagcctaggtttctcaagcatgagatataagaactatcttgactttttttattgaaaaaattaaaaaactatatataatacaatgtattatataattttatataaactataatttttgtataatttaatttaaatttattatacaaatatatatttgttatataaatataatatatgcactctataatacataatctatatttatataacatgttatataatatatgtgtattatatatttatatataacatatatactatatatatagtgtgtatttatatgatatattatactacatataatatatagtatttatatcctgcatgtatgtctgtgtaccacatgtgtgcctggtgcgtatggaggtcagaaaaggccatcagatcccccgggacagggtctggatggttttgaaccaccatgtgggtgccggggaactgaacctggggcctctgcaactgccacgaatgctcttaactggtgggccaactctccagctccaactaattttaaacaaaaaacaaaaccaaaagagccagagtaggaaagttctgaggctctctgaggcactgcctcccctcggtgtatccttgagggaggaggagggtgagggttggggttggaagttggggggctgggcaccattctaatgtggcgtcccctgccggcctcttaagtctgtctgagctggtgttgatgggccatctccatttatgcttgtcgcagttttatttttagatgtccttttcttggtttctgctgtataattagcattttaaatggctgcctgatgccctgtcccctttgattttgaagtttattcattgcaccgtttttttatatcagttactaatgtctccagactgccaggcacatagcccctcccccctccttggcgtgaccctcctgctggtacctcagctgccctgtctccctcccctggcttttgtgtgtgtgtgtgggggggggggtgtcatgaaatggtgtacgggaaaatgtattattcaaggttctatgtacgtccacacagatgtgctttgttgacatggcgagactgcttttgaaccccagaccctgtacctgctgaggctttgtgattcccagtgaaaacagatgttaccctactcctgagcagctctgagtttaagtgggagggtgaagaggccaccatgggaagatgcgggaaattcaagtttcttttcccgttttccagatcaacgtccgggtgaccaccatggatgccgagctggagtttgccatccagccaaacaccaccgggaagcagctctttgatcaggtcagtctgactctgggaagggaactgaccaagcccttaggaggagtctgtaatggaccaatcctttggtcttctaagcaagttaccgtgttttgttacaagggcctttgagaaagcagaaactttcagatctgtgaagtcagatctttctggtaaatattctttgctgatagcattcacttgatgctgggctattcacagcaccactccttacccaatacaattttgtcaaatggctcagcccttcccaaagtggactagaaaacttttctagcattagcagctgcgtgtcacaagtcaacaaaccctttctgcagagggccacacagttagtctttcaggtcggaagaccatgtggtctgtgccgtctgcattgctcattctttcctctgttactgaaagcggccacaaatccatgaattgagtgaacttgatgttgtcaagtggaaactatacagggtaccgaatttttaaagggatttccccaaccttccaaaacaaaacataacaaagagaaccgaatacttagcctgtggccaccagatagtccacagaccagacttggccgccactgttgtatttagaatcctcttctgcagttcagacagatcagctttgctaatgcaagcaccgtgacaagggcacggcacagcgtatttgacacggggagtggttctcagtacatcagccctgtggtcccactcgcttttgtgaggccacagaatgtcccgtattctgtttcttaacaaaacatcaggtagccggctccagcaggcaggttcactgtagtacgctggttttctaaagcagcctttccagaatgtactacatgactatcgcataaaatggggacctgggcacctctccgtcccatcttgtggtagggctaggaaaactcttggctttttgttctcggcctaacttggtagagtaaatgggcccagacagtagcaagggtgagctgaagatgcctgggcaatcctggccagagctcacccttggcactgaggccctccgtgagggttttccaggagttgacagagcagacacatctgtgtccgcatgcctcctgaagcctgaggtaaatggtagagatgaatgagctcgttctagagcgtaggagagggtgtggggatacacgcaaggccggacatgaatcacacagcacctcacctgagagcttgccatcccaagtggccccactgcctccgggtgtggcactctgccttcaagggcccgacccgaaaatgggagccccggtgctggggaatcctgggaagggaattccagcaccttcggaggttacgcgtggtacagcccatgcttgacccagtctcttctggagagtcagggcagggtagtgccaggtggctctacagcagcagagcgtcgggtgccagggcatgcccagacctgttctgcagggcttggcgcggacctgggctgccggtcaccatggtttgaaggttgttctcttctagtgagatctcagcgattctctgctcgcggggtgaggcaggagtaaggatgaaatctaaaggtcacctcggaaaagttcccaggagaggctgtgtccccgagtcctgtgtggcaccatgttcagggcctgaggcagagcagtgtcctggctcccagcgtgggctcttgagcactacagtccctatctgcctgctttccaaagcagagcgggaaacctgtagtgtgagtggagagaggagaccatagtcacagagcaaggtggcttgctcctatctctgcagcggcctcttccctcccagtccaggctgcagcccgtcacttggctccagctggagaaccgtatggagcaagagctgggattggatgttctgtggggacaggagggatgggacagcacttcagctcctgcttggggttgactgaacctgacatccccgtccttacacttctgaagccagtcacccagacccttcctgaggcagaggtaagggccagcccccaagctgctgagacactccttgggtgaggctgagagatgaatcataggcccttgaaggcagtgggaacggacggacggacggctttacggaggcgtgggattcccctatggggaggacctgtgatctatggcaagatttcagaatgtactgagggaaggctgtggagaagcccaagctttaaacacactgaagaccattcattgggaacagtaaggagggggtggcaagtcagggcagtgggggcagcttttctcagacagcggtggccttggctgcacagcaggctcgcagactgacatgtccgtccacacagatgcagaagactctgagtggtccctggaagcctagagcagaggagaggggggccaaatggacaggcgtccttactagctggtcaggactagactgaggctgcagctgggcggatgggtggaaagagtgcattagagccagcacctgcttgctgagtgtgaaggccttccctgtgccaccttatgccaccttgataaggactggcttgcggataagaagtcggcaggagtggacacggagtcccttctgctctcggcacaaagggcatgggttacacaaggcccgggaacagaggaagaggctgcgtttccttcaccccgcactgtgataacatcttggaggtggtgtatcccctgttttgtggggtgagcagagagaggggatgaacagggcacatggcagttaataagcagagaaacaccacaggaactctgtgagaaagaatattaatctttttctaaaggtttaatattgcttgacatggcatttaaaattgtaacatctaaaatttaggacttagttctttttattttattttttttaattacgtgtgtgcacttgtgcagatgcctgcgtgtgtcagcgtgagggtgtcaggtcccctgcaggtggagttgcaggctctgtgagcctcctgacatgggtgctgggaacccacagagccagtcccctgcttctgagactccacgcagatgaccaaccagtcactgcttctccgtcctaaagaccttaactcgtgaggactgccattgcagatctttaagaacagaacacaggaagcttccctcatggtgtccttgctatggtcttagattgcaatcttagcatagctaggagaattgcatgtttctggaggtccttgacacgagaacggccaagtgccctctgcctgtcacactcttagaaccctggaaccaaccccacctgggcaccctgatgctgggcggtgtacctgggcattggtgaggtggactgttggttctgtgtgctggtcacagcctgccctgcagcctgaagtaagagcatgtgagcgggaatttatataaggtacagataagcctgagtctggccagcttgaggctaaactgtgtcatttgtgctttgacctagcatctgtgagtcacaggttagggttgagactctgcctgttccttgtaccaagaagtctctggggactgctgaacacgaggaacctcctgctggttccggtgcctgtgtttctcacggtgggcctctctcacacaggtggtaaagacgattggcctccgggaagtgtggtacttcggcctccagtatgtagacaataaaggatttcctacctggctgaaacttgataaaaaggtaagtagggttaactatttacaggctattaattgggagctggtgtgctctgtggacattgaaaccggaatgcttcaatgatgcccgtgtctttttgttccttgttatttgtgtaaagatttttgtagacagagaggctgcccgcttccaggaagagagactgtggattagattagatctcggctaattttcactcctcttcctggctcccctgttggggcaggtaatggctaactgcttcgcttttagttgaccttagtgggtttttttttccatgagattaatctagaaatcatgaatcacacaccatattgtcagaacctgccactgctttgtatgagtctgcagtaaattatctaattccaaagattatgtaactgcactcggcagtaagggagtcatcagctaagtgtagtttcttcagacccttggcaggctctgcttcattctctacctcactttctgtaaggaggatcagggtcagttcacggtccagggccagaccagcttcagggcaggtcatagcgggaaggacatggggtcattccaaatgagttctccgggattgatagcgtggtcacaagaaatgagggtgaagccagccggtttccagcagagtgtgagtgcgtcggactgactgaccacctcacaccctacagcgatgagtttcagggctagggaatgtggctgagttagaaggatgcttacctagcacgcacagggccccgtataaaccaggcatggtgggtcatgcccataatcccgggactcaggaggtggaggagggagtgccagaagttcacggccatcctccataatgcagcagtttgaagcaagcctgggattctcacatgataacatgtgtctcacatgatagcagtgataatgggatgacaactctgagtcactggtgctcaggaatggcctgaagttggcactgagaaccgtcccccgtctggcaggtctccgcacaggaggtccgaaaggagaaccctgtccagtttaaattccgggccaagttctaccccgaagacgtggccgaggaactcatccaggacatcacacagaagctcttcttcctgcaagtcaaggacgggatcctcagcgacgagatctactgccccccagagacagccgtgctcctgggctcctatgccgttcaggccaagttcggagattataacaaggaaatgcacaagtctgggtacctcagctcggagcggctgatcccccagaggtgagccgaggctggcctgggtgagcacaagcccctgtctcaggaggagggagcgagcaggagatgtgagagggagcaggtgattctgtcaaggtgaagtgctcccttaggctgggacgctgggactttccaaagtgctcactttggaatgttctcagccagcaggctcccctgatgatgaattgtgacccagccagggtaccgtgtccctttctgacttgcctgcttagctctgcctggtacacagtaacctgacctctggaaaatctgtccttactaaaggtggcaaaaagagaccccctttggaagaaaaggttatttaaaataatttttcacaacttccagcgggaatatgttctttgaaaggctaaatcttcaggtttatgctcaagaaagaaaattggaaagtagaaacaaaaagccgtgattgttctattcaaaagaacagtgagggattgaaggggtgggaggtggcttcgtggctcacatctcagcccttgaaggtgacaacagtcctgcatctctccttcccaatgtccagagtcatggaccaacacaagctcagcagggaccagtgggaggaccggatccaggtgtggcacgcggaacaccgagggatgctcaagtgagtgcctgccttttcagtgtgccttctctgggactgcaggtagctcttccagtcaggtcagccagtgttaggtcttcatgcttggtgaagtccaagatggatgactgggcttgccttggggagagggagatttcagttttgtgttttaaacaaggcctggtgttcttgcccggggaaagaaacaactcagttgaagcctcaaatgctagctagcagtaaccacccttcagtggaaggtccagtggccagcactcatttggccgagggtagcactggttgccagtgaatccgggtttctgtctcttgtggaggagctctaactaacttgattattaaagtcattatcttagtgtaatatgcactatatataatgtaagcacgggctgcagttgagaagagcagcaaagcttgagggagaggcatggggctttagaatactcaaatggagaccccagtccctgcctctggccttgtacacagcccccactacttccttgtagttagggactcggggactgtgtgccacaggggccaggagtctttgtgagttctttcttgggaaccctgattgttctgtgaatgcggaaatctgagttatccctagcaagagaataaaaagaggggaaaagcctgtctccttagaaaccagggcaaatcagtagcttcttcctgaactcacggggccgatgaatttacagggctcagaacaacacaggccctgcctgcccatcccgtatgccgtgcctcccgctctactctgcatgactggcctccatttcaagaataagcagagacttgtgtgttcaggtgtgaatgctgctaactataacacctgtgctttctttcccattagggacagtgctatgctagaatacctgaagattgcccaggacctggaaatgtatgggatcaactatttcgagatcaaaaacaagaaaggaacagacctttggcttggagtcgatgcccttggacttaacatttatgagaaagatgacaagtgagttgaagttgatcgctgattttttttttcctttcttttttaagctgtggaatagcaggcctggaaaacagaggaagtgccatgccagtcctgtgtgtgttagactgtgtggtagcatcatcttaagtggtgacctggaagttagctacttagttagatgtaccttgtacatctgttctgtaggacatgggacctgtggcaaggaaaggccccgagtgcaggactataggaccctgaccctgtgaagcagagcttggtggctcccagaggccgttccccctctatggctgttctaggctcttgcctagctagggtggactcctggctcaaggcttgtgctaatccaatcaggaacgttgataatgccaccagacactccaggattctgtaagcagccgtctgcatgtgtgaacaattagctaaatcccctgagactgcagaaggtgtccgattgcttcacagccattacgttgcctgtcaagcaaggtctgagaacagagtcgaaagagctgcctggcactgggagcctcttgtcagctgatgatgtttgtccctgagatgccttcttcccaccaagggaaatcatcccacttcagcaaaggggaggtggtcctgagcacagcatagaagaagggctctggctgaggagccgtgagacaagaatgtcccagggtctcgatgtccccgttagtaggtcttatctgggaaacctagagggaggcctagagcccaggaatgcagctgagtcccgtgaagtgtgtcaggatgtgcagctctgcttcatgtcctgtcagctccccagatctcaccctgtccccatggtctctctggagccatctaggagagtggccctgttcctagtaaaggacatatacataaagactccagttagtgaggccaggcatggtggtgcacacctttaatcccgcactcgggaagccgaggcagatagagctctgtgagttcaagtctagctagggctgcaaggtgagatcctgtctaaaatacaaacaacccatacagaacatcccaggagcccttaacccttggggaaccagaggcaaactgtggggaacttggctgcttgcttgtgtgatgcggtgttgatagagagtctgagggaactctcagagccaggccgcaggccttcctccacgcctggagtggagcctggagcctgtgagccatcaccatgcggaagagctgcctgtggagtcagaaagtcaagagagcaccgggccctgggccttgtgggggtgcatgtgggaagctgcctctgtcaaaactccatttttgaacagccagattttgtaacaagccatggcgagggctatccaaacaggtttttccagctgtaagaaacagccataggcaagaacatgctgatgtcagcccctaaccaccacagcctgcagaaatgttgcttttctttcttcttttttattccaagtaaaatttgaactgtgctctactgagcccgccccttgcctccaggcttccagtcagcagccaactgcagttctcccaattcttccttattttctcctggcagcaggaggcagctccactcccatcaccatcccctctaaagaaggcacgccctgtctgcggaggaaaagcatttaagtggacactaagtcagttaacagcacagttccctcccgtttgcagtagctgtaggagagtgttctgggctccgaggggccagagctctaggggcccgggtgttaaattgcatccttcaccaatagaactaatggtgggcattggatattcttgatacattgttaataggggtaatccgatacacaaacaaacagatatatcttatcatggcttttttgaaattaaatgggctctggctgggacatgtctcctggggacccccttttcatgctatatgtcacacagttcattgaaagcctgggtacttactgaaagcagttgtctgtcccctttctttaaccctgggcttggaaggaagagggggagataggcatacatagtgcccccacccccaccctccactggcgccatgcacacaagtccagccaggctggattatgacccctcccgacactcccataccaaaaccgacacaaaaataaatgaacttagcacacgaggttggccttggacccttagcctgtgccagcacacccgtaccagccccttgtgtcactccatcatgaagtgtgggcagcagtcctggctccaggcttcacgtctctgagagcgagcatcctggaggagccttgtggactggttggatacgacactccatcagctcggtcactgagatgcaatgcttcccccgcctagagctggcggtgtctcagatgagatgtgccttgccgtgagttgcggcatctgaactcgtcccagtgaaacaccgcagtggtctcatccttgtgattttgggctctctgttgacttttagaaagacttaggcttgcatttcccacactgtcatatttgagttttgcacagtgggtgagtgcctcagggcccccatgaagcatgtgctgttgttggtgggacggtccagccactaccgtgtctgcccctcacattgtagttggtaagtgtactgtagggagagtctacgaactggatttactgacatttccagctattggcgctaatgtccgtggatggaacttttaatagaattattactttttttttttttttttttggttgttttcgagacaaggtttctctgtgtagccctggctgtcctggaactcactctgtagaccaggctggcctcgaactcagaaatccgcctgcctctgcctcccaagtgctgggattaaaggcatgcgcagtggttaagagcactgactgctcttccagaggtcctgagttcagttcccagaaaccacatagtggctcacaatcatctgtaatgagatctgatgccctcttctggtgtgcctgaagacagctacagtgtactcatatacataaaataaataaatctttaaaaaaaaaaaaagaaatggcaatccgggggcagtcacaaacacattaactagaaggggccagtttctctctctttcctcagacctcaggattagcgcggactcatgggtatttgtgagcgatgctgctcattttgctactgaggttgtttgaggttcagcttgtagggaccttggcctggtatctgtgttgcttacatataaccccattgtgcagaggccgaccttaactctcttacatctcaagacgcctcagtcctagtctgtgcacacccagcaaccagccatctccacatagccctggttcctcttggtggtgagtcccacctctccatcatcagcctccttctcttccgcttcttcttcttcctcctcctgctgctctcctctaattcgagggcttacaagtggcctaggttaccctagaactcaccactctcctaactcagcttcccaagtgcggggattctagacacgcactgatatgtccagctcttctccccaccttctaagtaggtgacacatttggggcagtgacactatcagtcctgtgccagtcagtcttctgggtggatcccgcttatgtcacgtgtgtgatctctttttagacagggagaggaaaagagaatccctgcaggctttcattttccaactggctaagaatcaaaggaagttccctcactcagaagcgagtcacagctccctggccccggcgttctgacctcactcagaagcgagtcacagctccctagccccggcgttctgacctcactcagaagcgagtcacagctccctggccccggcgttctgatactacagttagcttatgagtggctacagattgagctttcaaagttgcaagggccgtgttggacccagcctttggaaaacagatgcctgctgaggttggacacccggcttttctaggtcagacctagcgagacctgtatagacagatgctgcaggacagagcctgggctccttggttttaggagttagagatgttgacctggcagccagccatgtggctgtgggttgagtagctctttcctggttcctagttcttctgaaatcagctcttggcgtctggggcatgtgccctaaaagtagctgcctggcatcactatgctttggctcttccctgtgagggggacaaagatagaaatggtgaccgggtcagtccgtagctatatttcaagtgtgcttagacctgtcgacaaagccatactgctgaaagttctgaatcccacggggatggtgaggtgagagaacacaccgcatctgagtgccgcgagcggtggattaagttgggtcgccactgccgtgcccacgaagccctgccatgcttaaaagccctcttgtggtcttcggaggctgccttgtgtttctgacccagcttttacttccaaagcaagagccaccctgccccaatgtgtctttagccactgaatcccacccccagactccagcctagctgttatccgcttgaagtagaacccataggaaatgacaaggtttgttttgttgttgttgtttctttttttattattgttttttagtttaggtgtgtgtatatgacagtgtgtgggtggtagagcagatgtgcctgtgcagaatccagaggccatcagttgccctgcttgatcatgctccactttcttcccttgagactgggtctgtcattgagcctggagctgatctggcggccgatgagactcggcagtcttgtctccacagccgcagtgctgggtagcgatgctttttatatgacttctgtggatttgaactctcaactcaggtttttcacacttgtgccaagaaggctcttgcccactgagccgtctcctcagcccaggacagcttttgatggcagagcttgtggtttgagagtttgtccttacttccggattgctattacttctggtaaagtgctggagagtaggctggagacacggacagcatccagccaggtgggagtgtgtgcctcgatagaatgagagccaggggtgtggaatccagccccatccctgtgcacctcatggatcagtggcttctctgtgaggaaggcccttatggaaaaaaaggcatggttttataaagcgaaaagtaacatggtacttaacactaagctggcttgtgtcacagtgggaagccgaggggcctgtgggacaggagacaaggaaacgtgttggcagcctggaactatgttgaaggtgtagttttagagctgtgagtagactctgctgacatatctgaagagagctctggctggctgacagggaattaatcagaccagaacagcagtgggggctctggccgcatgagaagctgggcagggtaggcatgtgggggaagaaggtcaaataggacaaaagagctttccgacgtaagagtcggtgacccagggtgatgccgcacagctgcctgatgctgagaactaaaacctggctgcaccatttggttgaacctgggagggttaaagactgtttaaacatggtgattttattaattatgtctcctggactcgctttgtattttaaatgaagaggtttgcttaggtctccccgtccaagaacatgtgagttacacactcacatctaaccaactgctgcttttctttttatgacctcaggttgaccccaaagatcggcttcccttggagtgagatcaggaacatctctttcaacgacaagaagtttgtcattaagcccatcgacaagaaggcacctgtaagttcaagcgtagaccgggtcatcgcttccagtctcccagccaaccgggttttcaggagaaaactgaggcttcctagtgtcccgagcacacggtgttcctctagcttccccttaatgggagctcagactccatgtgactgaccacggctgtgggaggttgctatggagaccaaatgtgtccatccaaagctcaatgatgtaattttaagtcttcatacagagaaaagggcagttctcattgaccttgaccaagtggtaataagtgcttccccaaatgacacacttctgcggtggcacacccggcttgcctaatgctcgtgtgggtagccagcccacccctgaaaccagcctgtgggtggagcttatgccagtgtctcatcggtagctggctggatgatagacaatgagaccttcaaatccaaaggaccaaaatttggctgtctgtactgccttgggtttaggagttaactgttcaaagtgtttcagagcatggtgggtccccagaggttcccctctacctcttgcttcctgtctacgatgggcagcccacctttgtcctgtggtcaccctggcctatctcatgatcttcactcaggcatgtactctgcccatgtgggcagcagagtgtgaagtaagctgaaaggaccaatgtactgtgaaactttatctgggttttcttctgtcagcatttaaacttttagttgatgttgggccagaatactgaagacagacagacacaactctagcagggtagaaatagccagaactctcttttcttggttttgtttttttaagtataatttttaaagagcttcctctggcttgtaccacagttatagattgggaaagactttgggtccccgagtcttcttgttccctagttacagtggtaagcctagagagaccagcacggactgtgtccacaccacgatgcctgctaagcctcttagggctgagaaccccttggaaatggtaaacacacttggagcactcagtgttaccaaccaaccgtcacttccccgcaagtgggccgggctgtctgtcggaactgtaaagtcagcaggtctccgcttggcttgtgaaagtattttctttattgaaatgtctcctgctgtttgtaaacccgtgactccctctccactcacacagttctttaaaattaagctgtttaatacagactcaggctccatggtaacgactcccattaatatgcagtcccaccagcagagggtcacaacaaacccatgttctgtgggcagtgaggtggcacagctagagaggcagttctgaagtaagtctggggagattgctttctgctccgtgtggagattgcttctttctttttttaaattcagcttacagaagaagtggcctttgaggctagattggtgaagaatgcatacatgtatgttggcatatattttaaatttctttggaaagccaaagactgcagacgcaatcgtggctgatctggttgaattagtgcacacgtggtctctatcaggcagccctgtgggaagcttcccttagagaaatggctgccaggaagatggttcagtcagtcaagtgcttgccctgaggctggatgccagcagttccggaaacaggtgcagttggggggcatgtgtgaccccagtgctgagggaaagtgaaaggggtatgaggctcatctgtggggctcattagccagccagtccagctggatttctgagctccaggctcgaggagacaccctgcctcaaaaaaataaggtagaaagcaacagaggaagacactgatacaccccatctccggcacacacacacacatcgcccatgcaccccaggagcctgcggcacacacacatcgcccatgcaccccaggagcctgcggcacacgcacacacatcgcccatgcaccccaggagcctgcggcacacacacatcgcccatgcaccccaggagcctgcggcacacacacacacacatcgcccatgcaccccaggagcctgcggcacacacacacacatcgcccatgcaccccaggagcctgcggcacacacacatcgcccatgcaccccaggagcccggtgttccaggactgacctgtggccacagacagtcgcagttctgcattgcggtgggaaaagcgatgagaccaggcaaagaggaggattctcagggtggatctagcaacaccctcagacgaaaagtgacgctgaggggaggagaggagggtagccgggcctctcaatgtaggcacaaacgcagaggcagcattagttcgggagctgaggggtgacaaggaggcggtgacactccatccttccccagggctgaggagtggccatgcctaatcccagtattttactttggacataagcaaaccacatttttaaggttagactataatataaaagacagcagaaaccctggaggtaagagggtgtagggtttctttcttgttgcagcctccggaagggagccctgggaatgtataaaacttctccagagggcaaggcaggaggcattgtcttccctgcccactcacggcagtctgggccctcgttctgacttttaggtgggctctccgacctcatttccctttcagctagtccaggcagccccctctcccttcagaacaataggccctaccattcccttagccctcaggggaaggcggagagctctccgtggcttttgaactgttagaagatttccggactctgtctagctgttggttctgggcagccttctcaggagcccctccgacagacccatgatggtcttggaattggactttggccttgtgggagcttcctgggagtgtgcccatcaggatttggggttcctcggggtcctctttcccttgctcttctgtctgatacttgtttttaggacacgggctgtctgtccactaagaaagcctccccttgtctctctttcgcattaaaatgctctctgaggacttgaactcacaactctaacttggagtcataactggcttctttcaaaggcataggagaaattccttcccctcacccaccccgctgctgacggctgactctggagtgttttctaaaagtttcttgtaggcagggttggggaacctcatgttaacctgtagttctgactcgagtcgctgtgactgttttttttctaaaggggagtttgtgcgtacttgtgagtctcagtgggacattttggggccgtgtgcctttgaagccatgaaatgaggttgttccttcctgtgtaataagagataggtaggcaataaaaattcctggttctcctagcgctgtggactcctccctgagaaacccaatgacttaataaccagtctgtgaaaccagaggggagccccacccaggaagttaggggttccaggaggcctcgtggagaccggaaaactaaaccaccaccgttttggggtgtgtgttactcagcggttgggaggagcacctgccacattaacttcatcttccctccagatggctggagaaaaaccaggaggcatttgcaaatagaccatgactcccctctgtaacctaagctaatcgtagaaggagcaagaagttaggagtcaagattgtctgtcatcatggtcctaaacctgtatgtactggtgacagagcttccaaataccattctctgccctcctctttgagaaagaaactgccttcgttgtgagcacgtagacagctggcccaagtagcgcctgtgtgtggcagccagggtttactgtcccaggtactgttaacacactgtcccaagccccttgggaatattttccaatttagtcttgtgacattcccattatactgttgcccttgttcggtgaccctgaggctcagtgatggagcgcaggatgcttgagggtgtgtgtggaatcgagctcagggctggtcaacatggttggtaggagtagcactgtaaggctgtggtgcatccctggctcaggaatccagagcagtggatggaggtcagggcagtctgtggcagcgtgagaggggacgggaagctcagaagttaaggtgtagcatacaggaaggaacaggaaatgacgggtggtgacaggatgaggagctggagaagcagataccaaaacatggagccagcgataaccagctctctcagtgcaagaggggcctctctaggctgagatttagcgtgtgcacacccatgctaggcacaccacacataaaccacgaatatacaagcggtgtacacacatgtacatacccagggccccctcccacttgacccactgagcgtatattctatatacagggagtgtgtgtgtgtgtgcccccccccccatggcctttggccttttaaagaaggttgagaaactcttatgaagtgccgtcttaggaaagaaggtcgtcgagggagccgaagccaaggccgctctgttctgttttgtaggactttgtgttctacgccccgcgcctgagaattaacaagcggatcctgcagctctgcatggggaaccatgagctgtacatgcgccgcaggaagcccgacaccatcgaggtgcagcagatgaaggcccaggctcgggaggagaagcaccagaagcagctagagcggtgagtggccaggacacagtgccagcagggaccgcgggcctggacagctgcatcctcaagtgtctgctcagcagcccagttgggatcaagcagggacacagacacaggctatggcatccctgtgctggtggtagcggaccagcagctgcgtttgcaggtccgagcctcacccttcccccgtgcctcttcctcttccctataccagacagcagttggaaaccgagaagaagaggcgagagacggtggagagagaaaaggagcagatgctccgggagaaggaggagctgatgcttcggctgcaggactacgagcagaagaccaagagggcggagaaaggtcggggctcctgctgcctggcctcccgcccccgcccccgcagtcactccagagttggttcccctagagagtcatggcccacagccaagagggaacttgttcaagagtgctgtctctgacacaatcccataagacagaacagagcaattgcagtgccatctttgagactagaaagcagttctgtgctttattaatgtctgtctgtgcctgtcagtaattcccccctacacacacacacacacacacacacacacacacttgctaagaatgttgaacttcagtgagatagatatcacatcccttcaacacatacacagctgtcacaaccagcttgtgacacctctaccatacatcccagggtcataggtgcagccctgccctctgaggacattttagaattagaagagagatgctgtctctactggggcatgaaagataccagcaaggccatttctgtgtcccaagtcagtgcccaggtgaagagccagggtgtcattattgaggtgcagcaggggtcagagaggtcagacctggccccaggagccaggatatctaagcagctgctcctccggggtctctggccacactgaggaaatgatcttagcagaaatgagccccgagctgtccctgctcacagcccagtgactcagtccaggactttgtgactgtgaggttggctttcacacagtctctcacttggggtgagatgggaactctaaggctcacttcctgcctgggagtctgagcagcgccgactccattttctctgcagagctctccgagcagattgagaaggccctccaactggaggaagagaggaggcgagcccaggaggaggctgaacgtctggaggccgaccgcatggccgccctgcgggccaaggaagaactcgagagacaggcgcaggatcagataaagagccaggagcagctggtagggattgcctgggtttcaagatgctgaattatagagagggctgctcctggggaatccaccaagtgacagctgcctttcaaagcttgctgtaaacagatctgtgtgtgtgtgtgtgtgtgtgtgtgtgtgtgtgtgtgtgtgtgcatgcgtgctcgagcatgtgctggacctgtctgaatcctcaggaaggtggatgtggatgcttgaggtcccagagccatggggaggtacccagagggtcccctgaccctgaagagggcggggacacagctcatcaccaggaaggccaatgttacggggaaatgttgttcaccaatggactctgccagaaggattctggacacccctttaccctcccctgcaggctgcagagctggcagagtacacggccaagatcgcactgctggaggaggcgcggaggcgcaaggaggacgaggtagaagagtggcagcaccgggtgagtgaaccccagaaaccaggcatggccgtggggtacgtcttaggagggtgcaggccacaccacaagtttcaggaacctcttaacaaccctctgcagatggcttctctgttcatgagacagaaatcccccaaggaatggccttgaccctgttcacgaggtagagcagcatgcaggcactggattagcagcagaacaaagggcccactcattccttcccctgtctgtatccccatgtcccacgctcttcagccgtgatcaaacacccttgattgggaactagttttgattctaactgcttgggtaccccctgcaatggggtcacagaccctgaagcaggatatgacagttggagtgtactggagaactttggaggtttcccgactagcgcgacagcctggactcccagatgtctcactgaacgctcacttgcctttgagcctgctccctgaggggcagcatccagtgtggtgttctgctttgtgttctttacagtgtcagtatgtagtagctggcctcttgagtcctctcagaggctgggcttccctgtgttcctgtacctccaggatgaaggtctgggtgttccacgtgtcctttgcttctaagggccctcttctgggtgtgccctgggcctacgtctcccatccgtaccttacatgttttctaacccactgcaagcagaaaacttaggattgggggaaagcgctcattgtaaaagcattagttaaagaagggtcaggctgacctagaaaggggtgcaggtggatgaggctgggtctgggcccctggctgacactcttaagagcgagatccatgcagacctactccaagtggtagcacttccagtcgctggagaacagagccgatgagcatgtacccggattacaggcagagagaaatggttgtgctctcgagtgtccagggtccggaatcttgagttttctgattgcagtgtatgtgctgtcactccagccaagagccaaggggaggcgggattccccgggctcctagccggccggcagaccgttccatgatgggatgtgtaagggtcctcacttgaccagcattctcctctccaaaggctaaagaagcccaggacgacctggtgaagaccaaagaggagctgcacctggtgatgacggccccaccgcccccaccgcccccagtgtatgagcctgtgaattaccacgtgcaggagggactgcaggacgagggagcagagcctatgggctacagtgccgagctctccagtgagggcatcctggatgaccgcaacgaggagaagcggatcacagaggcagagaagaatgagcgcgtgcagcggcagctgctggtgagtgggcagggacagcagacattatgcagggccccacccctggtgccttctcctgccctaacctaacatacccgcatatcccagtcagtccacaaggagtgaaaccctgacctcacgtggcaagcaggccaataacagataacttgcttcctgtttcagaccctgagcaatgagttgtcccaggcccgggatgagaacaagaggacccacaatgacatcatccacaacgagaacatgcggcaaggcagggacaagtataagacgctgcggcaaatcaggcagggcaacaccaagcaacgcattgacgagttcgaggccatgtagaggccaggctgggaccaagggcagagggcacctcactgcaggcaggtgtcacacttggctctttagttctcttaagtttagacacccccttgctgtgttccagtcccttaaagagcagttacggggcctgcattctgccccgagacccagtgggctcctccttggttccttctaattgtatcacatagtgccaaacaggtcagatttaatgacagttaccgaatcacttcctgtttggagcagggattcggagggctggccctcatgaagcaagattcattgtcactgggacagcactgtggctcacgggtgccatacttttctctagttttacaatgagctcaaatcgattttgttcttgatttttatgaaggatccatctctgtgtattgaggggtaaaaatgattttgaaatttgagtctaaagcatgcccccacagagtctccttcctccagaccgctggcagagtctccaggggtccttcagagtgtacggtacaggactctccgatacaaaattctcatgcttatctgttagcatacattgttggacttatatatctaatgatctgctatagaggatagtatttatatataagcgataatatgggtttgtaacattagttttaaaaaagggaaagttttgttctgtatattttgttaccttttacagaataaaagaattcaacattaagaaccatgtaaccgagacacttgatctgacacaggggcagtcgggaaaccgatgactgcagtaatcaccactgtacaaaaatgttagtgggttttgtgcacgtaaaatgcacacttccatttcctgtcagtttcttatttgaaaaaaaaaaaatacacaccgagagcatccagactccagccctgaagggacgccggcctctttattgtgagcaacttgttcccgttttcagtttgtcttccttcctttcgcggactagcctccttggttgtgatgtctgtcctgtgcgggtgactccgcaccagatttacacacaataaaagctctccaaggccttgtgtctgattgcatggggggggttggggtgggagtggggggtctctcagacttgtcctcgggattcaggaagcatgctaatcagagaggggtcttccccagctcccctgcactgggaggtttgccacccgagaggagcacacagcattcaacctacttctattttcctctgaaacaacatataacaaagctaaaaacgtggttgttaataaatgctgggagttacaggacagtgttgagcgtttattgagatcagaacatttccacatctatctgttgacagtagcctccccgactgcctgggtaacagtaattgttccgtgtcctaacgacacacattactgtagtcagttattggtgatccagtgtgtctgattctgccatgatcccacttcctgttgacctttgtgggttcgcagtcgccttgggcttcacctcagtgcaggacgagggtcatgtctgtccacaggtttgggctggagaggactctgtgccactgaagcttggactgtgaacctgagtcgggacaacccgcagcacctccctctgcaatgagagagtaggtggggggtgagggagattgccactttgtgctccctagcttttaagaagcaagtacccaggaggagacttcctaagagacaccccacccttgcacaggcagcatcacccccaaagcctagggtcccacgctctaaatcaaaggttcccaacttgtgggtcaggaccccctttgggggccaaatggccttctcacaggggccgcctgagaccactgtaaggcagatttagatgcatagacattacagttcataacaccagcaaaattactgatacgaagtggcaataaaatacggttgggggctgccacaacatgaggaactgaattagagggtcacagttaggaaggttgagagccactgctctaaagcaaagggaggtggactcaggcattcagttcttcccagtgagtcatagaagttaattctgagactggaggtggtctgagggtcctgtttttttcaaggaagggatttctgggaggacttatttgcttcgaagacatttgcattccaaggaatgcaccctccagtcttgtttagtaattctcagctggcagtcattgaggagacctgcgcaggcaacggggaggtcttacactgtgtaggagagccctgctgagagctgaacctgcccacgcccagtaggagactggccatacaatgtcagccacctcctggtaagccacagtgaatggcgcccttgtccgttccccttgatcatgctcttccaggtgtatgcttgtctgggttcagatattttccttacgaaaataatcctcttatgattgacacgaggaacaaaagcaaacactgtcccttgcctgttgtgaggccccgaagcttttgtttctttagctgagccaaatctgattgaaattgctgaaatacttggctgtattatcactctcttgcagagttagacctcgacttggggattcccattaggacagggcagggcagggcagtttcaaagccagctgaattgtttccacttcagaagtagggattcgtgtcaggcaatcactaagggcataaaacctgtggtttttcactgaacctcagagacagacccacaaaaagtgaacagacttacttgaaccaagcctggcttccccgagcagacggtcgttcataccaaagatggcctggtcccagacagtcagctccaaggtggactgtctcagctgagaactgctcacaccattaaacacaaaggagtgtttccactggggacaagcctgcttcttcaggactggggacttcacacgcagcttttgttggtttggcagggtgagacagctgaagagggaaatgggaaccctgaagccacagttgagtgtgtaacctccttccccaccagcccccattctgtatgctgatctaggttagacccccaagcctgtccatgtgccttctccctacaaagttcccattttcctttaaagctgggtatttaggctgagttggaattctatggcatatggtcctcagtgtgatcgcctcatggccatgccaccattaaagctaatgaatgcctagggaccaaggctctgtatatacatggcttcattgtgccccattctcaggtaaatacgttcagaaaataaaaacttgccgcagggcacacacagtttttcaatgcttcagtgactgggaggttgcccctctatgattattcgtgttttcttttgaggacacaagtgtgcttgtggtgactaagaatagccaagagtgaccatatggtacttagtacaagaggaggtgccgagctagggaaatggttaacagatttcaaaaccaatggctgatatttcaagaagtgataaggtctaggtttctggtcaaagtgtgtcattcctagccaagcctcataaccaaaaccaatttcttggaagttgtggtccttaaaaacatgctacattccatttctttttaatctctttaggttttataatctattttgtgcgtgtagcaataagaactagtgagcatgttggtcacagcataactagcaggagttggttccctccgctgtgtggttggttccagaggactggactccatcaggctgggcgagtgctttcaccctgggggccttctcacccaccctcttttagattttcataggaaagctaaaataagatgaatccaaatggcctatccttttcagtggcctatccttttcagctttggggccatgttcaatacatactcaccaacacatctgatacctaccccttaacaaatgagtttaaggtgccatctgacctcaccggtaaattcttggctcccaacacaaccagacacagttgaccattaagcgctagctgacctgttcgggaaggaaagccagaactggggttaagccgatttatgtgtgcgtgtgcagcatcaacacccagaagacggtagccccctgagaagccgtagcctccaggcttgcagaagaggcactactcccacagctccaccggctttgcccacacactgcctttagtccacagcatgcagacagaagggaaacatatgtaaaaatgccaggacagtgccatgacacagagaacttggggaaggcaggggtgaagggtctcagggggtagggggtgtgcaagctgactgtagcttgggtttgagaaaggagcaataaactgctgttctgttgtgttcctgaccctgggaggttggatcagaatgtcctactcctgccaaggtcaccgcactgcccttgtcattctgagctctctgcatccttctctactctcatagcacgtgcagaccttgcattatctaagttaaataccggaagctatgcccttgacccactccatccccatctcgctgagcctccagctcctagtgccccagaagccctcttggttcccaaagagccaagctgacccctggatgcctgcttttatctacagggccaccagagactggcagtctacaccttagagaggatgaggtgtgcactgaaggccttgtccttctgctcacctatgctcccttgagtcacgagctccagtgtgaaggatcagtggagctgtgggaaatcgtttgcctaactcaaactctctgccctccaggctttggggacagtgacacagacagacgttcatggggctttaggtcaccaaccttcttgggcctcctggggctttcttggccctgcgggaaggaccaatttggctcgaacagcaagttctccattattctgaggaatattctcttcgtatttctcagcctatgggcgagaggcggaggtcagaagcgggacccctcccatggtacctcagagccacccaactccgtccataaatgccccaacccccacagaccctctcaaggcctaggggtggggtgggtacacttgtagactaccaatactgcctatactgccacctatactgcctatactgccacccctgccaccctcacccctcagcaagggaggaccaatttaccccttcagaacgtcagaagccaccgggaacagcaagcctccaggaggcctggacaacattggcttgaggacaatcaaaaccccatttaccagctcactctcagaaagactggagctacccttccatgccaatgtccccttcgggcactgagggcagaaagcactgaagacttgtgtctgaagtcataggcgatagaactctgtaggccgtggatgtctagcccctgtagagacaccattcgatctacagaaatggcttctctggtcatgagtgattttgtcaaaaagtggatgaaaagcccagagaggggatgattctgagtctgatggatcttccatctcagttgtgaggaagtctactgggagggaaatgcatgcctgacactatcagaagagagaagctgccctcagggctcccacactcctggaagcctgcatgggccagctgccaccttcacagaagcatccaacagggtaccaactgggtcagggaccctcaaggtctaggaaccaagtcccagtccctgaatgtcccatggccggagctccgtggcaggcctgtggacattcactccctgttcaataatgctactctcggccggcatcaggtagggtgacttcagcttggcactctactgctagcctattcaccaaaggaggctgagtggggtgcccatggatgtcctagccaggttcatgctgccaatggggcgggggcagggtagaacatgagttgctcacggtgactgggcatgctcagcccctatggtagtttgagtggaaaaaatgtcactccactggttcaggaatttaaacacttggtcctcggtggtacagtttggggaggttacagaacactgggaacgtggaaccttgtttgaggacgaagagtgtcacctggggtgcgctatgagagtgtggaccctcagcccacttctagtttgcccgctctgctttccgtgtgcccttgagatgtgatctccgggcttcatgcccctgctgtttactgccatggctccccaccatggtggactgactatctctgtagaatcaaacacaacaaactcttttcttctggtcaaagggttttatcacagccacagaaaagtaacaaaaagacacaccttggcccgcagaggataccatctggcattctgtgccgtactgtccttaaagtcccacatggccagtggaaggatcacttctccgaggaacaccctccgggcaagggtgcctaggtgccacacagagacctgcagcctccgggtcatcagctggccagggtccacctgatactgcatatgcaaggacaaggttgttagccaggtctcctagaaccacccccaggcctgcacaggctgagccctgagactcgactgcagccagagtccagatgtagccagggtggcccaagccatttggatccagtggtcaagatggacctctttgtctgcttgccaaacagcttggatccccccatagccctgtcctcagcccttcccacccctagtcccaccagatgccctttcctatttctcagaatgaggccaggatggaggtctttgcctagtcaggattgctggcaatcaaaccaagaactgtgtcaacacaggatttgcccttccacgaggccaccctgcaccaagccaggattagcccaagatactaaagctcagacttgatttctaaaaatgaagtgggcccaagatcaatccccagcaaccacatagtggctcacaaccatctgtaatggagtctgatgtcctcttctggtgtgtctgaagacaactacagtctactcatataaataaaatcataaacaactttttaaaaatgcagtgggaccataactagatataaaagacatgtttgacactcatcaaatcctaggatctgtccccagtaccacagtaaaaaaaataaataaataagcaatcaaacaattaaatccatcctcagtaccacaataaataagcaaatgaatgaatgaatgaatgaatgagtgaataaatgaacaagtgaatgaatgaatgagtgagcgaatgaatgattgagtgaatgaatgaatgagtgagcaaatgaatgagtgagtgagtgagtgagtgagtgagtgagtgagtgagtgagtgagtgagtgagtgaatgaatgagctttcatgccaatatgtttaccctggatagaaatgtatgtgagaagaaagtgggaacagagatcaggactgtaggtgacacacagcccttctgcaggctgtgccaccacttggggcactctgcctcagcctctgagaacctagattccagttttcacatcgtgacttttccgacaatgaaatcaaagggcgagctgctggggccctcgtcttgtaccatgcatctttggcctccacaagcacaagtgaggtcaagaccatgaatcattcattgaaggagggtgtggtcctcagcctggaaacaatcagcggtgggtgggactgccacccacacgtccaaccctgacctcccagggttgacctttgcaccacgctgcctactctactgcgcgtgcacgtgagtgcgcgctctagttggattttgtggcctcttttccactctccacacttctttttctttgagggacaagatggtaaggagacagaaactagaacactgtctgcatttgcagacagagaggggtggtagtgacaggtgctggccccttctggctggccttctcttctctctgggatctatgtggctatgtgggtctagtcactcttaggccatgttcccactccacagcccttggcaatctcgtcctgtaactcactatgtagaccacgctagccttggactcccagaagtcatttgtctttgccccacgtgctgggagtaaaggtctgtgtcactgagctggccccctgctccatatctctgtcagccgaccaaccatatcaccctactaactcagccttcctcctccttcattagtcagttaagccctgaccgcagagctgtgcttgctgccctgccctagctattccacaaagagctagctacaggggccatggtagaatggggccacagtgtcgcctgagggccattccccaagcgctcactgtgaaggcgtttgttggactccctgagacaccgaggcatttcctggatccccaatggctactcgcccctatctgatgaacgggcttctctcccccagtagcttaacttactggtcagacaagaactagcttccattgtgtgatgctctccaaagcccacaccagtggcctgaagctgctatagactatggggtctgacatcatcagagaacaagagcagacaaggaccaaacactccaatctactgtctctgtcccctcagattcctgttctgagagtctcaaaggaagtagaaacctccctggaacccagaggagaccccaagaaacattctgcccagaaaactgtgacaattgaaatatcagaggctcaacttgtgtgtgtgtgtgtgtgtgtttgtatgactgcgtgtatgtgcactgagtacagtatgtgtatacagtgtgttggggggtgtatagtatatgatgtatgcaatatgtctgtggtatgtctgtgtgttgcagtatatatttgtgtaggtgtgtaatgtgtgtgtggtgtgggggtgggtgggtatagtgtatgatgtatatagtatgtctgtgtgttgcagtgtgtatttgtgtaggtgtgtaatgtgtgtgtggtgtgggggtgggtgggtatagtgtatgatgtatatagtatgtctgtgttttgctagtgtgtatttgtgtaggtgtgtaatgtgtgtgtggtggggtacccgagtccgatatacagtaa

SEQ ID NO: 552 - DNA, 2693 bp, Mus musculus
ggtcccgacgcgtctccgccgtcgccgtcgccgtcgccgtccgccgtacagccgaatagccgaggacccacgcagagccaccaaccagccaagatgcccaagccaatcaacgtccgggtgaccaccatggatgccgagctggagtttgccatccagccaaacaccaccgggaagcagctctttgatcaggtggtaaagacgattggcctccgggaagtgtggtacttcggcctccagtatgtagacaataaaggatttcctacctggctgaaacttgataaaaaggtctccgcacaggaggtccgaaaggagaaccctgtccagtttaaattccgggccaagttctaccccgaagacgtggccgaggaactcatccaggacatcacacagaagctcttcttcctgcaagtcaaggacgggatcctcagcgacgagatctactgccccccagagacagccgtgctcctgggctcctatgccgttcaggccaagttcggagattataacaaggaaatgcacaagtctgggtacctcagctcggagcggctgatcccccagagagtcatggaccaacacaagctcagcagggaccagtgggaggaccggatccaggtgtggcacgcggaacaccgagggatgctcaaggacagtgctatgctagaatacctgaagattgcccaggacctggaaatgtatgggatcaactatttcgagatcaaaaacaagaaaggaacagacctttggcttggagtcgatgcccttggacttaacatttatgagaaagatgacaagttgaccccaaagatcggcttcccttggagtgagatcaggaacatctctttcaacgacaagaagtttgtcattaagcccatcgacaagaaggcacctgactttgtgttctacgccccgcgcctgagaattaacaagcggatcctgcagctctgcatggggaaccatgagctgtacatgcgccgcaggaagcccgacaccatcgaggtgcagcagatgaaggcccaggctcgggaggagaagcaccagaagcagctagagcgacagcagttggaaaccgagaagaagaggcgagagacggtggagagagaaaaggagcagatgctccgggagaaggaggagctgatgcttcggctgcaggactacgagcagaagaccaagagggcggagaaagagctctccgagcagattgagaaggccctccaactggaggaagagaggaggcgagcccaggaggaggctgaacgtctggaggccgaccgcatggccgccctgcgggccaaggaagaactcgagagacaggcgcaggatcagataaagagccaggagcagctggctgcagagctggcagagtacacggccaagatcgcactgctggaggaggcgcggaggcgcaaggaggacgaggtagaagagtggcagcaccgggctaaagaagcccaggacgacctggtgaagaccaaagaggagctgcacctggtgatgacggccccaccgcccccaccgcccccagtgtatgagcctgtgaattaccacgtgcaggagggactgcaggacgagggagcagagcctatgggctacagtgccgagctctccagtgagggcatcctggatgaccgcaacgaggagaagcggatcacagaggcagagaagaatgagcgcgtgcagcggcagctgctgaccctgagcaatgagttgtcccaggcccgggatgagaacaagaggacccacaatgacatcatccacaacgagaacatgcggcaaggcagggacaagtataagacgctgcggcaaatcaggcagggcaacaccaagcaacgcattgacgagttcgaggccatgtagaggccaggctgggaccaagggcagagggcacctcactgcaggcaggtgtcacacttggctctttagttctcttaagtttagacacccccttgctgtgttccagtcccttaaagagcagttacggggcctgcattctgccccgagacccagtgggctcctccttggttccttctaattgtatcacatagtgccaaacaggtcagatttaatgacagttaccgaatcacttcctgtttggagcagggattcggagggctggccctcatgaagcaagattcattgtcactgggacagcactgtggctcacgggtgccatacttttctctagttttacaatgagctcaaatcgattttgttcttgatttttatgaaggatccatctctgtgtattgaggggtaaaaatgattttgaaatttgagtctaaagcatgcccccacagagtctccttcctccagaccgctggcagagtctccaggggtccttcagagtgtacggtacaggactctccgatacaaaattctcatgcttatctgttagcatacattgttggacttatatatctaatgatctgctatagaggatagtatttatatataagcgataatatgggtttgtaacattagttttaaaaaagggaaagttttgttctgtatattttgttaccttttacagaataaaagaattcaacattaagaaccatgtaaccgagacacttgatctgacacaggggcagtcgggaaaccgatgactgcagtaatcaccactgtacaaaaatgttagtgggttttgtgcacgtaaaatgcacacttccatttcctgtcagtttcttatttgaaaa

SEQ ID NO: 553 - protein, 611 aa, Mus musculus
GPDDPSPSPSPSAVQPNSRGPTQSHQPAKMPKPINVRVTTMDAELEFAIQPNTTGKQLFDQVVKTIGLREVWYFGLQYVDNKGFPTWLKLDKKVSAQEVRKENPVQFKFRAKFYPEDVAEELIQDITQKLFFLQVKDGILSDEIYCPPETAVLLGSYAVQAKFGDYNKEMHKSGYLSSLIPQRVMDQHKLSRDQWEDRIQVWHAEHRGMLKDSAMLEYLKIAQDLEMYGINYFEIKNKKGTDLWLGVDALQIYEKDDKLTPKIGFPWSEIRNISFNDKKFVIKPIDKKAPDFVFYAPRLRINKRILQLCMGNHELYMRRRKPDTIEVQQMKAQAREEKHQKQLERQQLETEKKRRETVEREKEQMLREKEELMLRLQDYEQKTKRAEKELSEQIEKALQLEEERRRAQEEAERLEADRMAALRAKEELERQAQDQIKSQEQLAAELAEYTAKIALLEEARRRKEDEVEEWQHRAKEAQDDLVKTKEELHLVMTAPPPPPPPVYEPVNYHVQEGLQDEGAEPMGYSAELSSEGILDDRNEEKRITEAEKNERVQRQLLTLSNELSQARDENKRTHNDIIHNENMRQGRDKYKTLRQIRQGNTKQRIDEFEAM

SEQ ID NO: 554 - DNA, 73930 bp, Homo sapiens
  misc_feature (1)...(73930): n = A,T,C or G
atttttttttaattaaagaaaatatttcaagtgccaattatctagtttacatgtcaaatctctgggatccggacatctaaatgcttagtgagacattgtcttcactacagaaaacacatggggctcagttttcaattcagttcgatcaatatttactgagcccctatgatgtgcaaggctctatgctaggtacttgagataccaagaccagtagtcactggtctcacctttgaggaactcacagtttgagcagaggacaatccaaatgactgataaccacctgtgtcgtgccgggcatttcagcacatactgctttattaaggtagcctttcataagaaaaaaaagaaggaagcggaaagaaataaaaaatcaggatgatttaaaaataattcgtttatattctgcaattaaacacctaattaataacatctaatttatttaggaaattgtttcatgtttttggtttttttctttttttgagacaggtctcactcggtcacccaggctggagtgcagtggcatgacctcagctcactccagcctttacctcccaggctcaggtgatcctcccgcctcagccttctgagtagctgggaccacagaagcgccccatcatgcctaggtaattttgtatttttagtagagatgaggtttcaccatgttgcccaggctggtcttgaactcctgggctcaagtaatcctcctcttgcctcagcttcccacagtgctgggattacaggagggagtcacacccagccacatttttttttttttttcatataaaacattaacccttggccaggagcggtggctgacgcctgtaatcccagcactttcggaggccaaggcgggcagatcacctgaggtccggagttcgagaccagtctgaccaacgtggagaaaccccgtctctactaaaaatacaaaattagccgggcatggtggcgcatgcctgtaatcccagctactccggaaactgaggcaggagaatggcttgaacccaggagccggaggttgctgcgagctgagattgtgccattgcactccagcctgggcaacaagagcgaaactccatctcaaaaaacaaacaaacaaacaaacaaacaaaattaacccttgcatagaggaaacccagcaactttagaacattgattgttcctgcggagggctagagaggctttaatttatctatcgcattttatttctttttctttttttcttttttttaagacagagttttgctcttgttgcccaggctggagagcaatggcgcgattttgactcactgcaacctccacctcctggattcaagcaattctcctgcctcagcctcccgagtagctgggattacaagcatgcactaccatgcccggctaattttgtattttttttctgtagagacggggtttctccatgttggtcagcctggtctcgaactcttcacctcaggtgatctgcctgcctctgcctcccaaagtgctgggattacaggtgtgagccaccacacccggccgttatttcttttttttaaaaacctgaaactaatgggataaaataacaccatttgttaaattgagatagttgtctattgaattaactcctgaagatttaaaacatttcaccattttttaaacattacaaaataacatgttttatgataatagagagcagacatagctccctttcctgagaaaacaatcaccaggaacaccaatcaatgccctcgggcttccgggctgtccttctgagttgcctgctctgtacaattcctgcctcttcaccatcaagcattgcttcttactgctgtcagtgtgtctgcctgcaccctgcaccctctctgctaatctgccatggcctcggaaaggaactaataaaacttagactcacaatgaaaacaggaattaatacactttaggggaaacccagagaaattctaaaaacatgaattctggttttttttgttttttttttttttaacatctggttttcgatggtgttttggacagctgggctgctaaataagacttcaagtaaggtgtttccatggttagcaacccagtggacagcagtatgatacacaggaaggaaaacttaccagagtaccccggttctggaactaacaggatttgttcattcatttattcaacagatatttattgaacagctaccacacaccagacactgttttagttgctgagggtccatcgacaaacaaacaagactgagaggagcttcaactcttgtggggagcccaaggtgggtggatcccctgagctcaggagttcaaaaccagcctgggccacatggtgaaatcccatctcgacaaaaaatacaaaaattagcctggtgtggtgtcatatacctgtagtcccaggtacttgaggggctgaggtgggagtatcacttgagctcaggatgtcgaggctgcaggaaactgtgttcacaccaccaccactacactccagcctggacaacaatgaaagtgagactctgtctcaaaaaacaaaaacaaaacacaatggggaagctgaggcaggaggactgcttgaggccagttcaagaccaatctgagcaacatagtgagacccctgtctctaaaaataaataaataaataaataaattagctgggcgtgatggcacgcacctgtggtcccagctactcaaaaggccaacgcaggaggatcgcttgagtctgggaggttcacgttgcagtgagccatgatcttcatgatctcaccactgaactccagcctgcacaatggagtgagaccctgtctcaaatcagaaaaaaaaaaaaaaaacacaaaccaaggaagagaattgcagagtcaagttctctgaaggcagtgaatcgggtgaagtggcggggcaccagagggtggctcttcagatggcaggggcagcaggggacagtggctgggaagtgctcttagaggaggaggcactgctgcaaagacctggaggatgagaaaaggccaggctggcacagatgggggacatgccttccaggccgtgggaatatgaagcacaagacctctaaggcagcaacggggctgagtgatcacagataaaaaaatcagcagcgggagcagagccagctgagctcaagctcagggcgagtgagagtgagggaaagaagacgcagctggagatgccgatgcactcccggccaaggaggagtttgaattttatccccaaacccaggcgtgcaccatctgacctagccgggaaatgtggctgtttggtctgctggactggaggcacaggggtgaaggataaaatggggttgaggcaaaaagagaatgcaggttacctctaggtttggggccatgtaacagcgtgtgtggtggagctctttgctgagaacagggaggctaggagggaggaagttcttgaacaaacaagaaccctggagacaccaatagacggttgttgctgggggaaaaggcagggctggggacgtgactgaagccttgggatcaggctacatgacctaggggaagaattcgtacatagataagggctgggaaggacccagaggggaagagaagagaaagcacagaaatcctaaacacaaaatatgctcagggaatggttggacatgtggaaagctgcttaggagaagggtcagatgaggccaagaggtttggcctctggattcagcaagatggaggtaatgttaatattgacaagagaagtttaagtgcaggaatgaggacaatcagtttaatcttttggggcccggttcctctgtcaaatgagagtatccgaatagaggaggtttaagcttccaactaccccattatgccacatacttttttttcaaaaaacggggaaagaggccaagctgggtggctcatgcctttaatcccagcactttggaggccaaggcgggcagattgcttgagctcatgagttcgaggccagcctgggcaacatggcaaaaccttgtgtctacaaataatacaaaaattagctggtggtggcgcatgcctgtagtcctagttacttgagaggctgaggtgggaggttggcttgagcccagcaggctgaagttgcagtgagcccagactgtgctgctgcactccaggctgggtgacagagccagaccttgtctcaaaaacaaaagggggcaagtgtgggtgggggaacaaaacaatgatcaaggataagaaatcataataggctgggccggtggctcacgcctgtaatcctagcgctttgggaggctgaggtgggtggatcacctgaggttgggagttcaagacccgcctgaccaacatggagaaacccccgtctctactaaaaaaaaagaaaagaaatcataataaagaaagctgtcctatttgggagtttattagtcaaacaggttgtgtgatcatcagtacttgttctttttttttttttttttttttttttggtagagacagggtgtccttctgttgaccaggctgctctcaaactcctgggcttaagtgatcctcccacctctgcatcccaaactgttggaattacaggtttgagccattgtgcccagccactagttctcttttacacagaagttattaaggatatttgtgcaaattattaaataagccaaggaaacaattaaaatagaacagttagtggccagaattcttcttagcagacccaaattatgtaagttgtgccatcaaaacagtaccaagacactcttcaaaacagtaccaagacactcttcaaaacagtaccaagacactcttcctagcttagtatactataaagatccttaaacattttttttttttaaattgagacagagtcttgctctgtcatccagactggagcgcaatggtgccatctcagctcactgcaacctccacctcctgggttcaagggattctcgtgcctcagcctcccaagtagctgggattacaggcacgtgccaccacactcagttgattttgtattttgagtagagatggggtttcactatgttggccgggctggtcttgaattcctgacctcaggtgatctgtcctccttggtctcccaaagtgctgggattacaggcgtgagccactgagcctggccttaaatattccttctgaatacaacgtatttggactccaccgaacggccatttatcagcttgtctgagtccttagttgttcctgtgcttgctcacccactctgaaaggattggtcacccttcccaaagtcaaaaaggaatgttagatgatattaggaatttgcatgccaagttcatagaactttatgattccatgaaatgtttctctgtagctatcatctcagccaatgaaatgcttactgtcttttttttttcttaaataaacatttcaggccaggtacagtggctcccacctgtaattccgacactttgggaggctgaggtgggtggatcacctgaggagttcaagaccggcctgggtaacatggtgaaaccccatccctacaaaaaatacaaaaactagcccagtgtggtggcgtcgcctatagtcccagctacttgggtgaggtgtggggatctcttgagcctgggaggtggaggttgcagtgagcagagatcacaccactgcactccagcctgggtgacagagtgagatcctgtctcaaaaataaataaaatacaataaaataaaaatttcagaccaataaagaggtaggaaggaggctataaaggaaacccgtggactaccaggcaccttagtcaagtattaccaagacagtggaaacctctatgcttctctcactgtgtcatcgccctatcctccagatttagtcaccgtcttgcattttcccccaaggttattaagggtggaaaataaccccaatccttgttttgccaagagtactctttatgtatttccccactgcctactgactgttcttttgaagtgactacagctagatagagctttggtcacttttttgttactggttgagattaacccggcaccagtgtggagacaggctccaaggtgatttgatagaaatctcctgtatcagtggatgtgactgttctgggtacaatggttctagtccgtgacactgttctgagcttccgggagggctgcccttcctcactttagttttaaccttgtctgaagaactcccaggaaattaccaacagcccttcaccaggctcaagaggcagacttaggattacccttctctagctgaaaaactggaaaatggaaacccggcaatgaagggtcattcaaggtcttatacctaaactaacagcagggaagtttccagtagtcctggctccagtgtttcctcacttccttccaaggcactgagtatcatatattaacaaaaggatgactttcaaacacaaggaacagcttcacaaatgagggctaaaaggagaggcaagtgaaatatgcgtcaaggtcctgccacatcctaagtcagttgttctcaaattgtggtgtacatcatcaaaaccacgtggggacttgttaaagaaacagattcccaggggctgcctgagacttagtcttagtgagccataagtcctggagaagggcactatgagtgattctaatgcatattcaagtttcaacacagctggagttgagtcttctgtgtgtgtgctgggggcaggggtttaggttccaaaccctgatgaaaataaattacccttagaaaatcttaaaacattcataagatacactgtaagtgtttccttggtgggcagaacagtacagtaacatgtaaatgctatgtgtcatacttacagtaatgtaagatacatgataaggaatgcatgtacaaatatgacgttatactattttaacttatgtaagaaagattatatagcatccctctgtatccacaggggattggttccaagacctctgaggataccaaaattctccaatgatcaagttcctgacataaaagggtacagtatttgcatataatgtacaaaatcctcctgtatatcttaaatcatctccagattacttataatatgtaatataatgtaaatacttgttatactatattctgtattggatttttattggtattttaattgtagtattatttttattttttattttccaaatcttttccatccaaggttggctgattccatgaatgtagaacctacaaatacagagggctaattgtacataaaagttgagtgagtcaaatgctcatatgatatgattcagtgacacaagaataccatgaaatacatattatcctttccattttacagatgaagagatggatgctcagtcaggttgacagacttgcccgaacggaccaggttggtcagtttgcaggaagcagaattcagacttagctctgtttgcctcaaaaacctgccatcgtttcatttttattttattttatttattttttgagacagagtttcgctgttgttgcccaggctagaatgcaatggtgcgatctcagctcactgcaacctctgcctcacggttggtttcaagtgattctcctgcctcaggctcccgagtagctggggttacaggcgtgcaccaccatgcccatctaattttttgtatttttagtagagatggggtttccccacgttggccaggctggtctcgaactcctgacctcaggtgatctgctcgcctcagcctcccaaagtgctgggattacaggcttgaatcatcgcacctggccgtttcatttttaccacactgccacaggccacttcattttttggcattcccctaaagggtcaagttcagaaatgctcttcaaggtcttggggcaccgctatttcaaacattcaatttagaagacagtatacttcaaatggagcgagataaaaattagattagaggcatatcctattatgagagttgggaacccaaactggctaaccaggctccaggcagtgataaggcagtggaggtattgatgtccagttggaaacattatcagtgcaggtaatttaaatatctttcatagttttctttctactgcagttaccattatatcttcattttatttatttatttatttatttttgagacggagtttcactcttgttgcccaggctggagtgcaatggtgcgatcttagctcactgcaagctctgcctcccggggtcacaccatttctctnnnnnnnnnnnnnnnnnnnnnnnnnnnnnnnnnnnnnnnnnnnnnnnnnnnnnnnnnnnnnnnnnnnnnnnnnnnnnnnnnnnnnnnnnnnnnnnnnnnnnnnnnnnnnnnnnnnnnnnnnnnnnnnnnnnnnnnnnnnnnnnnnnnnnnnnnnnnnnnnnnnnnnnnnnnnnnnnnnnnnnnnnnnnnnnnnnnnnnnnnnnnnnnnnnnnnnnnnnnnnnnnnnnnnnnnnnnnnnnnnnnnnnnnnnnnnnnnnnnnnnnnnnnnnnnnnnnnnnnnnnnnnnnnnnnnnnnnnnnnnnnnnnnnnnnnnnnnnnnnnnnnnnnnnnnnnnnnnnnnnnnnnnnnnnnnnnnnnnnnnnnnnnnnnnnnnnnnnnnnnnnnnnnnnnnnnnnnnnnnnnnnnnnnnnnnnnnnnnnnnnnnnnnnnnnnnnnnnnnnnnnnnnnnnnnnnnaaaatacaaaaatttagctgggcttggtggcgggtgtctgtaatcccagctactcaagaggctgaggcaggagaattgcttgaacctgggagatggaggttgcaatgagctgagattgcgccaatgcactccagcctgggcaagaagagcaaaactccgtctaaaaaaaaaagggaaagaaaagttcagtctttcagagggaatacacttacctgaatagaggtcaaaatctcagaagaggcctccctcctctctctgacctctgaaatgccctggatctgcaagtgggagataacaggccctgacaaagggttgcccaaacagcagtgtgtccctaggaagacaggttaagcatcaattactatgaggctagcacgagttaagcattccgcatgcacgatctcatttaatccttacaagtctatgtaggtggggctactagtatgttcactcaacaaattgggaaacagagtttggaacttcgcccaaagtcattggtttctctttctaccaggatagatttaagtgcttactaagtgtcaggtactgttcaggcatcgtacatgtactaactcattatcctcattagaaccctctgatacaggtgccataattatgccgctttacaaacaagaaaactaaaagcagaaagggaggagtaaacccaggagaggaattcaggagaagctctggtctcaacctttagccaacatcacaatcacccgaagggcttgtaacacactgattgctgggctcagccctagagtttctgaatcctaaggctgagcaacacctaatttccacttatgcaagttcccagtgaatgctgttgctgctcgtctggaagccagacgttgagaaccccttctagagtgagctctcccgcagcaaattctactggcccccaaagtatgtgttttgtgtgtcttaaaaatttgttgagaaccattagcaaaaaaacaaacaaaaaaacttaattcctagaatttcagagaaatcccatggagctttttgccagtcacgtcaaaagaggccacaaacgtgccacttaaccagagcttcggaaaggcggcggctgggccggccacgtgcaccgagactcggggccaggtgcagccgccccagggccgaggcctcggaactggcccccggtcccggccccaagcggtccagcgattcccccaagccgtccgcccctccagatttatttacgttttcctgacttccccctgcccgctgtgggacaaacagcctccccacttgcatctgcgaggggagtagcgcgcacttccgccaagttccgcccccacccagcccgaggcccggctgccgccatcttgcggggggcgcacctcacaggtcgggagctgggcgggaaggggcgtggtcccgggacccgccgcgccggggcttttgggagcgcgggcagcgagcgcactcggcggacgcaagggcggcggggagcacacggagcactgcaggcgccgggtgaggcgtgcggcggccggggtcgggacgggggttctgggcggggggttcctggtggagggcccgggcgggcggcggggttcggcggcaggtgcggcgggcagcctagggggcgcggcgcggggttctcgcccggcacccccggggcaggtggagctgagccggcccgcggccccgcgaccttcccctcggcgccgggtcccctcaggtctctcccgaaggaaacgcggagcctgggtgcctgggcgccgtccctcggcggctcccgagcggttgcagtttttgaaagagtttctcaaaggcttgacggttgtgactgcagccgcggggcaacggttgctacacaaagtgaaacttgccgagtgctcggcttctcacgggcttcctggcagccccgggaagttcctcggcggaccccgagcccgcgccccctctccacggatccctccccagcgagtgcccccccgcccgccctgtgccccctctcccctgacccctccctgtcgggtgccccgcgggctcgcgctggctgtcccgggactccttcctcctaggtgttcctcctgcccctcgccctctctctcccaggcgcgcgctccctctccccgggcctttccccgccgggtatccctgggcccgcgccccctcttctccgcctctctccgctgggtgcacctcgagtgtcccccagacccctccccgcccggccggcgctctctcccctgaccctcctggccgagtgttccccggggcccgcgccccctccccccgatcctccccactgagtgttccccctgccctctctctcccgggcctgcgccccccaccagccccttcatgctgggggtcccctgggtgcgcaccccctctcctcggacccacccccaactggggggcacctccagtgcccgccggctgccccttgggcgcgcgcccccgctctcgggcgcctcctcgccgggggcccggcccggccccgccccgcccgtgccccctccccatgcccgcagtgctgggcggggcgctgactcacccgggcccgggctggccggttcttaagcggcagcgcgctgcgggcgccgagtgtcgggcgcggcaggaggacgaggcagggcgggcgggcgctctaagggttctgctctgactccaggttgggacagcgtcttcgctgctgctggatagtcgtgttttcggggatcgaggatactcaccagaaaccgaaaatgccgaaaccagtaagttgcccagtttctgggccgggcggacgggagaggcttcattggagaggggaggcacctgctcgaggtgttggggcagttcctggggaacagggttcttctcacacgcagaagacgataggaataggaggaggttttcgccgctctttgttacttgttgacccttttgtggagcgttaggaaaacaccattttgatgcttttctctgcagtctttttctttgtgagccccctccccagtagttacggtcttttctaaaaactagaggcctttttacactgcttccgtctgtttttaaagggtatagtaatacaacttagaagtttcttaaaaagtccaaatcacagggagactcagatggcttccgaccacacacaccagttctcagagctcctaagggtccgaaaccacaggcgccccagatccaactggggagatattaaaaggcgtttgggagaggagactggctttcggaagttgcctttcagcttcgcttcctactaggcccatgaagcggtgccctgtacaccagcaaacttgctggctgcagcagaatttctgtctctaacagaaggttagccatggacttgaattgtagatgcaggcagccggtggagtttgataagaggttcctggcaggccgggccgagcactcctggtcagctgatgaaagggctgtgcctgcgcctctgtctccttgaatctgattgtgttgagattgctggcgagacctgggggttgtaggcacaaggcaggttctctgggactgacgcttcttagaaagttgtatgtattctacctgcttttaacactggggaactggtgactagacattagggggaaggtttaacattttttgagttttgaatcacaatggacaaaatatcaggattcattacaaattgggattacagatacatctggaatttttttttggtttttcaaacaagttggttctgtaatcaatgcttgtgtgccttttgtgggggatgggggagcggagtctctctctgtggcccaggctggagtgcagtggcatgatctcggctcactgcaacctctgcctctcaggttcaagcgaatctcctgcctcagcctcccgagtagttgggattacaggcatgtgccaccatgcccagctggtttttgtatttttatagagagggggtttcaccatgttggccaggctggtctaaaactcctgacctcaggtgatctgcccacctcgacctcccaaaatgctaggattacaggcgtgagccaccacacccggccttgtgtgcttcttctgttacattttatgttctctaagatctttgttagaggtattaattttgctgttaggataaagaatattaatatgccagtagattcagaagccaatataatttttgcctaagttacatcaagatgattcatttgtgatgcagagtattttctatacaaaatttttctttttaattcaaacttaaaagtgacacgtgacatcgaggcttgacagtgcatgtggtatgaaactgacctaagtacaaccccttactcaggcagagctgagtgcaacggtatgcggaggagtggtcaagaagattacccttctgggtgtggttttctttatttcactaaaagaagaggtgcagagctcagctaagatagcactcaggaaaaagttaacctgttctccgtcactacttttctttctcatttctcataatgaatggtaatttatttttatggtttcttttttgtattttggtaaaatatacagtttatcctcttacttttaggtttacatttcaaggtattaagtacatttacattgttacatagccatcaccaaggtccatctccagaactttatcttcccagattgaaactctgtacctattaaactctccctccccattcccaccaccagcccttggcaaccaccattctactttctgtctctatgaattcgacaactttagatacctcatgcaggtggaatcgtgatagcatttgtccttttgtgacagtctcatttcctgtagcataatgtcttcaaggttcatccatgttgcaatgtcagaactcccttctgtctcttatttcttatggcaggtatgttttcatttcattttgttttagaggtcttttatgatagatcagaacttaaaagatgtttctgacatttgataaagtgaagatagttgtgaaactgttaaggaaagacagtagccatcaccttgtgtattagagccagagttactctttgaaagactgtattctgtataatatctacaattaaaatttttaaactttttttgaggccaggcgaggtggcctgattacaggcacgagcctgtaatcccagcactttgggaggctgaggcaggcagatcacatgagcccaggagttcgagacttgcctggccaacatagactctgtttctacaaaaaatagaaaaattatctgggtgtggtggctggcgctctgactgaggctgaagtgggaggattgcttgatgagccctggaggtcaaggctgcagtgaactaagatcaagccactgcattccagcctgggcagcagagtgagatgttgtctgaaaacaaacaaaaccccttttttgagaggcttccttttaggtcagccatacctgtctgccatgggaaatttctccctgccccctctttggcagaggagggtcttagagataagttaaacacactaagcctttctgtgtgtagattatattagagccatcccacaaatcactgagaagagcatagtaggttgcacatatttgaatatgacatttcttaaggctgttagagaggatccagttagttttggtttggtttggggtttttttgctgccttagtaaatgttaaaatgaaacatccaccaacagctctgtggatgtgtcctttaaacaaaggtttattgattctaattattcaagcctaagttaagaatgttagcgaagaatgttaggtggttttcttgggcttaatgtttaacaactggattaaggggcaaacacacttaaaggatggatacctctgagtagttggccttccacctgattcattgcaactgttaacccttgaattcaacgggcaaagtatttttgattgatttgcctgaactgagtgagtggatgactttattcataaaacagtataactgaaaatactcatttcctgtgttttctcctaatactgtttcccaaaagcaacagttacttaaaagactgaggcggtacacagtggctcatggcagtaatcccagcactttgggaggccgaggtgggcggatcacaaggtcaagagatcaagactatcctggtcaacatggtgaaaccccatctctactaaaaatacaaaaattagccgggcgtggtatggatgcctgtagtcccagctacttgggaggctgaggcaggagaatcgcttgaacctgggaggtgaaggttgcagtgagctgagattgcaccactgcactccagcctggcgacagagtgagactctgtctcaaaaaaaaaaaaaaagactttattcatcagcaagcggagtgacctgcacagagggcgaggcagaccttgttctctggaagcttagtgtctggtacctgggccaagatgcggggtaaatgctgaaattgaaaacccgctaagtgctgtcagactgggaaagagcctaggtaacgtcgagaggaaaatctgatggggaaaggaaaatcatctgatggggaaattggcagactgtattgagaagtaacacttcagctgaatcttgcttgagggctggggggcgcacgcggcagcactccacagggaggaacagctgtggtttgttgtctggttttgcttttcccacagctgcttagggactctattcatgtgtgactggctgacgtccaaggagggtgatttggggttccagagggagccttggcctctgttcaggccagtccccaggacatggtgtgctgtgtggccttgtgggtctgccccatctagggagagttgtaggagttggtgctcagatcattggtcccggaagcatcctctctgcccgccccttcatgttagggtgactgcggagcgcctttctcccacacttgctttcttctgcccagtggaaagaaggcatggggagtgagcaaggaacactgctgtagttaagctctggaaggaaaaggggattgtgttcagggctgagatctctttaagctgtcatgagaaccatagagctgaactgcctttaagtggctccaacacatcttacctgttcatttctgaagtgttatagacatttctaatacaaaagcaggtttacctttcattaggaaaactctgaaagtgtgttcacatttctactgtgccaaaattttaaggtaatttctgagattaccttgcctctttgggaatacataaccttttctattaaatattttaacagggacagtttactgaatgtactcccccctcacaatcccctcgcaattgaggaggatgcgtagcatctgtttccacccctcctcctccacgaggggcagtggtgaattaggtagctaacattttgccatgtggcagtgagaggtgctggtaggatgagtgatttgccatgatcacgctgtaaggcacaatgaatgtatttggatgttcacagacacagtccctgtcagtggatttacagtctggtttcggggacagacagcaatcccagagtaaatgtaaaactgcagcttcagagagtatgcctgaagaggggtacatgaggcctgagagtagatgaagtgtgtatgtgctggtgggggtgcaaataggggaggtcaggaaggcatccttgaggacgtgacctccctgggcagaggtaacaacgtgtgcaaaggccctgtggtgggaggaagtagtgtgagtttggggtttcacatgaagcccaatgtggctagagaggaagacaggtcaggccatgccttgtaagccattcttgggtgttttttagtttaacttggggttttgactgggaggtgacatgatcagatttgccttttgaaaagttgactgtgatctgtaataggaaaatcacaggaggcaggagacagcaagggtagttatggtagaccattgagggagctcatagcttggaccaaggtggtggtggtgggaacagaagtggatgcatttgagagttctttgggaggtagaattgatagtgcctggtgatgggttggatatgcagggccaagggtggtgtcgaggctgacttctcgtttctggcttgcgcaagtggatgtgtggtggtgccatcgctgaggtaagtaatcctggagaaggaccaggtgtgggggaaggtggggagtctggatttgttgttacatgttaataagtttgtgacaatcgttgatgaaaaaagtccttgccttctttcattactacatccactgccccccaaaatattaaaggaccagactccttaaactacgttatttttaaatccaaataattcagtagctttttgttttccctagtatatgtacacaccgtacatacctaaagttaagaggaagggttaatttagtgcagtgttctcaaaattttgtgtacacaattgtctggagactgttgattcctgggtcccttgaagaactaatgacttccatctctagggtgaggtgcaggctgggtgcttatgttttaaataagctctccagatggtactgctgattcaataggaaaagggcagttattatatattcctttctcctgcaccccaatcaagcccagtgtgatttcagagcacccatttgggtgaaagcagtcacttgatgcccagccgccttacagtccggctgaaatgccaggagtgctgttattggtatttgggactcgaataggggctaggatgactctgtgaaaaagagccataaaaataagaatttcatagctaatttactgcttacctatacttgggcaggccattcaacataatattcttctgacttgagtttctctctgcagggagtccagtaacagagcttcatttggcagtgcccagtggtctctcacattttggctctttattttcaaagagaaaaaaagaggctagaccttccctataaatggtagggaagtaagagatcccattccttgttcctcttttctcttttattccttccacactggcctcttttgttaatgaaataatgtgaatttttttttttttttttggaaacagggtctcactctgtcacccaggctggagtgcagtggcacagtcacagctcactgcagcctcagtgccccggcccccacccttggctcaagtgatcttcccacctcagcctcctgggtaactgggaccacaggcacacactaccacacccagctaattttttatttttttgtgaaacaagatctcactgtgtggcccaggcggctagtctcaaattcctgagctcaagctatcctcctaccttggccttccaaaatgttgagattataggtgtgagccaccatgcctggctgataatgtgatttctaacaaatgttgaataattatagtttgggaaaggaaaacagtatcatttagtgaactataatttttttcttaatttttttaacttaaacttttatatctctttgacaatttggagattcttagggtggtttgatatacctgctttctaatggtagttagatgtttcagctctattctgaagcagtgaaattcagtctgctttcaaagtcagtgaatgcattttgaattatcccttatttcatttcagtagtaactaccttgagactccccaagtactccaattagtttttaatttcagcagtaaatgtgtgttgaaaagaccaaagtttgcattattttccttctgatgtatttaccatccatgcctgttgacataaaaagatttttccagacttgggtagttttcagaaccaaacaaaacccttgtgctataatgtgacttagacacttttgactgaaatgcttgatatagttaatacacataatttttttcaaaatgaaaccacaaagagctataaagagaatttcatagctaatttactgcttacctgtatttggggaagccatttagcatctgtgaacctaaatttcatcagccgtaaaatgggagttagtttttaagtggaaagaatgttacataagataaacggagacaaagtttttatcagtgaaatccaaacaactcatcttaagatgctgtaagctttatgtgtttcttttgtgtttccctaccccgcaaatgtttttcaaacttaaccctgttaggtaaaaactctgggttcctataaacgggtaaagtttgtccattggtcttctcaaggaaaaagcaatatgaacagtttgggttatcttagtaaaagggaggactctgattttgtctcatgtccatcctctctctgtgtgttctagtcggaattcccttatcagtcacatgggtaccaccttcatgttttgaagcgctattatatcccattatgtgcttggtgcagggacaataaaaataagattggttttgcctttaaggagttctcagtctcctagtgaaagcagatgtgtaagcaattacaatgcagtgtagtgcatgatagaggtcttcacagaagagaagtgtgccctggagaccagggagggcctcccggctggtaagatcctttgggtaagtgtggagggatgtgggcttcccagtcagcagtggtcagttctgttttcctttattcattaacccgttcttaacacttacaggcaaacagtaatgctgtttcaaaggaaatgtaaaacttcattaagttatccttttaatctaatatacttgaaaacaaaaccttaaaagcaaaataaaaaatatctcaccatgacccaccttttattgataggagaggaaccagtatcacctgaggatcaaactctagtagtcagtatatcagattttgctcatatttttcagttagaagtcacttctgcaacctaattttgttttccatttttgcctgagagatcaattttaaactgcctgtgtggacagttgtcatttcagatactgtaaataattgtttttactttaggatggggtaggtaaactatcatcttagggccgagtctggctgtggcctgtttttatttggtctcccagctaaaaatggtttttatatttttgaaggattttaaaaacaacaatatgcaacggactccaagtaagaccctcaaagcctaaaatacttactggctggctctttagagaaacaaatggaccaactcctgcttctagcataaaaataattattgttaagcatttattataaccttgtatatattttatggctggactaatatttggaagcagatccaccccattggttccagtttttaaaaaattgttctcaaagaacagaatgtgttttgttagccagtgttgagcacatcatggactctgagcatggactcagaaactactgaggagaggcatcgtggtgctgaggtaatgttttaaacaaagctggtgtttgggtgggtctttgtgtagagaaagtggcagtatcttgtgtcacacttgctaagctattgtgtaatgacagatttctggcatatgctaaaagaaagcaatttgtacctgatgtttgagttggaaagagaatgttatgtaaatgaattgcttttttcctcattgatagtttaaaatgagcttttgatctactatagtctgtatgtgaatttctgactgcagatgttttgtaagtccattcctgattcagaacaccctgtctaaagtacagctccatctctgtctgtgccgtgccccactttactgcactcatagaactcggtctccacctataacgctgtcaggtgcttgtttatttgtgctttttgtcttttctggcagcaaagcaagaggataggtgttgtttttgtgtttttgagatgcggtcttgctctgttgctcaagcacgagtgcagtggtacaatcatagctcaccacagccttgaactcctgggggaccgcaggcgctcactaccacacctgactaatctttttatttttatttctatagagatgaagtttcacactgttttgtgcaggctggtctcaaacacctggcctcaagccatcctcctgcctcagtctctcaaagtgttggcattatagccatgagccactatgcctggcccaagtttgtttgtttgttgtttagcattattattttatagcaaactttaaattcttgtttattggcaggataaatagagggaagaaggacgagcaaataggtaaacatacctgcctcctagtgggtaatcttgggcaagttttttcacctccctctgcctcctcatctgtaaacaagatcctgcgtgcccgcctgggatgcctgctaagatggcacatgggaagcacctggccttatgcctggccctggtcagtaagggctgtgcggttccacttgtacctgataaaattctaatctgattaaaagctttactagctcgtgatggtcattcttttcctctaacttagcagcccgatgaaataatgtagtaagtaaatgtaaccttgttgtttgtccttttgctgccacgatgaacacagctgtcttgctagacctctgttgacttcaacagggatagcatcaggtttattggaaatttacatatgggacagtccagtggtggtgggttggacagaacagcaactgcttcccgaaagcttggaaaaagcatgcagtttacacagcattcttacttaacatactccccctaacagcctccacctggcagccttaaagtgcttgtgggctgggggttcagatgttccccatagataaggaattgatttcagggttggccactaggattccttagctcggaactccacacacacattcttcttaagttattgatgttaggtacacctgtacaaccaccctgcataaagttcattcattcaacaaatagagcacctactttgtgccaggttttcaggtactggggagacattggtgaacaaaaagaggcttttaaaggattatcacctgcttggttgacagtcacatccagtgaatggtggaacccatttcctgctaatgtgtatttgagcctgaaatgcacattgtcccacctttcctcaatggcaaaatgctctggaaaggagatgctggtctgactaaataaaatgggctttctgtttggagttgtaaagggagccgtgccttcctcagcccctcctgaaagaaagacctgctttcaagaagcttatattgcagggggaaagacacatgtctaatacattgtcagggggtggtgagcgtgctactgtaaattttcacctaggctttggcaagagctagaattaactttcattctttactgactctttgaagcgttaaaaccactgggcagagtgacttaggagtgggcccactgtgatgtgtttttgttggttttctggtaaatcacttttgggttggacagtgaaccatgatggtctttcttcaagaacttgtttttgcaagggtttggtgataagtccatcatttccaaacccacttactcttccatcctttctcaggtgctgtggttcagggaaatgattgttttgatagtattttacctattgcaccattacttcatctgtaaatttcttataaaatatgtcttgggatccagccttgtcttttttgtttgtttgtttttttttttttgagacggagtctctgtctgtcgcccaggctggagtgcagtggtgtgatctggactcaccgcaagctccacctcccgggttcacgccattctcctgcctcagcctcccgagtagctgggactacaggcgccagccatcacactcggctaattttttttgtattttttagtagagacggggtttcaccatgttagccaggacagtcttgatctcctgacctcatgatccgcccgcctcagcctcccaaagtgctgggattacaggcgtgagccactgcgcctggcctgttatgtttttaaagagaaaattgaaccacaggtcacttggttaaagcttagcacataaatatgagattggaatcactttatttgtaaacatatatgtagtgtatattggtacagtattttcattaaggtgtgtttcattgcctcagttaaataattaagggtgttggctgctgggatgttgaagtatttgcttacataatccattgctgtttgggtgagactctcaaatggatttagacagataatggtgagaaaactggattttttatttagaacgtggctgaacaaggcagtgtggaaatagtgtgataacaaggtgcattatataacttgaacaaatcaactgcaaaaagacattttcaaagaaatggaggaaaattgaataatatttactgaacttgacgtattaaggaattgttttaaattatgttggatgtgataatggtattgtgatttttttttttagtgctttagagcaatatactgaagtttttacaagtgaaataatgaatgagggccttaaaatatgccagcaaaaaaaaaaaaagtgaaagtggtagagtagaagaaagaatggtgttgaagctgaaaagagagtgtggaggatcatggtactacttattctctctacttttatgaatgttttcaactttccataatagaatatttgcttttaaaaagcatgttatagggtagaaagggagagatgctttacttttgctcgtcatgaagtgcctgagtgttgaggtgggaggatctcagggcgagggcaggtcccccattccctgctgctggggcaacctttgtgctctggatcaaatgagtaactgatttgatctcatcaaatggccccacccgggccatctcaccctccatgcacatgttttaaaaggaggtcactactcaaaattgcagctgacttggaaacacatagaacgatttgttcccagttttttccactattactttgtattcccaatgttttggggggcccataggaatggggcacagtgctgtgacccaactgggaacaggtcattgtcttaatagcgattttctcagacttgaaaattgaaatgaacaaaataaggggcatctactgggtagggctttagccattttaagagatcaatctacatactggggctgtgggcagggatgggggaaggaaatacagcaaaccatgggttggggttggggtgagtgatagggttgtaaaatgtacaccatgtcttttccagtcaagtaatgatgtacaaattataatgccatttcagatgtaacatacttgatactgacagtataaattgaagagtttttttaattttaatttagtataatttcagaaatggtgattttaaaagttttggcagggtttgcttatttaagcaaattttgtaagattactgatttagtttggattttttaaaagaagctactttggtcttgctaatttttgacacatggcaaaagtaaagactggggtgagttcaaatcttgtctaatcgaagtttcttacaggagaaatgttctttaacattgtataatattgctcatgtgatcttaactaggggcaaaaatttatctcagcaatggcacaagacttaagtatggtttatgtcttatgtcctctaaaaaacaggttagcaaagaaatttttcgacctttttttttttttcctgagatggagtctctgtcaccaggctgggagtgcagtggcgccatgtaggctcactgcagcctccgactccctggttcaagcgattctcctgcctcagccccacgagtagctgggattgcaggcacacgccaccatgcccggctaatttttgtatttttagtagagatggtttcaccatgttggccaggatggtcttggtcgcctgacctcgtgatccacccacctcagcctcattgtttcctagactcaccttctcactcccaagatcagaaattggaaatcatcattctcagtaaactatcgcaagaacaaaaaaccaaacaccgcatattctcactcataggtgggaattgaacaatgagatcacatggacacaggaaggggaatatcacactctggggactgttgtggggtggggggaggggggagggatagcatcgggagatatacctaatgctagatgacgagttagtgggtgcagcgcaccagcatggcacatgtatacatatgtaactaacctgcacaatgtgcacatgtaccctaaaacttaaagtataataaaaaaaataaagaaaaaagaaaggaaaaactcttcacaggcttctaaatttgcagagacaaccatgcattccaggtgaatagtgatgtttaatctataggcctttagttccctatgttttctgagcctacaattaaaaccgactctagcatataataagccatcttggccttgtcccttacttttgtttatgtgtgtagttactaagtttactaagtagttactaaacttaagtttctgtgtataattacctgcacatttcagtgaagcatgttggtgatgaagtatttatgatatacctagtgaaactgaaatcacatggtatacaatcaagacttagacttcaggagtttattagataaattcttgttcaaggtcactttctctttattttgcctgccctgaggtaaggagatgagaaggatgtagattgtgtttctagaaagaatagtttcttttgctgaatgtaacatcctttgattatttcttttccctttcttaggggaaagtggtgtctaagaagtccagtttacttccctgttagataacacacaatgtatgttatttccagtgtagaagaagttggttcttaattagagacactcaccaaaaagggccttaaaaactagcagctaataggtatcaggagcattattttcatacgccatcagcaggtcggaaatggccatcagtgttactcggcagtgcaggcttggaactcgggcatgactagcagtcatttcattgtcagacctatggaaagcagctcctttctgcctcccagatgcagtggacagtagggagggcttagcacagaactcttcccaacctggttttaaaatgaccctcttttgaatgtgaatgcccagaaagttcccttctagttctaaggtcatgattttcttgctgataataatgagcacagatgggactggtttgtccgctttttgtgtttgttaagcagccttggtctgacaggatgtgggtctaggggcaggaagtggcttactctcagaggaaaaaggagagctatttaggatttgagatttcattacatgttcttgaaattatggggtggctattattctggactctctctgtatattttatatatatatatgtatatatatatatatatgtatgtatatgtatatatatatatatatatgtatatatatatnnnnnnnnnnnnnnnnnnnntaatgtttttaatatttaccctggagttggtaaatacaaacttttcaaaagcataaaaccattggcatctatttaaagatactattttaggagtaatgttaaagagccagagctacacagatattttggtagctgattaccagaagttgagggtctcagtttttgtaaccattaaaaaaaggtcatcagacgaggataaccgtatacctcgtatcgagtactcatttggagtcactctaccagttatacttcatcactattctgattggctacttaaaacatacgtttatataacataaaaatgtaacatcatgtagatacgtgaaaagtcagttactaggaaattcccagcccccacttctgtgtcaatactctgccctgttaacgtctgctgcacattaagaatttagccttgacattttaagtttagcctaatggtggtgctggaggaagtagtaaggagaacagtttagaaaaggaggtgtgagtggcatgtagtgttacttttcatcatttaaattactcaaaaagttccttaaagtgcttctggcttctctgggaaatgagttcctgcttccctgtggtgtcaggagaatcgcagggtaggagacacggcccctaggatactggacatgggctggatgctgtattcgagggataaaccatgtatggttcttgtgcttaaataagcaaaaacctggccgggcgcggtggctcacacctgtaatcccagcactttgggaggccaaggcgggtggattacgaggtcaggagatcgagaccatctaactaacatggtgaaaccccgtttctactaaaaatacaaaaattagctgggcgtggtggcacatgcctataatcccggctactcgggaggctgaggcaggagaatcgcttgaacccgggaggtggaggttgcagtgagccgagattgcgccactgcactccagcctgggcaacaagagtgaaactccgcctcaaaaaacaaacaaaacactaccaccaaaaacctaactagccatagtcaagtagaagtatacaaatattccagaagaactaaactataaggtgtttgtaaatatttagatgtgaatgagtataaacaacgcatcaaaaaatcataaaaattgatatttggtaaattttcctttctgccagacttgctggcagttaaaatttgaaacagtgactgtaccgaaagcctttttattcaggttaaaagttgtactcccatttcctaaaataaggactgaactgagaaactctagctacagctgcttggttttccatagagttaagttggctccttagatgctgaagtctgtagttatgaccttgctttcattagtaattagcacctgggcaggtactaaccaatgaatgccctttacacctggcaagaaggaatgggtggggaggccagattgtttcaatctaaagggcactacgttgtggtgggttacgttttttggtagacagacactgcctacaggcaactaagtcattccattaactgtcattatcaatccatgtgtggccaagcttgaattgtcctgctggtttagcttcctgatggggaacaacagctgtcgcaacgcacagtgtctgcagctccatcatgggccccaggacgtcccacagcagctaacactggtctgtactcggaactctgccacctggccagtgacttttgtgcgtcatgttcctgggaatagtatgactgtccatgattcctaggaaagctagaggaataactgaggatgaggagctagcactttgacccctgtggggagtgctggttatagtggttatcagggttgtgacaagtggactcttgtgagttccaacactggatgattttattattcctattactcaggcagtaaaagactagtacatatcctggtgttatataattatatgaaaacttatcagaatgagttttataactagcgtacccatgtttttgttattgtgctgcagataaaatggcgcactgaaatgttactgaattacgtgacaatttttgttacaattctgtgcactttttacaagatttgtggagcttagatagatggctggcctttggcatctgaacattttcctgagcccgatagacaagcagattttttttgtttgtttttggagacagggttctcatgcctgtaatcccagcaccctgcctagttcaagaccagcctggctggcaacatggtgaaaccccgtctctaccaaaaatacaaaagttagctgggcatggtggtgcacgcctgtaatcccagatactctggagactgaggcaggagaatcgcttgaacccgggaggtggaggctacagtgagccgagattgtgccactgcactccagccttgacagagcgagaccctgtctcataaaaaattaaaaagacagggttctgttacccagtgtggtggcgcacgcatggctcactgcaggctcgacctcctaggcccaagtgatcttcccacattggccttccaaagtgctagggttacaggagtgagccactgtgcctggccaagatttctttgcctttgcgctcatgttcttctttaaccttaaaagaagaggtcatataaaataatcaggtataatttaagatacagaaagcttgatagaaaggagtagccgtgttctacatcttcatccattgcatttgcagatatgcctcaggattattttattagtacaatttttttttctttttgagacagtctcactctgtcacccaggctggagtgcagtggtgcaatctcggcacactgcagcctccacctcccaggttcaagcgattgtcctgccttattccctggtgtatctgggattaccaatgtgcaccaccacacccggctaatattttgtatttttagtggagatggggtttcgccatgttggccaggctggtctcgaactgctggtctcaagtgatccacctgcctcagcctcccaaagtggtaggattataggcatgagccaccgtgcccagcctagtgtcatgtatttatactgttatttccacctcctaaaagtcaacaaggacacttagctcaagaaggctgatgttgagagagaacgcttatcagaacagggatctctgaggaaaaagggagcttaaatgtgtgtccctggaatttcttctagcccttcctttccttggtgacatggccactgctatgggcgggaattagagaagagccctgaccagtggtgttgatgtctttgccaagtatactgtcaggtcagtgtcataaattgatgatatatatagagagacttcatttaatagaaaataatattttaaggaccaccttgctattttacttctctaataatgttttgaatattttgataaatacctttagcaacatagtggttctcatctcagccctctctgtccttgaaagaatgttatttataacagggtggtttctggactgcccttctggagtaaaacttgggcattctaaccatatgcttgctggaaaccataataatgtaaaaagtcgtcattgggttttcaattgcaattacattgatataattttgtatataaaacagtttgttactgggagcagcattgttcatgtaagaaagatgttcgcttcatataatacatggaaacaaagttatattttcaatgttagccattactgtgacactccaaaaaaggctggtaatggggagaaagaagagctttaaaaaaacctacagacaattcacttgcctcttgggcttttctgctttgcctgccttgaccgaattagagtatctgcatttctgcactaagctggttgaggtttgctaagtcaatggtaatgttttacagagcttggctgttagccagcatttgtggaaaacgaccaatgtctgtcatagctagtgctataatttattcagttggcatattgtttatggagacagtgagataaggggatcaggatccagagagactattaaaatatgtgagtccatctgttgtgatctgaggtttcattagagaaaacctgtctgctagtacaataaatggagacttagtaaggatgtttttatataaaggattataaatcagcagaggtaaatacattaatcttggccaaacaggtcatgtccttttgcgttttcctgatggcaggttctgccccctgccgcccgggcactgttggtcatagcatgaccttggcatcagctgtgagccggtaaacatggaaatgtaggcccctcccaacctgagtcagacccttggcctggggtccaggaaactgttttaacaagcccctgggtgattttttttcacatgttcaagtttgagcgcctcgagggcctgtgaatggctgcatataaggtacagctggccatatgtcttaaatgacttcaaaggggtgtgagccaggcctcttcccacaccagacttcatgaaccatgcctggtattgtcatgtttttgtgagcagccgtgaatagggctgggggagagagatgttcagccaagaaagtctaaaatagaaagggaatgttcagttataacaaaacaaatttttgtaattagagtgctgggttgtgctcagcatcattggagttaaatgtggagcagtggcttacacttgtaatcccagcactttgagaaactgaggtgggcggatcccttgaggtcaggagttcgaggccaccctgggcaacatggtgaaactccatctctacaaaaaatagaaaaattagccggctgtggtggcaggtgcctgtggtcccagctaaggaggctaaggtgggagaatctcttgaaccctggaggcagaggttgcagtgagctgagatcacgccactgcactccagcctgggcaacagagcgagagaccctttctcaaaaaaaaaaaaaaaaaaaaacagcggagcagcaaactaagtcccttttccatcgagggaggtctctgaagcaaagctgagccagcctctcagctctgccctggtggggcaccccatagcgcccagaagcagtgagggctaaggcggcagagtgcagcatggccatgcatgattggagcgccgctactgtgttggtgtcagtttggcagccagcaacttctaagaacatagaatattttcatttagaacttaaaaacagtaaacccaaaaagtttagtttttaaaaattcattttgtttctccctaaagatttttattcttttgaaaatgaccacagtctagtttgaatgccattgtttttcagctgtttcttatttgcaattgctaaaagccaacaaggagcaagttaaatgtccatcacctgaatgggtagacaagtgacagccacacaatggaatattcctgggcagtaaaaaaagaatgaagtgctggtacatgctacaacatgaataacccttttaaacattatgctaagtcatgggattcagtcatgaaagactgcatattacaaaattctgtctctctgaaatgtccagaataggccattccttagagacagaaagtagattggtggtttccaggggctgagggatcaggaggaatgcagagtgactgccagtggccatggagtttctttttgggctgacaaactattccaaaactagatagcagtgtcagttgcataactctgaatatactaaaaaccactgaattatacattttccatgggtaaattttatggtaagttacatttcaatagctgctatttaaagcacatagtgactcaacatgaaaggaaaaatatacagttttgtctctataattacccaattaagtgaaccaaaatagctgcaaagtttttaattcatttatcattggttgtaagaattttccctatcatactcccatttgtgggagaaaatttactgtatctactttctatcagagcatttctaagtatttgaaaggtcttatccaaatatttgaaagctgttaaaagttgctgaagtggcaccttcggaagaaggctggaatgttggaaaacagcgttgacattttaaatgatatggaaggtcaagctcgcaatgtaatcttggtggtggctggatggctctactcagactggtttttgagtaaatggcaggtgtgataatatagggattaatctgttaaccactgaatccactgcctgaaattcagacattcaaatgctcccatttgaatttccctttcttattttacatggttttcctgatttttgagtacataaaaaaattattgcaaacttttttcctgcagtgttctggccactgaaattaaatctggttcttttgtctaagactcaagggttgctctcctgtaatgtttgtggaggaactgatcttggacttttccctcctgtcttgggcttttattacagtttgaatttatgctgtaaaaagtgtgattgtagaggtaatctataagtttaaaatattcagaggaaatggatgcttcccaaaggaaaaattgcatacctatatttatttaccaaaatgaggaaaatacctgggaaataatttggccaaatattcagcaattatattcatagattagaagcaaaatacaaaatttgattgtcaacttggtacctttttcattccttacactcttagaaggcattttaagatgccattttgataaaattaaactgggaagactcagaaatcatgttttcccaactatattctgaaaaatcctagttccctgggatgctccgtggaaataacctgtgggcagaacaatctgtgaagtggagactgtggccccgtcttggactgccactgttggcatcaacatggcagacaggcaacagcctttcagctaaagaaggaagaaacagaaaaccccaccttaaccactgcagagttacgtgacctccaaacactgccccccacagcatatccccatttttgtccctttccctttcaaagccaaataatttcaaagaggactacatagctgctggcttgggatggtgtcaaaagccaggcaagatgattttaagtcatagaatgatcgagctggaagatgctcacagattaaatggtctccagccactcaatatcagcagcaagggagaggaacagggttggcctgagtgaggctggggccacccctgccgccaggcctgtgtgccaggctcaggtgctccagggaatgagcaaagaggatgttgggtttattttgttttaataaggcgaattgttactgagtttatttaaaaataaagcagcttggggtttaacaccttgcatgtcggttgcattggagtggtaacacctgtgctgtcgtgtgtctgcctggaggggtactttccttcttgggaaagtgaacacaggtgtgttgtcccttctccgtgaaaacactctacttgctggccttgaatagcattctagtgggttacttttctcctagtggtcagagagtatttattggacctctggttccattggcatgtgtcccctaaggagggagacccttcagggggtacttacacctctactgtccgatggcactggctgtgtcacacctggcctgtgggctttgaacctagcatttcagagtgggaaaaggcctcaagccatctagtccaaactctacctgcagatcaggtagaggcccagtggcaggaagtcatcagctaggggtcctcagattacagagctagctctcaaacccaggccctctgtctcccgtctcttgccttccagtgattcccaaatttggcctcctcaaaatcacttgtggaagtgacagcttcctgggctgcgggtgtttgaaaagcttctgtggggattctgatgctgaggctgatgtgggaagcactgtggtgtgtgatcactgaggcacacccatcttcattaatgtgtaagccactcggggataggaagggctaatgcctctctgtactcacagtgcccatcgaggtgcctggcacaccttgcagtagttaattggtatttgtggatcgaatgaacatgttaggtgcccactagcaggggttggtcctgtagtctgtggccatggaacattagaagaataaagctattgtggttcatcctgtagtatagtaagttcgagctgagctaacctgtaataacacaaatataattttttttttttacgtttttaaaagttagagatgggttcttgctatgttgcccagggtagtctcaaactcctcgccttgagatcctcctgccttggctccccaaagtcctgcgattacaggcctgagccattatatttggccaacaaatagaattatttatttatttatttatttattttttgcgatggagtctcaccctgtcacctaggctggagtgcagtggcgtgatcttggctcattgcaacctccgcctcccaggttcaagcgattctctctcctcagcctcctgagtagctgggattacaggtgtgtgccaccacatttggctaatttttatatttttagtagagatggggttttaccatgttggccagcgctggtcttgaactcctgacatcaagtgatctgcctgccttggccccccagagtgctgtgattacaggtgtgagccactgcgcctggcctagacttttttaaagagtagattattaagcaaagggagagtataaacagtattggtttttcattagcttcatctgtaccgtcaaccacatggttctttttgtcttggtagtggtacaggagtaaagttaaacttaaatcaccaccaacacccccaagctaagcataacttttaaaagtttttaatattttggcaagcctgggagaaatattgcccttttttgggtagatcttggatgactaactgcttactatacacacacctgtactacacgtgattgcgttgccttcactgaacaccgtttttgataactgtgtaatctgaggggaattactaagacaataaaaactgcagaccacgcgctctttttctccagtctgcacatagtttggatatgtgtggtggtgtgtttaagcccatggacttgagttttttatgggacaatccttgtgtgtatcagaatcatacagtcccagtaccatcttattcctctggcattattgaagatacaagaaccagttggcattcaaatatgttgagttcactaaaaacagttgctgatgagggaaacctaacaccctgataataaaatgaaaagttgggatttagatgtgttttctcaattgccaaagcctggtggtggtggtgctggtgctggtgctggtggtagtgctggtggtggttgtggtggttttgagtcttcgctgtatcacccaggctggagtgcagtggcgcgatcttgctcactgcaagctccgcctcccaggttcaagcaattctcctgcctcagcctcccaagaagctgggactatgtatgggcacgtggtaccacgcccgggtaatttttgtatttttagtagagacggggcttcactgtgttggccaggccggtctcgaacgcctgacctctagtgagccacccaccttggcctcccaaagtgctgggattacaggcgtgaaccactgcatgtggccccaaagtctgttttttttccccaagcccttggataagtagacaaagtatgtatgtaaatggtcctgtcatctcagtgaatgtctcattttaaattttggtgaaagcttatgctgtattgtagcacattattttatctataacattgaaaataattggcctttctaaacatggaactgtttatcatgcagtagggtaaggcagtgccatgctgtggtccttaatctggggaggatctcctcccttttccccatagagcatttggaaatgtgtgtgtggatggggttgcttttagatgttccagtgactggggacactcagtcattggatggcttaaggatgctaaacgttcctgagtgcttgggatagtcttgcagaatgaatacttgtgctgtccagaatgacaagagcacccccagtgggaaacactagtagggtaatgactaatcaagtaacagacatgccctttaacttaaagcagctcattaacatagtattcatttacctgtttagattttgagtatcttctcttcaatctctatgtaaagatacagattgtagagcctgccctatgtatgaatatatatatatattaaaactgtgattctaagaaggggttcttaaggttctggtgtgtccccaaatcagaactggaaattattccttttaacagggccaatggattcctattgctggtcctagttttattactgcagtgccagaacaactccctgatcatcatttttatttttttaaaagaggatctcactctttcattcaggctggagtgcagtggctcgatcatagctcactgcactccagcctgaatgattttttgtagagagatggggtcttgacttgttgcccaggctggtctcaaattcctggactcaagtgatctgcctgccttggtttcccacagtgctgggattacaggcatgagccaatgggcctggcctccctgatctttagacttgcaataattgtttgaggttgcgtaccatagggaatgattgcccatgggtgttggagcataggtaaaaaattttgtggaatgatcggaccagctaagagttggcattgtgttggagctgctggtgctcagatgaagtccttttgttaggaggtgtagatttgttgactcatgcagaacttctcagtagcttacttttttttttttttgagatggagtcttgccctgttgcccaggctggagtgcagtggcccgatcttggctcactgcaagctccacctcccgggttgatgccattctcctgcctcagcctcccgagtagctgtgactacaggcgcccgcacacctggataatcttttctatttttagtagagatggggtttcatcgtgttagccaggatgatctccatctcctgacctcgtgatctgccctcctcggcctcccaaagtgctgggattacgcgtgagccactgtgcccagccaatttttaagttcactttctacacgctactgggttgttaaaaccaacctcagtaaaagtatccgttttacaagttacttgctttttcaggccaggcacagtcaggagtttgagaccagcctggccaacatggtgaaaccctgtctctactaaaattacaaaatttagctgggtgtagtggctggcatctgtaatcccagctgcttgggaggccgaggcaggagaatcgtttgaacccaggaggcagaggttgcagtgagctgagatgatgccactgcactccaacctgggcgacagaggagactccatctcaaaaaaagaaaacaagttaattgctttttaaaagggttgtgtgaactttcagtcagatatgaaactgtttcagaaccaaaaataagttattctaaattcctgctagtcagtttgcaaaatgcttaatatctttttaatgttaattattagctttggtttcaggagatgtcattttcacactgtcttcaaacttagaagagactcaggtttagaatttggagtctgggccgggcgcggtggctcacgcctgtaatcccagcactttgggaggccgaggcaggcagatgacaagatcaggagattgagaccatcctggctaacacggtgaaaccctgtctctactaaaaatacaaaaaattagctgggtgttgtggcgggcacctgtagtcccagctactcgggaggctaaggcaggagaatggcaggaacctgggaggcggagcttgcagtgagccaagatcacaccactgcactccagcctgggcgacagagaaagactccgtctcaaaaaaaaaaaaaaaaaaaaaaaaaaaatggagtctgaaatctcgtgtgcatggactctggtcatttgtctttgtcctaaccagacagtggccttcagttctaattgtacttggggttcccacttctgaaccagtagatagcagagaaagaaaggtggcatatccagggttctgcatttgtgagcaaacgcccctccactttagttttagtgtgttatgtcattgttggcttctgtgtatgtagctggagctgcatttgttattgagatatttgacttggggctggttttcccatctctaatacatgcccttggaaccataattgagagaaatgcgtgcttttattttatgcttcataacagccattttgtgattttaaaaaaattaccagcaggaaatgaaagaaaagtaggtttttatattttagtatgattaaagactttaaaacatgtctcgttgcctcctagtaaacttgagttctttaacttctggacttggggattgtggagaaaannnnnnnnnnnnnnnnnnnnttgggatgtgtggagaaaacttttgaaacaagatctggaaaacgatacttctgtacttgttgtaccagtcggggagcctttaaggcatattggatgcatgttagaggatctctcagtcatagtcttaaatgttattgggacggggtgggagcggctggggagactaattatgttcctgaagtaggaagtgacatttggtgagtgcttaatatttctggttccctggctggataacgaaacctctgtcgccatatactggcacaggtaatacgtccttattacatttacacctgtgttaggaagaatccgggataggtatctctccagcttctgtatatttcacttgaaaaatggtgagaagcaagcatttcttaatattaagcattatagttgctatgtggctctgctgttttctttgggacagtgacataaagtagccagatttgagtgtttttcatacgctttagtaaatctgggttttctcaagtgataaatttgaaaactgccttgatgtaagtgggttgttttgttgttgtggtggtgggtttttttgtttgtttgtttgttttgagatggagtcttgctccggagccgaggctggaatgcagtggcacaatcttggctcactgcaacctccgcctcctgggttcaagcgattctcctgcctcagcctcccaagtagctgggactacaggcgtgcgccactatgcccagctaattttgtatttttaatagagatagggcttcaccatgttagccaggctggtcttgaactcctgacctcaagtggtccacctgcctcggcctcccgaagtgctgggattacaggtctgtgagccaatgcgcccgacagtgttttgtttttttaaaacaactacatggcaacattagaaatattttaaggccctcccatctccacctcctcaattctgtgtctcaccatcctcatactatttccatttttacattttattttcatgtcttgtctaaacagagttcacatttgcattgagtgttgcttgtcgtatttttgatttcagaagcaatttgcccagtttctactattttcgtaattataatttaatatcactacataatccattttttatgtgtctttggacatttcaccatttctctctcactatggtttctaaggttgcttcaaaccttctgattcaaagctctttctctcttcccttctctgacttccttggtgccttgggagccctcctgcctcccttggctgtcgtaaggctcatatgagatggtgcatggaaaaataggttaaagtattgttttaacaaaaaagaaaaaaactgcttaggttgggcagggtggcccatgcctataatctcagcactatgggaggctgagatgggaggcttgcttgagcctaggagctcaagaccagcctaggcgacatagtgagaccccgtctctacaaaaagtaaaaaacaaaacgagctaggcatggtggcacctatagtgccagctactcaagaggctgaggtgggaggcgttcgtgtgagcctgggagatcatgactagtgagctgtgatcgtgccactgcactccagcttgggtgacagagcaagagcctgtctcaaaagagaaaaactgcttagacctaagtgtcagtgtgctttattaaagcaaagaagctgcgtttggtttgcactgtgtgcctcctgagacatccccagccatctgcagtcaggagtggtgtgtggcttcctgactagcacaggaactgatgtcaggcatatgccgtcgccacactgaggagcagcttatgtagaaggtgcaggaggttattagaagaaaagaatactcagttaagcgtaatttgtttcattctgtttttcagatcaatgtccgagttaccaccatggatgcagagctggagtttgcaatccagccaaatacaactggaaaacagctttttgatcaggttggtctctgaacttgagagttaactccacctacaaaaaaaaactgttttgcaacatttcagttattttgtttgcgaagcatattaccttgttttactcacttgaggtaatagatgagaaggatcttttaaaaggtgaaagtatttcatgatagcattataaaatgcattaacagacaagtatatcatgcctaggaagtgaggtgtatgaaagcacacagctgtctgttgtataaagtcaggcggattcagtgtgttaccaggcatggaagcaaaggactgaaaagagagttattgtgcttgtcattgtaaggaggtgctggcctgtgtgtctctcaccctgtattagagacgcggcttcctacccgcagctgcctccacctcaagagtagaacccctctcgctgcgtggatgagtgagccttagttgtctcagttgctgcagcttctcatttctaagtgatcgtacctgaacatctatgaaaggaagaaatgaagatttagagaaataattcactttttaaaattggaagatttttttaaatcaagtatttattagtgatattactacttacttattaaatacttttttccccaataacagctgcttcaaatacagcgttgtttttttttttttctttgagactgaatctcactctgttgccccggctggagtgcaatggtgcaatctcagctcactgcaacctctgtctcacaggttcaagcaattctcctgcatcagctccccgaatagttgggattacaggcacatgctaccacgccctgctaatttttgtatttttaatagagacagggtttcgccatgtttgccaggctagtctcgaactcctgaactcaagtgatccacccgtcttggcctcccaaagtgctgggattacaagtgtgagccaccacgctcagcttgcagccttcccccatcccttttgggtgagtgggaagagggggaagaacaggtcagtcctgggcatttaataaacagacttctagagctttagggagcctctggcctccctgcacccttcagatgaagaaacaggcccagatcaggagttaatttggaattttaggatttactttaagcaaatgctctgtatacctgagttgtcatttctaatgtattcaaccctctttggcattaaatatgatagaagccatgtatttgaaggatggtagcattttttaaagtttaacattatatatcatgggattttaaattagacatctatgtatatgtaaatagtcgaacttgtctgggactcggtttagatgatgttcaacaaatgtccacagcaagttcgactatcactgcttttctgtttacaagacagtcgtgagactaagcagctcaggactcctgtaatgcacaacagaggcttgaaaatgtgaaatctttgctgtgacctagggtcgggattctacctttgctgtatcagaatgtcccatttctggaggtctataagatgcaggttcctctgggcacccctgtgcattgacacccttccgtcccagaagtctgccttgtctgttttcctgcctttcctaggatttctttgtccctgttcctagtaagtcagacccctgggccagctggctgagaggcagaggcaggcagccagaggaggctcaggtgtggcactggatgctttagtcttctgcatgagcacacctgacgggcagcgatgcacccaccgcactgttccctggggggctgtgggctcccatggttctgtgtgtgctggccataacccgccctgctgagtttcatgcaggagagcatcctggagtacaaaggagtaggagtgagattttctaagatttgaaggtagaaccctgaatctgctcaaatttatattaaaaataagtcgttcatggctttgagataatagcctcagttagtaacaagttatttgagtgcaaaaaaagatgttgcccagtggttggactgagcagatgtcctggtttcctggggactctgctagaccatgtgatgaacgacagccaaaagctgttgcccttttgagtgagtttctcatgagtgttgagcctctctctctctcacgcaggtggtaaagactatcggcctccgggaagtgtggtactttggcctccactatgtggataataaaggatttcctacctggctgaagctggataagaaggcaagtcaggattaactatttacaggctgtggattgggtgttggtctgcttcatcgataaggaaactggagcaactcaccctgtcttttgttttctgttcctttttgtttgtgtaaaagtttttacagacaaaaaggttgcaggtttccagtaaatggagatatcgattggaaatcagatctggcatttctccatagtgctcactcattggagcatatgatggttaattgcatagcttttagttgaccttagttttttcaatgagattgttaatcttataaactgtgaatcatccaccatcttgtaagaacctgttattgctttgtttgaacctgtgacagattatcttccaactttaaagagtggataattccattaaccaaccaaaaagaaaagtagtaagataaacattttcttcaaactctgaaaattatcctttttttttttttttgaaacccccactgtcctcccaagtcacagcaacaagttaaaaagatgatgggaggtggggaagagtggaggagcaggaggaattcttaacagtaagttttggggtccagggcccgattggcatgtggccccattccaggtcactggggtcatttccaaatttgagttctccaggattgatagcatcatcccatgaggactggggcttagtgaggcagtagctttgatttccagctgagcacaagagtgtgatagtacttgtttgttttttgttgttgttgttttgagatggagtcttgctctgtcgcccaggctggggtgcagtggcacgatcttggctcactgcaacctccacctcccgggttcaagtgattctcctgcctcagcctcccaagtagctgggactacagctgcatgccatcatgcccggctaatttttttgtatttttagtagagatggggtttcaccatgttggtcaggctagtctcgaactcctgacctcgtggtccgcccacctcagcctcccaaagtgctgggattacagtcgtgagccaccatgcctggcctgtttttttgtttttgtttgtttgttgttgttttttaagaagagacagggtcttgctctgtcacccaggctggagtgcagtggcgccatcatagctcactgcagtctcgaactcctgagctccagggttcctcctgctcagcttcttgagtaactgggactataagcatgcatcaccatccccagctaactttttttaaaaaaatgttgtagagatgggatctcttctacgttgcccaggctggtcttaaactcctgggctcaagtgatcctcctgccttggcctcccaaagcactgggattataggcatgagccaccatgtctggcctgtggtagcacttttgactaacctttttttgtctggagtgctaaaaagatgactttaagaataaatatctcctgaaaactggcttgagggccccattgagtcttggttagaagcctgtgttggggacagtgggccttcgtcttccggatttgtgtggagagtgtggcttgtttcgtgcaggtgtctgcccaggaggtcaggaaggagaatcccctccagttcaagttccgggccaagttctaccctgaagatgtggctgaggagctcatccaggacatcacccagaaacttttcttcctccaagtgaaggaaggaatccttagcgatgagatctactgcccccctgagactgccgtgctcttggggtcctacgctgtgcaggccaagtttggggactacaacaaagaagtgcacaagtctgggtacctcagctctgagcggctgatccctcaaaggtgagcacaggatgacccggcctgggcaggagcagtcatgccgtcctcggcagggagaagtgattgccttagaagcacagtttaaaaacgcaaggacttcgccagtgtcaagtgctccttcatgctagtcattaagtcactgaccagcgacctgaaacatagccagggaaggcgagctgccattcctcatggaaactaaagcgtggccgtgtcctgtgggacatggcatagcaaacttctcgacctgactgctcagctcctcctggggtatgataggttgcccctgtgaaatctgtttttatttagtaatggtcacaaaaattaccccatttggaagaagaggccacttaaaatacctcttagtttttccagcagaactgagttcttgttcaaaatgctaagtcttccagattaactgtcataaatagaaatgctgcacatcaggaaatagaaaccaaagctctttgggattgattgatttgaatggaaagtaagggtttgaatgtgggtggtaagtgggcctccttccttgcctgtcacattccttaaggatgacagtgctgtttccttttgcattccagagtgatggaccagcacaaacttaccagggaccagtgggaggaccggatccaggtgtggcatgcggaacaccgtgggatgctcaagtgagtgttgtgccctgctgttgggatcttgccatctccgtgcactccagcatgtcttttcctgtgactctagttagtgctttaaagggctctgtgtcaggccttgtgaagaccttgagggaaccgagttaaaagtggggttttcttagggaagaggttttttttaaacaaagccaggtgtcttgcctggggaaagaagcggtttagctcaagccttcaggttctaaaagcttacaccctccctttgtagaaagtgttgtgtctaaacttcatcttagtcagaggggcattgttcacctgcaatcagcattattctgtcaaagagatgctggtttgctcattatatgaaggtacttgtcttacaaagtgtatataaatgaaaaaggatcccaagtgagaaatgctgatgtcagagaacctggacgtggggctgttaatgtaagacatggccgagccacctgattctgggtgttctcgtcctagagccttgtctctggcctagtcttgcgagtctgcattatttcagcctctgaagtttgtttgaggtttgagcctcagattttgtgcttcagggtttcctgtctggcccaaacatcctttatggaaggaaaacaactcaaagcctatgaggagggttgtgggaagacatgtgtgggcaagagaaaaaggaggattgtgctgagtgataaaacttaaaaacctgttagagaaaccagtgtgaatcagttcttcttcaaagtgtggggtttggtggtgaggctccagggcagcacggaccccaccccaggcatagcttctgggctgtatgggtcccctcctcaccggtcggctgcccggcccctgcctgcctgcacgcagcacacagcattgagcccatcctacacaaggcgccttaatttaaaaatactggaaaggttttactgttctagatattgagtgctaccagtgactctgcctgtttcactctccccaattagagataatgctatgttggaatacctgaagattgctcaggacctggaaatgtatggaatcaactatttcgagataaaaaacaagaaaggaacagacctttggcttggagttgatgcccttggactgaatatttatgagaaagatgataagtgagttgaagttcacagttatcttcagtaggtagggtggtgggcctggaaacaatggcaaaatggcaaatttgtgggttatttttgaagtatttatttagcaacttactatcccaaagtaggaaactttttaaagggcttttggactgctgtggccctctcaaagggtggtccagaggtgtgggttatcctctctcatggtgggcggggccgatagtgggctcagtcctggtagaggaaggcagaatagagcagaggctgcctctcctccccgctgcctctgagattccaccccagctgcctgcaggtaccagcacatccatccatagctacttcgcaggcagcccagccagtgctcgactcctggctcgaggtttgtgctaatccaaccaagaatattgatggtgtgatgagagacttgaaaagctgtaaacaatagcctgtacgtgtagacacttgagctaaatgctgggagtctgcaggagatatcttaattgcctcgcattagttacgttgtttgttgagtgagggcctgtaagcaagctgggtagagcagcagagccaggcctctccacagggacaggcagttccgctttcacatacagggcatttgccttctttctgctgaggataaacagggaaagtcatcctagttcatgagggcaagtttcccatggtgagtctgcgacatcagcataatcctagattctggattgatctgatcagaagctacctgaatttaagaggcagaaggaaactacctctggaaagagaagggagaggctcctgactgcctcctgactaccgtctctgccctgattgtccacagtcagcctgattgctctgcagggctccccgaaacaaatcatctgatggccaccaggttcaggggcctggcagagaaggtgccagggcaagaatgctcctggggtctttttgccaagccctgccttttggcctgggttcctgctttccacgtaaagagcagagtggcccagagttcctggatgtaccggtttccttcccagcctcatgctgttccttgaaatgacagctctccccatttcccacttgaggctcacccatctcatctgttctcagatatttttgttctcagcatccccacatctcaggttcccccaaaaccctctctggagttctcaaagggagtggtgctgctttccacaaatgacctgcacgagtccatctccatttgcaaccacgcggattcctgccagaccccagggcacagatctatttcacttgggcaagtcagggacctgtgccagctgtgcccaacctcctctcacctccggggcccacgtggtgatactgcacagggagggaggcaggcgctgtcacaggagctcctcagagaacctggaaatgagatattgaggactctcggttcgctcctactccaagtgtgctggatgcagcattggtaaagaagcacggaaaagccaggcacagcggctcacacctggaatcccagcactctgggaggccgaggcaggcgaatcccttgagctcaggagtcttgcccagcctggggaacatggcgaaaccccgtctctaccaaaatttaaaaaattagctggctatggtggtgcacgcctgtggtctcagtcaggtggctgaggtgggaggatcacttgagcctgggaggcagaggttgtagtaagccaagattgcgccactgcactctagcctgggtgacagagcgagaccgtgtctcaaaaaaaattttaaagaagtggggaaagtgggtacttggaaccaggacaccatctttccgggagaccctagagctgaagccgtggctattaagacagccatgccaaggagcagtgcacaaagtcctcgtgggaacgtatgtgggaaactgcctctgccttggaaatctcttcaatgaccagattttgtaacgtggccaggccagggctgtccaaacaggtttttcaacctgcaggaaaacagccatgggcaggaacttgctgatgtcagcttgtaactgccccagcccacgtaagtgtccatttcttccaagtaaaaacgtgagctgtgtgccctatttagtgctgtttttgcgctctgctccccctcccccaccattgagcgatgaacgtggcaactctctcagatggttctttccccacagagcatgctggggtgttgggcaggctcactttctgcctctcttctccccattcctgaaggcacacccctctcttcatgaaaaaagcatttatgtagatattcagtcatttaataggcccaaattctttcccttttgaacaaatattgacaacttggtagcagcataagcaggagactgtcctgaagtctgaggagtgctgagaactcaccagctgttgcgctgttacctctctcggtagaactaggagaattagatatgcctgaaacattgttcaggtgagaaagctgatctattgaatatggaaattgagctctaagagatttatactctgcaagtaaagtctctattaaaacacctgttttagtattaaatagggtctggctgggaaatctgtctcttggggttcccttttcattgtacacataagcattaagtgggagcatgtaggactatttgtcatctttctttaaacccttagcttggaataggtgggagtataaagagggcaaaaacaggtaagcgccctcctgacaggcattgtaagcttgtgaacagagaaagttcagtttagctgggttacaatttgaaacctgacactcggaccaaaaacaaaaactaacaaaaactagaggaacctgatctttagtcctgtaaaagcactttttctcccttagcttcatccctctttgggcagatttcatcatagaagtccttctgtaggtaggagtttctggaaatgcactaggtccagggcttccaccttaaagggaaagggtgcacggggagcttggggactgaaacaggagccacagaacatgtctcttctttaaattccttgcggataggtactcagggcttcgcttgctttctcacgtctctttccgtatgcactccactgtcaccctctggccctctaacacatttccaagaaaactgcaggcatccatatccttcctcaaaatgaaagtgcatatgatatactagaggttggttatgttttgttcttttgatgtaaaatttaaatacaatgaaatgtaatcttaagtgttcatttgttgagttctgacaaatatgcctgaaaaatgcaaaatcttaagacatgtagaacattatcacactcagctacatattttggatttacattttttaatcattcttggtttttttttttttttgagatggaatctcactgtgtcacccagggtggagtgcaatggcacattctcagctcactgtaacctctgcctcctgggttcaagcggttctcctgcctcagcctcccgagtagccaggattacaggcacatgccaccactcctggctaatttttgtatttttagtagagatggggtttcactgtgttggccaggctggtctcaaactcctgacctcaaatgatctgcccaccttggcttcccaaagtgctgggatacaggtgtaagccaccatgcctggcccattcttgcattttatagtcatttcaggctgggcatggtggctcaagaagcaagattccataagctgagaactctggacagctgatcaggtttacctatggtgctttgcctttaactagagtgtgtgacggtagattatttcagatatgtatgtaagactgtttcctgaacaataagatgtatgaaaggagcagaaataaataatttttctaattaaaaaaaaaaatgactaccagccattattccgggggtcccaagatctgcaacttccctgttactcctataaatgacatcactattgtagaacctaagactagccttttgagannnnnnnnnnnnnnnnnnnngccaccatgcctggcccattcttgcattttaaagtcatttcaggctgggcatggtggctcatacctgtaatcccagcactttgggaggctaaaacaggtagattccttgagctcaggagttcaagaccagcctgggctggtctttgccaacatggcaaaaccccgtctccaccaaaagtacaaaaaattagctgggcgtggtggtgcatgcctgtggtcctagctacttgggaggctgaggtgggaggatcacttgagcccgggaggcggaggctgcagtgagccaagattgtgccactgcactctagcctgggtgacagagtaagaccccatctcaatttaaaatatatatattatttcaaactttaaaaagattctaaaaatagtacaaataattcccatatacccttcacttagcttcctcaaacattaacaccttatgtaaccgtagtccaaataccaagataagaaaattaacattagcagtctctagacctcattcccattttaatcagttgtctcactgatgtcctatttctgccccgggaccctctctggagccacacagttagttgttagacctccctgtctccttcgatgtgggatagttccagtctttttttgtcatgaccttggtatttttgaagagtactggccattgactttggaaagcccttcagcttggattgtctggtgttttctcattatttggagttttacatttttggtaagaataaagtgctgttttgcccttccaggacctctttcaaggtggcacatgtggtcggtatatcttatcttaggtggtgctaattttgattattagttaaggtggtgtctgccacgtttctccactgtaaaatcactatccttccctttacaattggtcagtatatttgggggagataattttaaactatgtagatgtcctagttctagctaccattgatgagattactgtggtatttgagaaattgtgatttttaaaaactttttacgtgtattaattggaattctataaggagccaatttctgttctccatttattcagttacattaatatggactcatggatatgtgtttcggtctttgggttatgatctatgagtatgtatcttcttgctcaggttgtttgagatttggcctttaggagcaccttgaagtgtgagccgtgcattctttgcaggcttccttgctgtctggctcctcgagatgcaccaggttcatcctttgtgttccctgttctagtcctggaatcagccatttctccaaaggcctctgtctggtccctgttattggagaatcacgcttttttaatgtgtggcctaagcaaggacacttataaaccctgtggccaccttctctgtagaccctgttcatgtcctatatgtgatctcttaggaaaaaggaaatccttgggctttaattttgcaactttggtcaagaattaaaagttctttaactcaaaagtgagtcataattttcatgtttaacctttttgttttgatactgcagttatgcttatgagtggctatgaattgttatatgaggtttcaaagtcctaagaggaaaaactttctaggcacaccagagagccggaggcctaaattttctaaggtcagaacctgttttgagagtcctgtgtagagacaggagccggagaggggatcccagccccttgaagtttcaggatgcggcacgctggctcacagtgctatgtgctgtgggcggagcctccggagcttggatcctagcttctctgttggtgccagcaggctgctcttgtgttttgggagaaagtgctccagaagcaacacatgcctacctggtgccactttcacagcctttcaatgtaaggaggacataggctgaagtcagtagcagggcaaggtggtatctggagttcccctttaatgctctgaaacctgtaaagaaaattacatctcgaagataaaagaacaaactcattgcatgtctgtttgaatgccaggtgtgttttttttaatggggattggtgattctagagcatagcactgtaaaagaaaggatgtatacaaaagctttgacatttagaaccatggtctggccagtgtcctgccatcattcctgcaggcacaccatgactgactgcgctaattccccagaagggccatgtcaggcttacatgtttgccctcagcctacagagtccaccccactgccttgatctagttgatgtgatcataacgaaacctgtattgctcgtcagtattgaagctgttggtaggccatagattgcttgaccttcctgctacttctaaaatgaaggtttttgtgggatgttggaaaggactgctttggagggcagcattgttggatggtggttttgaggatttgtcgttatttccagaatggcattatccctggtaaaatgtgttggaagaatagggtgggaagtgtcaggtgagcagagcaatgtggtcttgaagtcacatgatgaacttgggaatgctaataaaagccagagtctggccagtcatggcattgcattggttaagtaggattagccctgtggggccttcattagggccgttagtttgaaggctgtcctggaagttggagagtgacatgggaagatgtctgtccagccaggagaacacacactggaatgagaaccagaggagcagaatgcatagcaaggcctttgtccatttctcttggcaagctctgttgagtatggcacgtctaggaacgtgatgggatcttggccctccctgttggtttcatagaactaaatgatcagtaacttaaataacattcaacagtctgtagcagaagagcctgtatgttaagagaggcctcaagggaaagggaggcagccctggggaactgtgtgttgaaaggtgggtctgaaccgtggagtttggggctggatttgacagctcttggatgctgagttaaggactgtgttgacatgggaggagaggaaattaatcagatcagcagactgaaagtagggctgctccagcacacagcttgagagtgggctctggcaggatgagaggtaggtgagtgtggtgatgtgatgtgggaatgaacagcagaagatacctgagggggagggtcaaggtacctgggtaggaatttcagttgacctcgagatcaccagcctgggtaatcataggtgccctagactgaggaaaaaccaaaggaaatgggaacagattaaggttgcagatgccttgcagccaaccacttggcttaacctaggacaggtgggaactatttgataatagcatataacacattgtgcctcttgggttagcttcatattattttaattgaactaataagaattgatttgcgaatctctcttagccaatccaagaacatatgtatacatctaaccatccacttcttctttttaacctcaggttaaccccaaagattggctttccttggagtgaaatcaggaacatctctttcaatgacaaaaagtttgtcattaaacccatcgacaagaaggcacctgtaagttccaaaggattctattcaggggctactgtttttcattcttatacttgtcagggtaacggacaggttatactgtgacgagtagccagtgatagtccaaactcctcatgaggttacattgagggccagagatcctgtgggccaggcaattgctgcaggggagaccacttaacttttcaaatgattctcattccttatgaagaaaagggcagttctgagccattggccaaatgataagcatttcccaaaatgctgtgtttttggtgtggagagccagcctgtccccttgaccacctgggtgcagggactctccccggcacctgacggacagtgggacctgcgagtctcaagggccagatttgcctttcagagctgtcctggaacttacccaagatagggacagtcagacttgcacccaagcattgctggtccccaaggtttcatcggggcttcacccacttctgttgtcagaggtgtgcatcctcacacaggtgacactggcaggcagtcattttgggaggacatggtaagaaggcgacactttatgtcctgaaatctgatagtattgattgtaatagctgcaaagaccagtgcattatgtaaatttggttttatttattctgctgacatttaaacttttgttaactcagaatatttgagacatacgcacataactgtagcattgtagaatgggtaaggattttgttatctaatcagaaatctagttctctaaaaaattgccacctgaagaaattctgttaccaccttagagcctgttctgaattttacgaaaattatagattggaaaggactttgtgttctcatgtaatttttgttccttagttacagtgttaagcttggagaggcaaacatgggctgtggtccataccttggttgtcttgttaacccttttgggactgggtactgcttagcaatggtaaatccacttagaacagtatgtggtgttattgtcctgttacttctccccacatacaggtttgtctagcataatttaaaatcagcaggtcttgacaattttgtgaaagtattttcttctttgttaaaaacgtcttggccaggctcagtggctcacgcctgtaatcccaggaccttgggaggctgagatggccgaatcacgaggtcaggagttcgagaccagcctggccaacacagtgaaaaccccatctctactaaaaatacaaaaattatctgggcgtggtggtgggcgcctgtaatctcagctgctcgggaggctgaggcaggagaatcgcttgaacccaggaagcggaggttgcagtgagctgagattgccactgcactcaagcctgggtgacagagctagactccgtctcaaaaaaaaaaaaaaaaaaaagggctcctgctgtttgcaaactattggctgctactctgtgggtagttgcacggttatttaaaattaaacgcgtattgaatgcagactctaaggctccatggcagcagttcatattatgcaacagcatgaatggagggtcatagcgtcttcatgtcacttgggtagtaagattggcacagtttagaagagcaagaaaatgctgaaatctcttcatcagtaggctactacgtactctgtgacgctactgccttttcagaacacttattaaaaatttgactagagcagaagctctggactagactgtttcagaatgtttgtgcgtgcgtgtgtgtgtgtgtgtgtgtgtgtgtgtttgatgataagtccatctcttgaaaagctgaagaatattttcataataagccccaagcagaagccattgtaacgcatctcgtgcatgtgcctttattatagagtagcctcatgtgaagccatctcgtaagcaaaagaaacattcgctggtggcacgctgtcccaggcactcttccagggctgtgtgcaccatcaacaaggcaaagctcctaccctggtgagcctacatttacgtgaaggaaagggttaaaaaggcaactgagatgcttcctggtagtaaatttaacagtacagctgtgattaaaaactaagccggatcagaagatgggggtgagattcctttaggcaggttgggcaggagccacactgaggaggcagcatttgccttgagtgggcactgctggtttgaggaggtggagttctgtcacccccacagcaccccagggctgctcgaggcactgccccacctcagtctgtaaactttgggcagaagaagttcaagttttcgacatcgaactttcatgtaaaaaagaagaggcccaaagtttgaggcggtgggattccttatcttgtgttgactttcacgggtcatcttcaccccaggcggtttctgctgtgaactcacaaatgagtctttgtccagttctcacccaacaactggcgtctcctttttaaaagccagcttctcttccctgccaaggtgcatacagcagtttggggccacactttggctctttagatgggaccttgtatacagctgacacggcctgcccaggtgacactatgaggggctgaggcggctgccttttccctttcaaaagggcgttttgttcctgtggccttgtggaaaaggcagaaggctctgaggcatctgaaatttggagaaagtaagcagcgtttccgctctgactcctcggccgcttcccccacgtgaccttcccaggagccccgctgcctttttgcctcccgcggctgcctcctgccatctctgcggccagatgagccttgggattggcctcttgtgggagagtttcctggcatcctggggacttgaaaaggggctcttttaccttctctccttctgtatttgtagggtcttgggtttatttttcttgaactttccttgtgcctggtttgcatttttaccttgctggtcctcggccagtttaaaaaccctgctccaggtcttgtcgtgttgtggttctgcatcaggaagctgcatcctgcatcaggttagggacttggatttagaaacatttcagtatgagtctttgttttaacttgaagtgagaaaccggcttccttcaaaggcactgggagagatttcctgccaggcaccatcctccctcacccactggcagtggactccccaaattctggttcccgttgctggcaggacctgtcttctgcagggaaagggagagagggagacattgttatgttaaccattgaggtttttcattgatccccccacccatgcacccccacaaccccataaaggggagttggtgctaatcagcgttttctgagtcagggcctatttggtagagtcctccaaagctgtaatgcaggattgtttcctcttgtgtaataagggataggtgggtcataaaaatgccgattgctcccagctccacagactcctccctgggaaacccaatgacttaacagcaagggtgtgaaaccccaaagacagccccacccaggaagttcatgggctctcagggcttggcatcacctctcaccctaggatttctggaacagatgaaaagactgaagctaaatagattcttctcggatgtgttgatgagcccgctcagccggttcctcgttaggtctcagaagttgctgtgggatatatcgcactgtttttttgttttagccaccctgtccctctgttccaaatggtcagaagctggatgctgggggccctgaggttaagaggaagccaacagagtcactgaaaaataacttttcatgggagtttctaaaccatattcttctgtcttgtaagctaatcacagcagtagcaaggagttgggaccaagattgtcagctgtgtcccaaatgtttccagtcatggtcacgagtttcccgaaggctgtgattctgccttgttttccaggaggctcctctggttgtggtcttgcaaggcactagcaattggagtgaccgctgtgtgtgtcagccagctcttcctgcgccgagcacctcctgaacgtcaccgataaggcggggacgccagcatctaatgggactgctgggaggattgagtcccatatctgaagtcccttgagataccggcatccctgccttatggttgaaggcactgagcctggtgaagggatgtgctcaaggctgtggagctcgcacgtggctgtctgtgctgcacgagctggcagtgcctggcaggtactgcacacctcaaataccctgggaagataagagatgagtgaatgtgtggcccctgcccttgggagctgatggcctcataggagtgagatgctgaaaggagtcactggagtgaagtgacagtgccactgcggcgagtacctgtagctggtgtggcaggagcagggctggatagctttgaggagagagaaccgagtgcacagcggaggctgggcccagagctggaaggtctctgtgtgggttgggcccaggccctggagctcatcctggagctcccaggctggcagtgatgggtcggggtggtgacccagtcagtgtagcaataacagtgtgggaggggaggctgtggcagaggagacaggaagcccaaatagcagcagaggcagtccaggcaagcatcggggatggggagcagcagtgaggctggagaggacatcatgaaaggtggctacctggaagagcaggcagctctgagacttgaaaggtttcccaaggctgagagttctcaccttggaaaagctttgcagttaacgtgcagtggcatttcagtgtgcatgcaggatgtccctacccacacacaactgcacacacacgcggcacctgcccttcctccacccgtcccagagaatgcactttcccagtgctacatacccacacataaccgcacacacacgcggcacgtgcccttcctccatctgtcctggagaatgcacattcctagtgccgagatgctgccatccctgttctgctacatttgttcttttagaaaagttctggacctttgtgaaggatggtttggagaagaaaaccaaacgaaggagcttgagtccaggtggccctgttctgttttgtaggactttgtgttttatgccccacgtctgagaatcaacaagcggatcctgcagctctgcatgggcaaccatgagttgtatatgcgccgcaggaagcctgacaccatcgaggtgcagcagatgaaggcccaggcccgggaggagaagcatcagaagcagctggagcggtgagcgcgtgaggccagagtggggggggcctgtgttctcccaactcagccactggcagccccagtgcctgtcaggtgactgtggagctgatggggagagtgtggtggaatggaacccagtcaccacgctgggatcttcgaggcctttgtctctgggcagttgctgtggtgctgagcctgttgtcagccctggagcggctgctccgtcaggcagctcaggctggcagcaggccagggtggccctcaggataccaagtccatcctggagcttcaagtacccgtgaagtgtgttgacccctcactttcctgccagagtctaaatctccctgtgcctctttttccctgcaccaggcaacagctggaaacagagaagaaaaggagagaaaccgtggagagagagaaagagcagatgatgcgcgagaaggaggagttgatgctgcggctgcaggactatgaggagaagacaaagaaggcagagagaggtcaggcaccctggggctggcactctacactgggtcatgcatttccacagagtagcaggggccacacccacccacccactcaccaggaaggaaaccaagaacgtgtcccacagcgcagactcacagccgaaatgataaaatggttatttggtttggaaaacagttctgtacttatttaactttgatgctagttgttctaagactttgtattttaaaatttccctagtcttttgcggtaagtgctcaatcacccagtttccccaatgaggacagtaaggtttggtgcggtacagtgatttgcccacagtcccccagcccatgactgacagggccatgctgcactgccctcgacctctagactaaaacccaaaggcgtgttcagagccagacttcccagcacagctccagtcaacaaccccagcagctgggccgattacacaaggcgccacagatgctgtattcactggcagcccttacagcacacatgggaagggtgttctgtgttctgagtggagtgtggaccaccagcacagcgggcggctgacctggggagagtagcgccaagagggttgagtcaggcatgccagagagagggcgcctggctggcgttggacgggtttctagccatcttgaggaagttgtcatggatacagcagcaatgagctctgtgaagtgctttcctccagggtcactggaagacatcccctcaacctgtgacttggtctagggctctgtggctttgggggtgggaatggaaagcgagggctcctaggtccctgggctgagggtttgaatggctctggctttgtgtctttgcagagctctcggagcagattcagagggccctgcagctggaggaggagaggaagcgggcacaggaggaggccgagcgcctagaggctgaccgtatggctgcactgcgggctaaggaggagctggagagacaggcggtggatcagataaagagccaggagcagctggtaggaatggcctgagtttcaagatgctgaattatagagaggctgcttctgaggatggaaaatgtgacacctgccttgtaataattgtcatgactggaagctgtaaactgatctgctggggggctgaaggcagctggtggggaaggggctgggctgttgccagggtcacccattgaaggtgggtgtgggcatccaggaagagatgccgggggtgcacaatggaccctgctggccatggagtgggggtggcggggactcaggtgtcacgttggagactgcttgccaacacacatgaacactcattcacaactggactccgttgaaaggatatcagaactgacgtgagcttggcattcccttcccaggctgcggagcttgcagaatacactgccaagattgccctcctggaagaggcgcggaggcgcaaggaggatgaagttgaagagtggcagcacagggtgagtctgcacgggggacacctccgcacggccacagcacctgttgcccaattgcctgcggtggggcccttctgcaggtgggtgggttgggggagaggtctggctcaagctgccacatcccactggaagcttctgggatgtctcatgatcctctgccaataccagctgtactattgaagtagacatccccaaagagatgggtttgactttgtacacgagtcagtgcagctgctggattcatagagggaggacctctgattgactttcacccactttgctccctccaccccgaactgttcagtgctgatctgacagcccccggtcaggaactggttttacatctaattatatatgtgccccttgcaatggggtcgcagtgcctgaaacacgacctcctgcagctagtatatacagcgggcaccatggaaagatccagctccttggacgtctccaggctggagtgagagctgggctctgctgctcatcagctatttgggggctagtagcatcacttcttcaagcctcattttcctcattgtagaatgggggcaatacccaactcataaggttgctctgcagatgcgaggtcccatgcccaggacctagcacagaggtttagtcagctgtagctctcattgtgggacgcacacagagcttgtcgctccgtctgggatcccctgtgccctccaggaaggcacagcccctgagaagctctggggatggttcccactggagactgcacaccaggctttaagcagctcctctccttcacagacccgctggcccgtccttcccccactgtggcttctccatctgtggaggtgccttctggggacgtgtctcccggctctccagggctgctgctgcctagtacctccttgcctctgttccagcccccattcccgctgccgatctgtattaggctgttctcacacggctataaagaacaagctgagactgggtagttaaagaaaagaggtttaattgactcacagtcccacatggctgggggaggcctcaggaaatttacaatcgtggcagaaggcgaaggggaagcaggcacctcttacatgagggcagaagagagaaaagcaaaggggggtaatgccaaacactgaaaccatcagctcttgctcagaacccacccactagcacgagaacagcataggggaaaccaccccgtaatccagtcacctcccaccaggtaatgccccccacccccagcatggggggattacaggtggagatgagatttgggtggggacacagccatatcaccatcccaagttgcaagcggaagactttggttcttaggtttttggagaaagtacctgttaagtgaggagagctggctacaaagcagatccacactaagctcaactctagggctggctgggatggaggcgggcgggactgggtgtgtgtgaagctgttggaaggactgcaagtggcgagcaggagagcacttgataatgactgtggcatgaagggaggctaggaacagagcccgttactcatgctaacaggattttttttctaaaaattatataatgtctagagttacaggtaaaaaaagaaatggtagttttaaaactgcccaggttccggcatcacagttcctcttcctgtcttggacgcagagggttgtaaaccccccatgcaccctgagggtgctcctcttcgaagccacagcccagcacagttcagtgctgccttagcctgccaggacagagggaggtgacagtctgttctcatagccaggaggataggacttctgggtgagaagtcctcttattaatttgctttccaaaggccaaagaagcccaggatgacctggtgaagaccaaggaggagctgcacctggtgatgacagcacccccgcccccaccaccccccgtgtacgagccggtgagctaccatgtccaggagagcttgcaggatgagggcgcagagcccacgggctacagcgcggagctgtctagtgagggcatccgggatgaccgcaatgaggagaagcgcatcactgaggcagagaagaacgagcgtgtgcagcggcagctgctggtgaggcccaaggggctctgtctccagggagcctgcctcgcttttggagcagacaggcttggggagggcagtgatgtgagccagccccacccagcacccctcttgcccttcctgttttcctaggggacgggccgggccatatggggaggaagggactagaccaacgctgcttaatgttacagacgctgagcagcgagctgtcccaggcccgagatgagaataagaggacccacaatgacatcatccacaacgagaacatgaggcaaggccgggacaagtacaagacgctgcggcagatccggcagggcaacaccaagcagcgcatcgacgagttcgaggccctgtaacagccaggccaggaccaagggcagaggggtgctcatagcgggcgctgccagccccgccacgcttgtctttagtgctccaagtctaggaactccctcagatcccagttcctttagaaagcagttacccaacagaaacattctgggctgggaaccagggaggcgccctggtttgttttccccagttgtaatagtgccaagcaggcctgattctcgcgattattctcgaatcacctcctgtgttgtgctgggagcaggactgattgaattacggaaaatgcctgtaaagtctgagtaagaaacttcatgctggcctgtgtgatacaagagtcagcatcattaaaggaaacgtggcaggacttccatctgtgccatacttgttctgtattcgaaatgagctcaaattgattttttaatttctatgaaggatccatctttgtatatttacatgcttagaggggtgaaaattattttggaaattgagtctgaagcactctcgcacacacagtgattccctcctcccgtcactccacgcagctggcagagagcacagtgatcaccagcgtgagtggtggaggaggacacttggatatttttttagtttttttttttttggcttaacagttttagaatacattgtacttatacaccttattaatgatcagctatatactatttatatacaagtgataatacagatttgtaacattagttttaaaaagggaaagttttgttctgtatattttgttaccttttacagaataaaagaattacatatgaaaaaccctctaaaccatggcacttgatgtgatgtggcaggagggcagtggtggagctggacctgcctgctgcagtcacgtgtaaacaggattattattagtgttttatgcatgtaatggactatgcacacttttaattttgtcagattcacacatgccactatgagctttcagactccagctgtgaagagactctgtttgcttgtgtttgtttgcagtctctctctgccatggccttggcaggctgctggaaggcagcttgtggaggccgttggttccgcccactcattccttctcgtgcactgctttctccttcacagctaagatgccatgtgcaggtggattccatgccgcagacatgaaataaaagctttgcaaaggcacgaagcagcacgggtgtgtgcttgtgtgtggggtgggagggctaccgccgactcgtctgggctctatgctgtcctctggccaggtttcgtgaggggccgtggtgtccctgggggtacactggtaagttggagctgaccaacccaagacatggtgctccatgggtcacctaacctcctcgagatggtttccacaggagagaaagactgctccaacactcatcaggctcctctaaaatgctcctcatagccgggcacagtggctcacacctgtaatcccagcactttgggaggccgaggtggtcggatcacgaggtcaggagatcgagaccatcctggccaacatggtgaaaccccatctttactaaaaatacgaaaattagcctggtgtggtggtgcatgcctataatcccagctacttgggaggctggggcaggagaattgctagaacccgggaggcggagcttgcagcaagccaagatcgtgccactgcactccagcctggtgacggggagactccgtctcaaaaaataaagtgcttctcacagcgaagctgtgactcccccccccgccttgagacagggtcttcctttggcccaggctggagcacagttgcatgatcggggcttactgcagcctcaacctcctgggctcaatcctcccggttcagcctcctgagtaactgggactacaggtgtgtaccaccacacctggataattttttggtttttttgtagacagggtatctatgttgcctgggctgatctcacacttctgagctcaagccatccactgcagcctcccaaagttgctgggattacaggggggagttaccatgcccaccagccggccttttacctcatttgataagcactggaggacatgggtaacaacgtttattaaaatctggccattttctacatctcaaagaggagataacccaccagaggcttaggtaacataattgtgtttaacgtaaatatacacagataccaataggcggttaagccatgggacagggccgcagatggagactgctcaaggtcaaaggggtctccagctgggaccctgcacctggttcgtagcccctctgcagacgcacagtgcctcacgcctgctgcaacctggaaccttgaggccttcatgtcagtgcaggacaagagtcatgtctgtccatagattggggctggaaaggactttctgccactggagcttcgattgtgagcatgcatccccgccaacagctgtgtctccctctgtaagagaggaagacaatttagccatggtcggggagggcaccacttcatcccctctcatccctttaaaaatgatgaccagccagaagtttttcaccttaagtccacattaaaaggccaaccactgatgacagacgccgccgccaccactcccaccccaacaaagctggtgttgagactgggattcacgcaggcatcctctgctctgcgaggctctaacagcctggagttctgtagtttgaaagtgaggcgaggactctggtttggtgggctgggtcttcaccaagggagtggatagttgcacaccagcatggctagctgggtggggccgtctcagactgggggctgggcttgcccatgggaagggattcttagaggaagacagtatgctttggacaaaatatctttgaaaagcaatggagcagtgaagcttatttctcttcagtcactggttctcagttggaggtccttggagatgtgtgcaggtgtttttggttgtcatcatgtcagggacactgctggcagccagaagcagtgccaggcacagaacctcacagcagagggctgtccacctaccatgccggcggtgccctgccgagcggctctggacagcactgctgttctgaccacttttgatgaagtactttctgaattgccatttgtttaagaagatattttcatttaagaaaataatccttttatgattgacgccagaaacaaaagcaaatactgtacctagcccgtttggaggcctataatttttgtttctttagcagatctaaatctgatttaaattgtcaaaatacttggctgtattatggctcagctgtagagtaaaaactagacttaggcatttccaattaaggcaggctaggcaatttcaaaaccagttaagtcactgccctggtggaagcattttctttgcacggtacccattaggataatcacaaagtataaacgtttgggctcaatgtctcagacttacttgaaccaagtctggttcctccaagcaagcggtcgttcattccaaagagggcctgatcccagacagttaactccaagctcgactgcctcagctgagctggggttacgccactgaagacaaatgagtgtttccactgggggcaagcctgcttcctcaggactggcgacttcagtctcagtttttgttggtctggcagagtgagacagctgaagagggaacacaaaccctgcaatcattgccatccacacggccttctctcctgaggcctgtgcgtcagtgcagacgggaagcactaagaaaagtgccaagtccacaacatccacaccctccccagtgaagcagggtgggaaccacaggactcggcacatttcccttagggccgaattctgcatcaggtatgaagggcgagctgcatgctgaggcctcgtggccctcatcttaatctttcctccttggggtgcctcccaccatgactgcagatacacgttatctccttttaaccctgttctcaggaaaatcaactcagacaagcttgtccaaggccatgcagataagcaacaagattagaacataagctcagttctcctttttttgagacggagttttgttctgtcgcccaggctggagtgaagtggcaccatctcagctcactgcaacctcctccccccaagttcaaggaagactcctatctcagcctccagagcagctaggattataggtgcccgccaccacacccagctaatttttgtatttttagtagagatggggtttcatcatgttggccaggctagttttgaactcctgacctcaggtgatccacctgcctcagcctcccaaagtgctgggattacaggcacgagccactgcgtccagcctgagttctatcttgaccgtcatttttccctatgtcactgacggggagtttgcaattcaatgtaataatggtatttgccttacttttagaggggccaatgcacctgtactgaatgagaatgaaatgtggacagtcatgcgttttactgttggtccaagaggagatgttaagcttaggaaatatttactgaccacaccacattttcatgcttgatttcaaaactggcttcctgatatcacagaactgagaagattagggtttcgagtactccagcatgtacacatcccgtgaatttttggaaatcagggtctttaatgtgtgttgttagattttcataggaaagctaaaataagacgttttaagtggcttacgttttttagtgttcgctgcaggttctgggccatgttgtgatgtatactagatcaccaataaatatttgattacatcgaatacctaccccttaacaaatgagttcaaggtgccatctggccgcacaggtaaattcttggctcctagcactaccaaacaaagttgaccatgaagtgatggctgatctgtccctggaaggaaagccagtattcactgtcaaaccatgtctcctgatacgttagtatgcagtaccaccaccccaaaaccgagagctcagctagagaatctgctacagccctcagaccccgagagagcagatgggagtggtgcagtgggctctgctggccctgcccacaggctgtggcgctgcccacaccgtgccgctctgtggtcaggtggaggacaggatggagggattactaagatcctagcaaagagtaaagaggaacgcaaggagagggaagatgccgaagtttgagtctagttgtagccagaagtttgggggaaagtgagagccccgagaccctgtctaggaggttgggatggccatggggcacttgctgctggtctgctggtgaccccgtgaacttgggtagcagaatttcctcttctagccaaatagggagtcagcaaaatacacaacagaaatgtgcattctgggccgggcgtggtggctcacgcctgtaatcccagcactttgggaggccaaggtgggcggatcatgaggtcaggagatcgagaccatcctggctaacatggtgaaaccctgtctctacttaaagaaaaaaaacaaaaaattagccgggcatggtggcaggtgcctgtagtcccaggtactcgggaggctgaggcaggagaatggcatgaatcagggaggcgaagcttgcagtgagccaagatcgggccactgcactccagcctgggtgacagagcaaaactccgtctcaaaaaaaaaaaaaaaaaaaaaaaagaaatgtgcattctcccagtcctccttccccgccctcctcctcctccaccctcctgctttccacacgccccacgttattgaaggagtaaaatctccatagggtccctgaggaccctccctcctgacctacttcttttgctgggcagcagctacccacatgcctgggggcggggatttatctcgtctgagccctgcaggtaccagtgctcttggctccacattgtcatggagcctctgctcttcaggaggggccacggtttccccagagaccatccaatctgcccctgggaggaaggcctagggcagtgtccttagaggagcgtagagagggcatcagaggccttgtctgcttctggtcacccgtttcccccactacgggctccagagaacctctcccgggctcgctgcatggctcagaaagaagagctgctggagctgggcacggggacgtagaaaggaaatgctagaaaactttcaccccacctcagtctgcctgcagcaccaggctctgcagacaatgacacagacaatgtccagggagctggaggccactgaccttcttgagcctcttggagttttctgggccgtgaagggagaaccagcttagcccggactgtgagctctccattactctgaggaacgctgtcttcgtatttctccgcctggggacaagaggcagagcttagggacaggattccccaagtcccaagaaccttctgggttcctctggttgtctcagcttcgtccacagatgcttccccctggcccctgcaaggccctgggtggagcaggtgtgtccgtggcaggactggtcttccttccatctatggtttcactcccaccctccccaaccccagcatggggaggaacagcttggccaccccagcgaaccagagccagatgagcctgaggaagtgaagggactcaagggcactgcacactccctaagacatttctacgaaaacccagacacagcctgagtttgaaaaacagaaatgaactcaagcctccaccccatccaccccacccaggtcagtagagattcacgctgcccttccatgccaaggactggcacagacactggggacagcatggggtgtagtctctgtccagagccacagggggtggcccctcagggtgtggtgagtctgaggacacctccctgcccaccgaggcacttctgtcatgagtggttttaccagaaagtgagtgaagagagggccgggaaagagatgagcctgaaatccacaccatccttctcccagtggggtgggaggagagtattgggaagagtctagagcagggtgtgtccagtcttttggcttccctgggccacactggaagaattgtcttgggccacacataaaatacactaacaacagctgatgagcttaaaaaaaaaatcacaaaaaaactcatgttttaagaaagtttatgaatttgtgttgggttgcattcaatgccatcctgaggccaagcatggtgactcatgcctgtaatcccagcactttgggaggccaaggtgggatcacctgaggtcaggagttcgagaccagcctggccaacatggtgaaaccccatgtctaccaaaaatacaaaaaaattagccaggtgtggtgacgggcgcctataatcccagctactagggaggctgaggcagagaatcacttgaacccaggggacagaggttgcagtgagccaagatcacgccacttcactccagcctggacgacagagcaaaactccgtctcaaaataaacaacaacaaccaaaaaacagagccgtcccgggctgcaggttggacaagtttggtcttgacacatccggtccaccatggctcctgccagcactgagaagcagccctctcagttaccctcagaggcctcaggactcctgggagcccgcgtgggccagcccgtcttcctggccctcgggtgccaaatgaggtatggctgcctccagcctcagcggccagaaaccgaggcggaacagagcccaggggcgggtctgtgggcggactccccaccctactggctttaggagggatgccttgcagctctgtgccacctgcagctctgtgccacctgcagctctgtgccacctgctcctcacccacttgccagagcaggctcagtctgatgaggcctggtggccgcctgtcctatgccaagccctgtgcttgttccaggccttgtcttcgagctgatgacagaggtgtgggagaggcagggtgcacgggggattcagcctcggacagaaggagttcaggctggaaactcagggcgtcccggaggagccaatgctgttctgagagatgacagagcgggggtgagaggaaggcacggaaggcatggaagccagatgcttcacccacccgcaacgtggctggggcaggagcaaagggacactgaggctaaagatcaggccgagatggcaggcgtcctgagctccgggtcctggaagggaggccacttctggtaggggtaatcaggaatggcttcctggaggaggtgggttttgggtcgtcttgggctgaccttggataggggatgcattccaggtaggcactgggaaggggaggtctaagcccggactctagcttgggggagtcagcacaggcagtgggagagtgggcattgcctggaggagcagggagggggcaggtggctcaccaggaggcctcagctgaaacctgagaagcttccaggcagagataatgcgaatcccagctgcgctggctccggagaggaaaagaagccagatggcccttgtgccttatgtccaggtcggagcagaaggctgggcctgccgtgggcccttggctgaggggagtagtccatcccgctgggttttttttttttttttgagacagagtctcgctctgttgccaggctgaagtgcagtggtgcaatctcgactcattgcaacctctgcctcccaggttcaagtgattcttctgcctcagcctccagagcagctgggactacaggcgtgcaccaccacacccagctaatttttgtatttttagagagacggggtttcactgtgttagccaggatggtctcaatctcctgaccttgtgatctgcccgcctcggcctcccaaagtgctgggattacagtcaagagccaccgtgtccaggctccccactggggtttttaaagagatggcagaagcccacgtttttcatccctcgtggtctcacatgaactctctcccagtccgggatctggacacagcaaagtacaaagcagcgtctccgagaaatgctaacctctctcccaggcctctcctcctacctgcatagcctgggggacacggatcctaaatggagtccatcagctcctctgacccacccccagcccacgtgctatctatctcccgccgtgcaattccaaaccaggagctggagccccacatcctagccagggcggcctctgccttcctcacagcatcgggtccagccatttgtcacctattactgttagttattgtcacctattattgagagtgcctggggttgaaaggttagaaacaacacactgtagccccctgggggaccgcatagctgcgggcggtgcccccagggaaaggcatggccagcttccagcaggtcagccaccagcaaagggaggcctccgccaggggaagccacaggacctgatccagtctggtctgtgtatgatgctgaggcgggggctgttcgggtacctgaacagagctgagccagttaaaacaaaccctccgcccaccccacccacaagaaagtaactatttcaaagtcacagcgccaggccggcgaacacacagtcttgggtccaagtcttgccaggtacgttttctcttctgggatctctctgaaaagttatttatctatcacagtggggatggagggcactcagtccaaaaccagacatcaccttggcccggagcggatgccagcggaaggactgtgttgtgctgtcttcaaagtcccacgtggccagaggaatgatcacttctccaagaaacactctccgggccagcgtgcccagatgccacaccgagacctgcagctgccgggtcaccagctgggcaggggccacctgatactgcagaggcaaggaagagatggtcagctgggctcccggggcccgcactcctaggatccccatctctggaccccaccttccagggccccacttcccggggcctggcgcaggcctccctcccacaggctgagtccaagatgcggatgcagccagggacctgatgtggttagggtgggtcaaggtgcttacagccagggtggggcgggggggtcctctctctgctcaagaacccctccccctactccccaggtgcccagtgctctgcctggggacaggcaagggtagccctggtagcctcccacccccaattcctagaacaagacaaggatgaaagtccttgtccagctcacgcctactagaaatcaagccaaagtctatgctcgcacaggatttgaacttgcatctaaacactgcacccagccaggcttggccaaaaataatgataacaggcccaaaaatactaaaaaaaaaaaaaaaaaaaaaaaaaaaaatttttttttgagacaggatctcgctctgtcaccaggctggagtgcagtggcacgatcttggctcactgcaacctctgcctcctgggttcaagcgattctcctgccttagcctcctgagtagctgggactatagacgcccaacaccacgcccggcttgtttttttgtatttttagtagagacagggtttcaccacgttggccaggttggtctcgaactcctgacctcaaatgacccacctgcctcggcctcccaaattgctgggattacaggcgtgagccactgcaccagcctgcatttatttatttattttttaaagcaaagcatgaactcccccctcctccattccccgcaacaccacgtgtttgccctggagggacggtgcctgtgctcaggcatgcagggcctgtgctggcttggcagaggccaacacgatgttcttactgtccacacagggggctcccaacacacccaagagtgacgagggaacccattccccagccaagcatgggttctgccccatagagactagaggccgaaggcccctcagtggcacccagcccttcccaaggtgtggctgactccacctcagcctctgagggcctcactttaagcttattagttggattttctcaataatgaacaaaccctacaagttattgaacacttatttatttcacaccaggctttctagatgcattgatctttttagctttcacacgcaccctatgaggtcagtataattcaaaccatgttgcaggtgaaaaaaaagcagcttggaaattcagtgaccctccctcccttggtctggtagccgacactgcaggccagattcacgtgcactgactgtgtccaggcccgagtctcgctgctgacctctgtggcccatgctgcccccactccggcgcttgtttggggtttgaatggtgactcctcgtgacacggctgttgctgtgaggctggacacttgcacccatt

SEQ ID NO: 555 - DNA, 3015 bp, Homo sapiens
gagcgcactcggcggacgcaagggcggcggggagcacacggagcactgcaggcgccgggttgggacagcgtcttcgctgctgctggatagtcgtgttttcggggatcgaggatactcaccagaaaccgaaaatgccgaaaccaatcaatgtccgagttaccaccatggatgcagagctggagtttgcaatccagccaaatacaactggaaaacagctttttgatcagtgggccttcgtcttccggatttgtgtggagagtgtggcttgtttcgtgcaggtgtctgcccaggaggtcaggaaggagaatcccctccagttcaagttccgggccaagttctaccctgaagatgtggctgaggagctcatccaggacatcacccagaaacttttcttcctccaagtgaaggaaggaatccttagcgatgagatctactgcccccctgagactgccgtgctcttggggtcctacgctgtgcaggccaagtttggggactacaacaaagaagtgcacaagtctgggtacctcagctctgagcggctgatccctcaaagagtgatggaccagcacaaacttaccagggaccagtgggaggaccggatccaggtgtggcatgcggaacaccgtgggatgctcaaagataatgctatgttggaatacctgaagattgctcaggacctggaaatgtatggaatcaactatttcgagataaaaaacaagaaaggaacagacctttggcttggagttgatgcccttggactgaatatttatgagaaagatgataagttaaccccaaagattggctttccttggagtgaaatcaggaacatctctttcaatgacaaaaagtttgtcattaaacccatcgacaagaaggcacctgactttgtgttttatgccccacgtctgagaatcaacaagcggatcctgcagctctgcatgggcaaccatgagttgtatatgcgccgcaggaagcctgacaccatcgaggtgcagcagatgaaggcccaggcccgggaggagaagcatcagaagcagctggagcggcaacagctggaaacagagaagaaaaggagagaaaccgtggagagagagaaagagcagatgatgcgcgagaaggaggagttgatgctgcggctgcaggactatgaggagaagacaaagaaggcagagagagagctctcggagcagattcagagggccctgcagctggaggaggagaggaagcgggcacaggaggaggccgagcgcctagaggctgaccgtatggctgcactgcgggctaaggaggagctggagagacaggcggtggatcagataaagagccaggagcagctggctgcggagcttgcagaatacactgccaagattgccctcctggaagaggcgcggaggcgcaaggaggatgaagttgaagagtggcagcacagggccaaagaagcccaggatgacctggtgaagaccaaggaggagctgcacctggtgatgacagcacccccgcccccaccaccccccgtgtacgagccggtgagctaccatgtccaggagagcttgcaggatgagggcgcagagcccacgggctacagcgcggagctgtctagtgagggcatccgggatgaccgcaatgaggagaagcgcatcactgaggcagagaagaacgagcgtgtgcagcggcagctgctgacgctgagcagcgagctgtcccaggcccgagatgagaataagaggacccacaatgacatcatccacaacgagaacatgaggcaaggccgggacaagtacaagacgctgcggcagatccggcagggcaacaccaagcagcgcatcgacgagttcgaggccctgtaacagccaggccaggaccaagggcagaggggtgctcatagcgggcgctgccagccccgccacgcttgtctttagtgctccaagtctaggaactccctcagatcccagttcctttagaaagcagttacccaacagaaacattctgggctgggaaccagggaggcgccctggtttgttttccccagttgtaatagtgccaagcaggcctgattctcgcgattattctcgaatcacctcctgtgttgtgctgggagcaggactgattgaattacggaaaatgcctgtaaagtctgagtaagaaacttcatgctggcctgtgtgatacaagagtcagcatcattaaaggaaacgtggcaggacttccatctgtgccatacttgttctgtattcgaaatgagctcaaattgattttttaatttctatgaaggatccatctttgtatatttacatgcttagaggggtgaaaattattttggaaattgagtctgaagcactctcgcacacacagtgattccctcctcccgtcactccacgcagctggcagagagcacagtgatcaccagcgtgagtggtggaggaggacacttggatatttttttagtttttttttttttggcttaacagttttagaatacattgtacttatacaccttattaatgatcagctatatactatttatatacaagtgataatacagatttgtaacattagttttaaaaagggaaagttttgttctgtatattttgttaccttttacagaataaaagaattacatatgaaaaaccctctaaaccatggcacttgatgtgatgtggcaggagggcagtggtggagctggacctgcctgctgcagtcacgtgtaaacaggattattattagtgttttatgcatgtaatggactatgcacacttttaattttgtcagattcacacatgccactatgagctttcagactccagctgtgaagagactctgtttgcttgtgtttgtttgcagtctctctctgccatggccttggcaggctgctggaaggcagcttgtggaggccgttggttccgcccactcattccttctcgtgcactgctttctccttcacagctaagatgccatgtgcaggtggattccatgccgcagacatgaaataaaagctttgcaaaggcacgaagcagc

SEQ ID NO: 556 - protein, 567 aa, Homo sapiens
MPKPINVRVTTMDAELEFAIQPNTTGKQLFDQWAFVFRICVESVACFVQVSAQEVRKENPLQFKFRAKFYPEDVAEELIQDITQKLFFLQVKEGILSDEIYCPPETAVLLGSYAVQAKFGDYNKEVHKSGYLSSLIPQRVMDQHKLTRDQWEDRIQVWHAEHRGMLKDNAMLEYLKIAQDLEMYGINYFEIKNKKGTDLWLGVDALQIYEKDDKLTPKIGFPWSEIRNISFNDKKFVIKPIDKKAPDFVFYAPRLRINKRILQLCMGNHELYMRRRKPDTIEVQQMKAQAREEKHQKQLERQQLETEKKRRETVEREKEQMMREKEELMLRLQDYEEKTKKAERELSEQIQRALQLEEERKRAQEEAERLEADRMAALRAKEELERQAVDQIKSQEQLAAELAEYTAKIALLEEARRRKEDEVEEWQHRAKEAQDDLVKTKEELHLVMTAPPPPPPPVYEPVSYHVQESLQDEGAEPTGYSAELSSEGIRDDRNEEKRITEAEKNERVQRQLLTLSSELSQARDENKRTHNDIIHNENMRQGRDKYKTLRQIRQGNTKQRIDEFEAL

SEQ ID NO: 557 - DNA, 3027 bp, Homo sapiens
gcggcggggagcacacggagcactgcaggcgccgggttgggacagcgtcttcgctgctgctggatagtcgtgttttcggggatcgaggatactcaccagaaaccgaaaatgccgaaaccaatcaatgtccgagttaccaccatggatgcagagctggagtttgcaatccagccaaatacaactggaaaacagctttttgatcaggtggtaaagactatcggcctccgggaagtgtggtactttggcctccactatgtggataataaaggatttcctacctggctgaagctggataagaaggtgtctgcccaggaggtcaggaaggagaatcccctccagttcaagttccgggccaagttctaccctgaagatgtggctgaggagctcatccaggacatcacccagaaacttttcttcctccaagtgaaggaaggaatccttagcgatgagatctactgcccccctgagactgccgtgctcttggggtcctacgctgtgcaggccaagtttggggactacaacaaagaagtgcacaagtctgggtacctcagctctgagcggctgatccctcaaagagtgatggaccagcacaaacttaccagggaccagtgggaggaccggatccaggtgtggcatgcggaacaccgtgggatgctcaaagataatgctatgttggaatacctgaagattgctcaggacctggaaatgtatggaatcaactatttcgagataaaaaacaagaaaggaacagacctttggcttggagttgatgcccttggactgaatatttatgagaaagatgataagttaaccccaaagattggctttccttggagtgaaatcaggaacatctctttcaatgacaaaaagtttgtcattaaacccatcgacaagaaggcacctgactttgtgttttatgccccacgtctgagaatcaacaagcggatcctgcagctctgcatgggcaaccatgagttgtatatgcgccgcaggaagcctgacaccatcgaggtgcagcagatgaaggcccaggcccgggaggagaagcatcagaagcagctggagcggcaacagctggaaacagagaagaaaaggagagaaaccgtggagagagagaaagagcagatgatgcgcgagaaggaggagttgatgctgcggctgcaggactatgaggagaagacaaagaaggcagagagagagctctcggagcagattcagagggccctgcagctggaggaggagaggaagcgggcacaggaggaggccgagcgcctagaggctgaccgtatggctgcactgcgggctaaggaggagctggagagacaggcggtggatcagataaagagccaggagcagctggctgcggagcttgcagaatacactgccaagattgccctcctggaagaggcgcggaggcgcaaggaggatgaagttgaagagtggcagcacagggccaaagaagcccaggatgacctggtgaagaccaaggaggagctgcacctggtgatgacagcacccccgcccccaccaccccccgtgtacgagccggtgagctaccatgtccaggagagcttgcaggatgagggcgcagagcccacgggctacagcgcggagctgtctagtgagggcatccgggatgaccgcaatgaggagaagcgcatcactgaggcagagaagaacgagcgtgtgcagcggcagctgctgacgctgagcagcgagctgtcccaggcccgagatgagaataagaggacccacaatgacatcatccacaacgagaacatgaggcaaggccgggacaagtacaagacgctgcggcagatccggcagggcaacaccaagcagcgcatcgacgagttcgaggccctgtaacagccaggccaggaccaagggcagaggggtgctcatagcgggcgctgccagccccgccacgcttgtctttagtgctccaagtctaggaactccctcagatcccagttcctttagaaagcagttacccaacagaaacattctgggctgggaaccagggaggcgccctggtttgttttccccagttgtaatagtgccaagcaggcctgattctcgcgattattctcgaatcacctcctgtgttgtgctgggagcaggactgattgaattacggaaaatgcctgtaaagtctgagtaagaaacttcatgctggcctgtgtgatacaagagtcagcatcattaaaggaaacgtggcaggacttccatctgtgccatacttgttctgtattcgaaatgagctcaaattgattttttaatttctatgaaggatccatctttgtatatttacatgcttagaggggtgaaaattattttggaaattgagtctgaagcactctcgcacacacagtgattccctcctcccgtcactccacgcagctggcagagagcacagtgatcaccagcgtgagtggtggaggaggacacttggatatttttttagtttttttttttttggcttaacagttttagaatacattgtacttatacaccttattaatgatcagctatatactatttatatacaagtgataatacagatttgtaacattagttttaaaaagggaaagttttgttctgtatattttgttaccttttacagaataaaagaattacatatgaaaaaccctctaaaccatggcacttgatgtgatgtggcaggagggcagtggtggagctggacctgcctgctgcagtcacgtgtaaacaggattattattagtgttttatgcatgtaatggactatgcacacttttaattttgtcagattcacacatgccactatgagctttcagactccagctgtgaagagactctgtttgcttgtgtttgtttgcagtctctctctgccatggccttggcaggctgctggaaggcagcttgtggaggccgttggttccgcccactcattccttctcgtgcactgctttctccttcacagctaagatgccatgtgcaggtggattccatgccgcagacatgaaataaaagctttgcaaaggc

SEQ ID NO: 558 - protein, 582 aa, Homo sapiens
MPKPINVRVTTMDAELEFAIQPNTTGKQLFDQVVKTIGLREVWYFGLHYVDNKGFPTWLKLDKKVSAQEVRKENPLQFKFRAKFYPEDVAEELIQDITQKLFFLQVKEGILSDEIYCPPETAVLLGSYAVQAKFGDYNKEVHKSGYLSSLIPQRVMDQHKLTRDQWEDRIQVWHAEHRGMLKDNAMLEYLKIAQDLEMYGINYFEIKNKKGTDLWLGVDALQIYEKDDKLTPKIGFPWSEIRNISFNDKKFVIKPIDKKAPDFVFYAPRLRINKRILQLCMGNHELYMRRRKPDTIEVQQMKAQAREEKHQKQLERQQLETEKKRRETVEREKEQMMREKEELMLRLQDYEEKTKKAERELSEQIQRALQLEEERKRAQEEAERLEADRMAALRAKEELERQAVDQIKSQEQLAAELAEYTAKIALLEEARRRKEDEVEEWQHRAKEAQDDLVKTKEELHLVMTAPPPPPPPVYEPVSYHVQESLQDEGAEPTGYSAELSSEGIRDDRNEEKRITEAEKNERVQRQLLTLSSELSQARDENKRTHNDIIHNENMRQGRDKYKTLRQIRQGNTKQRIDEFEAL

SEQ ID NO: 559 - DNA, 960 bp, Homo sapiens
ggcggggagcacacggagcactgcaggcgccgggttgggacagcgtcttcgctgctgctggatagtcgtgttttcggggatcgaggatactcaccagaaaccgaaaatgccgaaaccaatcaatgtccgagttaccaccatggatgcagagctggagtttgcaatccagccaaatacaactggaaaacagctttttgatcagagacagggtttcgccatgtttgccaggctagtctcgaactcctgaactcaagtgatccacccgtcttggcctcccaaagtgctgggattacaagtgtgagccaccacgctcagcttgcagccttcccccatcccttttgggtgagtgggaagagggggaagaacaggtggtaaagactatcggcctccgggaagtgtggtactttggcctccactatgtggataataaaggatttcctacctggctgaagctggataagaaggcaagtgtctgcccaggaggtcaggaaggagaatcccctccagttcaagttccgggccaagttctaccctgaagatgtggctgaggagctcatccaggacatcacccagaaacttttcttcctccaagtgaaggaaggaatccttagcgatgagatctactgcccccctgagactgccgtgctcttggggtcctacgctgtgcaggccaagtttggggactacaacaaagaagtgcacaagtctgggtacctcagctctgagcggctgatccctcaaagagtgatggaccagcacaaacttaccagggaccagtgggaggaccggatccaggtgtggcatgcggaacaccgtgggatgctcaaagataatgctatgttggaatacctgaagattgctcaggacctggaaatgtatggaatcaactatttcgagataaaaaacaagaaaggaacagacctttggcttggagttgatgcccttggactgaatatttat

SEQ ID NO: 560 - protein, 166 aa, Homo sapiens
SWIRRQVSAQEVRKENPLQFKFRAKFYPEDVAEELIQDITQKLFFLQVKEGILSDEIYCPPETAVLLGSYAVQAKFGDYNKEVHKSGYLSSLIPQRVMDQHKLTRDQWEDRIQVWHAEHRGMLKDNAMLEYLKIAQDLEMYGINYFEIKNKKGTDLWLGVDALQIY

SEQ ID NO: 561 - DNA, 101169 bp, Mus musculus
  misc_feature (1)...(101169): n = A,T,C or G
gataatgtagatgggggaaatttatcacagggaaacctcactcctaggcaaagaactagaagcaactaaggaatactgagagcaagagaaatagtcttccccagggaagagcatacaaattggttattcaataccaaatgctctgccctggaaacaaacatacatgcaagtaacattagacagatttagcaagttttgttttgtatgtatttatgtatatacaaacatattatatatgtgtgtgtatatatattatatatatgcatatatatatatatatatgtaacatatatatatgcacaccatgaatttgaaaaaggagatatacatagaatgccttggagtgaggaaagggaggagtaaattatacgattatattataaaatttttaaaattataattaaaaaatgttgaatacagccaggagttgtgatacatgcctaggcagaggccagcatgtccttctgagttctgggaaagcctgctctactagcaagtcctgggccagccagggatattcagagagaccctgtctcaaaaagaaaagcatttaatgcaaacccatcagcctggaaaaattcaaagtgaattttctataggaatttgcaagggattatctgcacctgttctttttatatatgaggaaatgaggtgccaaaatatgaaactcattcaaaagcagggcagtgactagaactttctcatctccacttgatgcccattggctccaaacaaaatttctgttctcaacactgaaaaacctacaaaaagagttcatcccaacaaccctagaaaacaagcatctttatctggataaacgtaaactggagaagtaggctctattatttttatgaagttttcttttttttttcttttttggaaagtagaatagtttatttataatttttttttaaattctttttttattagacattttctttatatacatttcaaatgctataccaaaagtcccctataacctccctccgccctgctcccctacccacccactcccacttcttggccctggtgttcccctgtactgaggcacataaagtttgcaagaccaaaggacctctcttcccagtgacggtcgactaggccatcttctgctacatatgcagctagagatacaagctctggtagtactggttagttcatattattcttccacctatagggttgcaggccccttcagctccttgggtgctttctctaactcctccattgggggccctgtgttccgtcctatagatgactgtgagtatccacttctgtatttgccaggcactggcataacctcacaagagacagctataacagggtcccttcagcaaaatctttctggcatatgcaatagtgtctgggtttggtggctgattatgggatggatccccgggtggggtagtctctcatactttgctccttaaaacttaccttcaagaggaaacagttagtttcaatgttcaaatgttcaacagttagttgaacatttacaagaagctgtactttttgttttcagcgtgataggaaatgaataaaactcacatgtggctactgctggctttcttatgtagatgctgggaagctgagtgcagatctgatgcttgtgtagaaagtattcttacccactgagccatcttcccagcagctctgatctggctgcaaagatgtctgagccatgtccaccaatatagcagtctgttgtcattgacagcactttctattgaagtttgcaatctaagcctcgggtggagccatgttgtgggaggagcatatatagctagatgatccaacaaatatttagaaagggcttacgggggacggggggacacggaaaatatctcagtcacaaaagataatgttcaccaattaggttttctctcatcagccccccatccaacctcttgcctatctaggctctcaggcatctcttacagatcaacaatactagtgtctcagtcttaaattctatccctcattagcataatgactctgagtttcctgatgctcaaaggttaatggtcactcagaggttagaggcgggagtcggtgggcggagtcaaacttctttaaagactagccttgcagaatgtgggacccctcaaggctccttacttggaggtctcagagacctccttacaaatggagctcttagagactttccaaatgctgtgaccctttaatatagttcctcatgttatggtgaaccccaaccaaaaatttatgttcactgccacttcataactgtaatattgctactgctatgaatcataatgtaaatatctgggcatcccgttggtcttagactacccctgtgaaaaggtcatttgacaacatctccccaagatgttacaacccacaagctgaaaacctgttttagcgtggttttatcattgcaaccaagttcctgacaatcaattacttgatggaggaagaattatttattttgattcattgtgaggaaggctggattgcaggactattattcactggctgatcacattgtgtctacagtcaggaaccagagagagatggatgcctgtgttcagccccctttcttctttagattattgtggggactgtagcacatggaaggtgtgctatggcattcctagtagctcttcccttcccatcctcagctcaggaaactactgtactcctctgactgtgtgtcctaggttactctgaatccagtcaggttgataatgaagattaaccttcaccagagagaaaaccagagcagggcaggaaggctgcaatgtctcctttgtagtcaaggaaacatgtcgcctcttttgaatattttaatggaccttgaccctcttgggctagctctagttctttagttcctgttagactttcattcacagcactaaagactaagaagaaagccataaaggtcatctaatattctggtgtctgcagacctaaagaaagacttagtggtacatatcttagctagttagttgaggcttctctttagaatttagaatactggggggctggaaagatggctcggtgattaagagcaatgactgctcttccagaggtcctgagttcaaatcccagcaaccacatggtggctcacaaccatccctaatgagacctgatgccttcttctggggtgtctgaagtcagctacagtgtacttacatatagtaaataaataaatctttttttaaaaaaaaagatttatttaaaaaaaaaaagaatttagaattccaaaaggtggggatataaaaaggttagagagcagaaaccaccttgtggaagggcaaagaacactagatcttaggcagaaggccaagaagcagcaactgggaagggcaaagtagctctttaaagaggattccaaagatgcagcttcactttgggccttggaataaataactgagtttaactctgctcgccttcatgtctacacaacagtctatttgtttctctgcattcttacccacaggttacagtgtaatctcatagcatgtctgacctgttattcatttgctaaggccaagttgacagttgaggatagctggagagagagacagagagtaattttgggggaatgtagagtggcgaccccttgttggttgtccatgctccagtggatgaccccatacccaagtacataaagtattaatgagacttagtgagaatttaagaaaaaggatagaggacatggagttggaaggggactgtgcaggggaatttttggatttaaaggttgtagggaatgttattatcataaaacattgtatatatgtctgaaactctcaaataagataattttaaaaacaagggcagtgggtcattagtataacctcagtaaatgagctgtagcataaataatctattttttatgctttgtaactttttattagaaaactttgaaacatgcaaaactaagccccaacaaaagtaaggaacccgcgaggtctcattttctagtcttaataatcaccaactcacgcccagtcttggttcactcaacactggtgttctatgcgttcgtgtttattttatgcaaataggtattcgacattaaaaatacttccacctacactgtttcctttgatccttctaacagctataaaaagtaggttatgtgattttttttacataagaatctctaataaatttctctttaatgtacatgcccattttaaagacagtaatggggggagtggaagtttaaatgacagtgtgtggtttatttattggattttcatacattttattagtaaatggaaaatgacaaatactatcatgatgtatagctttctctcttagttcaaataaaactattgttttgtttttttaagataattattactgtcagggctggagagatggagcagtagtaaatcgtgcattctgccttcccagaggaccatagctcagttcccagcacccacatgaggcagctcacaaccactcacaactccagctccaaggagtccaacattctctagtttctgtgggcatttgcattcatatgcacatacctgcacaaacacataacttaaagtggtgaaaataaatctttacaagaaatattgattaatgtcagttccaagttttctagaaaattgggtagcgataacctctatcagggttgttctacacaaataggattctggtaggactaaagagatggcttagtatgtaacggtgattgatattctatcagaaaacccaggtttggttcccagcacccacacagtaaatcacaaccattcctacctctagtcccaggatctgataccctcttctgaccttcaagggcaccaggcatgtggtatgtaggcacgcatatatgcaagcttctcactcacatgcatgcaaaaaaaaaaaaaaaaatctcaaaaaacaggaggcattttactgaacaaactacattttgttcatagctgcaaatacctgacattgtaagcaagcattctaatctcaaacaattctgggataaaatgataaattataaagtgtaatttaaaaaaaaaagaaaattgtaaaatgataaagaattcagatttatgaaaatagacaaacgagccatttaaaatacattctgaatgtcatgtttctgccggttattaaataaaactggtggcatctctgaaattcggggctagagtcgcttgacataattctttcacgtagctgtgtctgatgtttggaaagaaagcactcatattcacgtgcttggttaacgtggtatcaacaccttcatattaaaccattgcttacacatggattagctcggagtctatcaattgatgagcacaaccacagtatcatcatttagatatttataaacacgtaactgtataagggtttttttttttcccttgatctctttcttgtttgactaagaataccaagactgtctgtccccagtgcccacttgaaggttgatttagtcacacttgcaaaaccccaggcttgaatgtcaagagggatcaattcaccacggtgggctaatcaccctgcaatcttcgtgctacagagctggctgcagatccctcatcatagcaaaggcaaatgtttagtccggaggcatgctttttgccaactccccagatgagattattttttcacctctgtgtatttgagaacaaggaaggcagagaggccagcaatccaaagcttcattagtacaggagaagcaacactcactttgctacacaaataattagagagattaaatgagaataaacactgagaggaactgccgaggctctgaagttgggtaattattttaattactctagtgacttccaccagccttcattatcagccacagatcaaattgcaattgttttatgtatgaatatcatgagcgtgagctatgtggaaaggcacagtagctacccaggaatggtagctacccagcacgacattttctttaagctatctgtaatggtttccattccaggacctgataaaccctacatattttttttgaagatttatttattatgcacagtgttctgcctacatatatgcctgtaccccagaagagggcaccaagatcacattacagatggttgtgagtcaccctgttggttgctgggaattgaactcaagacctctggaagagcagtcagtgctcttaaccactgagcctattgtccagcccaaaccctacatattttaaatacacgttttatactagaaagtgtcaggtctggggttgtcatagttagggttttcactgctgtgaacagacaccataatcaaagcatctcttataaaggacaccatctaattggggctggagtacaggttcagaggttcagtctgttatcatcaaggtgggaagcatggcagcatccaggcaggcaaggcactggaaaaggaactgagattttttcatcttgttctgaagggaaccaggagcagactgtcttccaggcaggtagtaggtaggtctcaaagcccacccccacagtgacacacttcctccaacaaagccacacctcctaatagtgccaaacacattcaaaccaccacatggagtctttgttcttctgatggacattcttgataactttgcctcttcacttagatttgatcatgaatgatttgggcgccacgttttgagtcaccgaatgtgaaacagtatggcacacctagccatttgaaataaatgtcacttggaatcatgctatcttattgcatatgtgttatttggggtaaacccatttctcctttaaacgtctccctataccaacttaggaagagaccagaccacaccacctgggatctcatgggggtcaattatagccagtcttgttcagaaaataagtttcttttatacttgtgacaataatgattgacagagatttccccagtgatgccaattcttctggaaaattatcttgtgcccagttttatctcctcccttggggattgtctaacttaccccatttaatcttttcaaaatcccatggagtatattatatattactacccccattttccagataaggaaactgagtagagaggacatggagtgggggaggggtgcagagaggggaggagtcaacggataacaatgtataacaatgtataacaatgtgtataaagaaaaatcccactactttgtatatgtattactggcttctgttgctatgagaaagcatcctgaccaaagaaatttatagaggagactattggaacttattatatttccagaggttgtgggtggggagcagcagggggtgttcctgagcaggaagctctcacatctctacaggctaccaaccagagaaagcaaactatatgtttcctctcaaagcccaaccccaggacacagatgctccagccaggccacacctcctacgtttaaacaggtgcacctggaagaggctttctcattcaaaacaccatagaattctaactcaataaatcaaaatttaaaaattaaacagactttccgtggctccctgactcaatttataaaagtagaaagtggtctgactagcaaccaaatccaggaaccagggcaatcccaaaggaaggagataaacgcaagggctggaccctactaaatagtcttgctccaacttgacaagctaaagttatttgggacaagggaatctcaagaaaatgcctttatgagatcagactgcaggcaaacctgtagggcattttcttatttagtcattggtaggaggagggtaacagcccattgtgggtggtaccaactgtggggtctgtaagaaagcaggctgaacaagctagtaagggtccttccttgggctctgcatcacctcctgcatccaggttcttgcccctactgggtttctgttccagcttccttcaatgatggactataatatcaacgtatacgcccaatgaaccctttactccccagtctgccttttgatctcagtgtttcatcacagtgatagtagtcctatctaagccaagaacacggggaaaggagtgtgacaacagtccttgaatgtcttagccgtttgagatcagtgattctgtatgctagctaacatcccaagttagattccatgtttgatggtcaaagtctctgactagccccattcctgggggaaacacaattcagacggggttttataggtgcagactaccaaagacatccatcccactgagtttcacccccaatatctctaggcatctctcttcaaccgaatttgagatgtccaacaaagttgggaaggattcataacaactttgggaaagagaaggggattggacacatttgtgtgttactgtctggagtttaagaaaagtctgtagagattcccctcagttttcttccccttgggatgctggcacagccatcacactctgaggtagaatacagcagggagtctaatgggatcactgttttaggatcttggcctcaccactttgcacaacattgggctctgggtgacacaggaaaggtgggactgaaggctaggacttagttggtttgtggagaaagggagaacgtttgagaactcactattagatgtctgtatctaagtgtaacaaggcccctagtaggcacctagaccttaacacaactgcctcggcggaagcaccgttcagggtataaagctcagcatgtagaccgtaccacctgccaaaacggaaacaaaggcccaatccatcaaagtccatatagtcacgggaagtctcaaaatgcactaaccttgctttttaccttttgtagttccgattctgacgcactgttcttgttaactgaagtatgtcaacccagaacgtggcttttgttgtttaggtttggttttttgttttgttttatttttttgttttttggtgttgttgttgttgttgtttgcttaaacgctcaccctgagaaagcctcagcgctaccttgggattcaaacacccaatgtagtcaccggctggctaataaatgctttatatatttgcttcaacccaagtcggagcagtcttctctagtgactaccccacaacataagagagtagttgtgaaaattcacaggtgcgcagtgccagacaccgaacccaagatgcaggacacagccacgtgaaggtggaggatctgccccagcgtgctgcttgttcctcaggaacatagtcaaaaggattttcatgcgacagagaaagtcgggttgcggaggaaaacggaatcagaaatgattcattgggggtgggggtgctttcctcagactccctggaatgtgcttggaatgagaacagcctggggttcgttcggctaatagattctctatatatgagagggtcttccaggtatttccgcttgccatcctctgacccacttgatctgatggcatcacctaggaagaccggtcactcacagccaggctgtgctgatgatgtgcagtgaagaggcagtgggttctatccaggacgcccacgttctatttccactaagtcagttaccactgacctcaggaaattcccttaagtctccatcttctgctccttcatccagaaaatgaaggtgattccacctccaaagcctccttgaaaggattacagggatggtcctgggggataattcctgtgcctgcaaactgggaaggctccaacatgaacaaaagcaagttacacatactcagccggagttgtcaaaatgtcccccacagatccaactgtggccgagcagttgcgattgattccttggaatgggctggcacacatgccagacacctatgtgcggcaccccctccatctctgtgggattctattgatttctgcctttcaagagaaagtggttctctttgctgaggttctgtacaccaaccctcaagccagggaaggaccgctttgtcccctccctctttctccttctgccctctttaggactccggacttgtcacacgtgaatgggtttccttggctgatctccaaagaccctgcagcagttcagtgagctgaaccctggggcgatctgaaaacagcacccaccacctccacacacacacacacacacacacacacacacacacacacacacacacacacacacaccccaggcagaggtcgcgcaacccagcagagatcctcctccctacccctgcctctgcccgcaggcagcgcctggtgccaccgggctcagaccccgcagagagccttggcccttcccgcctccgccccgcagcccctctccgccagtagcagcgctgctatcttcccaccggagcactaggaggacgccggagtctgcagcgcccccgccccctcgctttttctttctttccctgctttgggatcttgctgtctggagccgggagaggttccgagaaggagagagcggcacaggtttctgccgcggcgctcgaacgggagcttagggacgcagcatcctcggtgtccacccgggatcgcagctgcaccggccgacatgtgacggaggaaagccctcagcattcccggcaaccgccttcaaaggggtcccggaacgctcgcccaggccagcagctggatcctcttagccctcagcgacgcgggacaggagcgacaaggtacaacgcctggtacgttccaggctcgcactcgggaaaagagcgcagcggggaccgccgcctggcttgcactcggcacaactccgggacctgcggagtgcggctggaccgtgtccagattcccgccgacttcatccagagtgacccaagaccctagccggtcctcctgcaccccctggagttctagcttgccctgcatctgcgccgaccccacaacgcccaggtccccgcaacgccccagtccggaaggggagcgcgcttgcggcttctccctgattgcagacgctgccgctgtcctaactgcacacagaggtcccctacccggagcctagtccttgcagggggtggtgtccgagacgctggggagcgcgcaccatgaagtccgcgctgtgcagccgcttcttcatcctcctgccctggatcctgattgtcatcatcatgttggacgtggacccccgcaggcccgcgccccaactcacttcccgtccctacttctctccccatgcagtgggctgcgggggctcccgagtcccgctccgacggagtagccccgggcgtgacgctgccgagaagcggaacgagtctcggcctcagctgcagccggagccgcgcttgcccaccatctatgccatcacacccacctacagtcgcccggtgcagaaagccgagctcactcgcctggccaacaccttccgnnnnnnnnnnnnnnnnnnnnnnnnnnnnnnnnnnnnnnnnnnnnnnnnnnnnnnnnnnnnnnnnnnnnnnnnnnnnnnnnngccggcctgcccaacacgcacctgcatgtgcccacgcccgcggcgctacaagcgaccgtggctgccgcgcgccaccgaacagcgcaacgcgggcctcgcctggctgcgccagaggcatcagcatcagagcgcgcaacccggcgtgctcttcttcgccgacgatgacaacacgtacagtctggagctcttccaggaggtagtggtccagcgccgatggtggggtgtagggtgtgtgtggggggaggggggacaaggggcggttgggccccgaaggtctgcatgccctttgtgcttcctgtacacttttgagttctcagtcccttcgagcacgcatcccgcactcggcgtggagcagctgaagatgggcagtccacagcctcttcggctggctgcggtgggtggagaaggggtgttggtgggtggagaagtctgccccgaggtgtcttgccctgtccgggattgtgttcagtaaataatagtacaggtgatttgcccaactggatgacgcccaaagctggagctaggcttgattttcttggagactggatcagtgcctacaggtgattctgagtggagacaaatgtgggataaaggtactatcccacatatcatcccactgagttgatactaacaactcagcttagggaccaatctcttctagtacagccagccccctggtgtgagattgatccctggtacatgcacctacgtgtatgagggagggtcttcctttggtctttacctatcgcattggcaaatgaattagaattattctgcccagtccttaaggacccgccccccacccctgccccaggcatcacccgaatggcctgctgggccattctctgagtggaatttatcaagccactcttgcttggcctgagttccttgagcgctgccccgccccctgctgctgaagtggcctgtgttccctgggaggccacctgcatgcagccacagggatagagccggtggcctttcttgagactgttttgtggtaatgttgtaggtctgtaagggttggtgatttctctctctctctctctctctctccctccctccctccctcccttcctctttcccttcctcccccctttctctccctctcttttcctcttcctctctctcccgcacgcctcaacacttagttacagctgaataaaatcttaatttctttgccccgtgggactgtagatctccacctaaaattcctcgacatccagcctcctaaagactccctgacttcccagctcctccattacccccagaaaactggacgttcgggagatagtgtgtgagcaggacactgaattcataaaacaactgtgtgtccagcaatcaaatgccctaagtgccccccacctagtgtcacctagtgtcaggttgctttcctagcctcaggacaatgactatacccttcccgtttaaaaagtatttgccacccttcatttctactctttccttgtattaaaaaaaaaaaaaaaaaaaaaaattgttctctagactctcattccatgggacttgctgttcatgtttccccagagaaataagcttggtttagtgtatagcatggattttattatacccatgattagggttatcaaatgattgctttaaagctggacttttattttaaagttaagttgtttctttgctctttcctctaaaaggaggacttgtgttttgaagcagaccttttaactctaaatgcttgtttatttttaagccaagtctttcttgcccaactctgaaatcactttacctatgacgcgtcatcttgtttaagaaaaatagtgcacattgctgctaattgacatttgaggggggctaagctggaaaagaggaaggattgcttctgtgccagcattcagcctgttggcacgaggcgttaaaggagtagaaaagttggcacatgcaggcagggagacaattcagatacagtctcctttgagacttcccctgatgaaaggagagcttgtgtgaagggtattaaagagcagaaggaaattggggatttttttccattgacctgtggggggggggggttgggaaggagaggaaagagtagggagggaaaaatattgtattggcaatgagaaaataattttttcaaaaaaaaaaagcaagtgaaacttttaaggcacaaacatttcctacaattggaactagtgtactactaataatacatttttcagaccctgtgtaactttttgtgaagatacacaaaatacacagccgtgtattgtcctttgtcaccgtaagatgcaggacactctgtcttcagaacctctctctcagaagcagtttaaggcaagggcctttcctcagcgtgccaggtcccgcctcccagctatagatactcacaaattgggctttcgttgttgttaatgggggttgcatatcttattctccttattacaatctcaacatgacacccaatgtgcttgattagtgggctttatgcctcctcctgtatactttctataatttcatgtttatttgcctttaagtgcttggttttattgatggggtgactcactctgcaccccttctgcaattaatgattgggggtggacttcagtctagacactgttcccctggagaaaagagagaaacccataaactactcagtgcttcagctcctggggggtgggggggagacaaagagaggctacagagatgaggcctgtatctctgccctttctattgaccacatgtacaaatttgtttttaagtaattcatagtatgtaaggaaagaatgtctcaaagctggctctatcttttgttcatagagcttctaatctccagagctgatggtttaaaaaaaaaaaaaaaaagcaagataaaaggaagaaaatgaagcaggtacaaattagctcactgaatattggcttcaaatgaaggagagtaaaaaaatgaaaggcctccaaattaaattaaagacgcaacaggcaatctgcattcaattattcctctctggtaactgggatagcatcttttttttttttccccctcttgtacagctaactaattttcagcttcccttttcaactgagccatgctgccagggaaagagtgtttgcactgaacgagaaccgaatcaatctgcaaatggagctgagtgcgagctgaagcctgggaagctgtctaccgagaaggaggtagcagggcctttgcaggcttccggcacctcagctactccaggcctctcagtgggcagcagtggcgttttgcccctgatggaccactgataatcctgctggcctgtctacattgattgagctttctgggaaagcttatttgcaaagcatttggacagctttaataaaagccacaagtacagataaatgggactttatagctggtcatattttcaatagcgctatcgaccaggtgtctcttcttcaaggctttcccaagcttaaagtgatttttttcagctgaaagtagtttcacctttgcaaatcaattgaattgaaagggttttttgtttttgtttttggggggttttttgttgtttttgaagaagaagaagaagaagaagaagaagaagaagaagaagaagaagaagaagaagaagaagaagaggaggaggaggaggaggaggaggaggaggaggaggaagaggaggnnnnnnnnnnnnnnnnnnnnnnnnnnnnnnnnnnnnnnnnnnnnnnnnnnnnngaggaaggagaagaagaagaagaagaagaagaagaagaagaagaagaagaagaagaagaagaagaagaagaagaagaagaagcacttgccaagcaaaaccccaaaactttaatcttaacaagataagacagaaggcaaaaaccaactaagagagtcaagtgacaccggagtcagccaatgagacagtgtggaaggcttttgcatagtcaagtgacaccgagtcagccagtgagacagtgtggaaggctttgcagaaagcagaggatgaaagggtcaaaaggccccctatcgggatttcattctggatgctgctacctatctgcgtgctgggcagccagagcagtggccttctgtggtcctgatgctttttaaagcattaccatctcccttctgcaagctgcttacaggagccatagcccagtcggacacttgggatcacagtgctcagcagcccttcccaataggcaccaatgcaccctgaaagcaggcctgactttcttgctttctttcccctgacctagtggcctagctgaagggaactctctgtaaagaagccgaagagcttctcataggtgtagcctggcaaggctgccctgagcatattccgtgtatattacgtctttccctctgagcccgtggtaataggccataggactgatgaaacacgactttattgttttacttcttagtgactgtaaaactgcagccagctttctagatgttagatctatagatttatcctcatgccctctgaatgaatattattacttgagttatggttctgctctgatagttttcctgagaccagtggcttcaatgttttaatgggccagaaacaacaatttgggtttaaaagcatggccgacctgcctcttcccattgggttttcctgcccctctcctcctctctgcctacttttcactgacgagtctctcatgaacaggcatgaagacatgcccagagtatcatttggtgtgacagatgtgtatcttcaaaacatttaagttgttgtttgctgcctcttggatactagagtaggtggctctgttttcttctgtctgttccacttgcttctaaattacgatctggtaaattttctcttgtgtgaacagtaatagaatagtaattgcttttaagacatgctgaaaaagcaaatagaacaaaagtcggacagcctcatttagccaccacgggtggtgttcaaggtgtgtgctcgcgagtgtcacgggattcagccctgccgagctatagagattgaagcaattctcatgctaggatattctgcaggctggtaaggaaacacatcattgtatgtttgattcacagggctagtggagcatgaaatttgggttttgtgtggttctcagatcctcttctaaaacataagtgaaaatgttatagccgtccatagaatgcttttccaatttgcagaagcaaaaccataatgttttttttcagttgcacttgatatatatatatatatatatatatatagagagagagagagagagagagagagagagagagagagagcacagttttaaataagtgtcaaaaatattttctagaccagtggttcttaaccttcctaatgctgtgaccctctaatacagttattcatgttgtggtgaccctcaaccataaaattacttctgttcctacgtcataagtgtaattttgctgctattatgacttgaaatataaatatcgatgttttctaatggtcttagatgacccctgtgagaggaccgtttgaccacaaaggggcctcaacccacaggttgaggaccaccgctctaaataattatggaaggccgtggcaagcaaaatagggaatggtggagctcagtctcaaccactataaagcagctccttacacccaaggctcaggggtcattgctgcagagggaggcagaaagattgtaagagcccgaggaaccaggagtttactgtgaaactgtgtctcctagaaatgtcagaagctacacccatgatcagaggacacattttaacaattggtctttccttcagccatgtgggcttcagggatcaaagtctggttatcagcttggacaagaagcactgctatttgctgagcccccttgctgaccccatccattgagttttacttgtagcatctcaaggttgacggtgcctgctgagataaataccagcacccccttcctctctgtatttggataggaaggcagtcttttgatgagggaacttaatgtcaataaaacttgatgatggttcactgttttgcaccagttgttataaacagtatcctcactttaagtagaagtatccaaagtatcttgaaaacgtcatatagctggtagatgcagggacaagagcttgaatcagagtgcccaagtctagctcgaacaactggcttcccagaagttcccatttagcgaacacagttgtgtaaaacatggagcagaaatctcctgaagtgctggctggccccactatatttggtcttccttcttgactgcagcaactcttaattttgtgttttaaactctatggatgaggagtattgggaactaaattctggcattttacccctgagctataactccaaccccactgtttatttaaaattgataagaattgtaaacacgtgtacaataggatgccaattttttttatttcatttatatgagtacactgtagctgtcttcagacacaccagaagaggacatctgatcccattacagatggttgtgaaccaccatgtagttgctgggaattgaactcagaacctctggaagagcaagcagccagtgctctttaccactgagccatctctccagtccacaacatgatgtcttaatatagcatatactttattaaaggaccataggtggttaactagcagtcaactcatatattcttcatggtgactgcttaacatagtccttaattttaaaacacctacgattattatgtgtattgctatgtcgtcctatgtatgctctgtattttatcaactaactgaaattttgcataccttagccaacaaattcctagccctgcctacccttgccgtttgatcttgggattatttcatacactccctcactgactcgacttgtagaccatttgattttggagattgttttttcgtgtcagttaaaaattgctacatttgcatgtaaactgtactcataatttttaaaaattatgtgttcctgtgagtaatgattaagaatctccagagctggggaggtggctcagtcagtaaaccgcttgtcttagaagcacaaggggcctgagtttggtccccacaatccatgtttttaaaaaacaatactaggtgtgggcatggtgtgcttgtaatcccagatctaagggctcactggccagccagccttgcctacgaatgagcttcaggcctgtgtgagatgttatctttctgcaggtaaacattaaggtgtgtacataccagccacttgatctcttagccttctgtcttctcagaatagacagtgttagatgcaaggacatttcagggcacagggctgggtgataattaaactgttgatcgttgataattgagttgagctggatgtgtggatggcagatagctgctgctgcccactctccaggggacacacagatgtacttgtagggacttttagtgcacagcagcacctggtgtgggctgctgatggccggctgctcgttcagaaccaccttcttgctggtaggattgttcttgttcttctggaattagggctagccctacattaaaagcaaaattaataaatcactctttcatgcttgaaataaaggaacaaggaaaccagcaaagaagtaaagaaaaaaatcaagggaaaagagagagaggagagagagggggggggagagagagagagagagggagagagagagagagagaagctagaacctcagagatggcttttctgaaagggagaaaccatgttctcccccactgtcagattgtttggtcctttcccacaaatagcaaactcagtcatcttctttttttcttttaatatcaaccttctccattaatagacaaagaaccttaagtactatgtagagtccatttgaactgaaggccattattgttccttcagctctgatggtagggacatatccaaagaactgaggcagtgtgcagttcagtgactgtgtcattagcatgggcctatgatacagacctatgtgacatcttgatgtaaatcaaagacacagtgagcatgagctcacccagtacagggtgatctgtcttcttgtcctttttaaagtgtccttcactctaacgtaacaataaaaaatccagtaagtggacaagccagtagtgtagtcacctagtaccagtgacaagggcacagaattgcatgtgctgttacagaactaaactcttatagtgccggctgcatggtcagttcatttatacccatgtcaccatagacacataacagaatgcgctatgctgccacacttggtggactccaatgggcaacggattttcaaccctgttataatctcataggacttcatcacaaataaggtctgtgggctgaccaaattgtatcttcatctctcgaatgaaaactgaaagtgttagatgctggcctttcccccatatattgtgtctgtagatcctatgtaactgaccttaaacaccatcacaatcacaatgtaacgcatatgattttagtatctactggaacactgggcaccatacccagggaaggctctccctggcatgtgtgtccagactaagagtgctatgtttgatgtgtgatgggaggaatggctgtgtccttagtggattcgttggtgtggcaagtcgttgaggaagtgataccttatctgagaactgaaggatgaaggaccttgtgggtggtggcataggaagaaagagctgtctagagatggagccacctgtgtgaagctgaggaaatgagatgtggaatactcaaggatctgaaagatgtcccagtggggtccagggctggcattgggagaggtcaagtagaggatggggaggacacttgtatatcctacatgttcacgagtggccctgctctttgggacaaaattgagcatctctgtccaaacctgtcctgcaaaaaagtcttccattgtcaatatttgcaagtgctatttaagtcacacctgttgtgttcattttcctggaaactgccatgtttttgtgtaaatccataagctagaaaatacacacagagtgcaaagggcacactttgctctgtatttagcttttgctttgcatctagtaacagaaatgcccactgggaaagtgaactttttccaacagagcttgtctaagatagggagcaaattgatacatacatatatcatacatacatacatacatacatacattgttttattatttacatatttatacatatgacaagttgctgttacttttaatataggatcttggtatataactaaggctgaccttccctactggtctccctaggactgggtttacatgtcacccagctgataggcaagtatttgtgtgtctaatacaaacagtatcgagaaagcagtaacctatgactagcattaccttaaataatatgatagatgtgttatgcctgcttctccagctggaatacaaaggttggggttttcttttatttacttctgtaactccagtgtttggagtcgtgctagcatgtagcaaatgctcattaaatatttactgaatgaattatttggagatttagatgctgaaaggatttattactccagaagaaatttgataccagaaaacagtcctgcaccccaagtggcattcagataatcttctcgatgtctctgttaaaattgacttgaaccccttaaatagtaacaaaagtgttcatgctacgcagggaggaggtgaatgggcacccatgtgttaggaaggcagccttattaacagttacaaaagtaggaggtttgtcaatgaagctaaaagccagtggagggctgggcttccccgcctgcaaggctgggtgcaggcagggagcgcgtgctttctggaatgcttcacccccaccctctccccgctgcaagtgttgtggcatggagagtcagtgaagaaaactgcctgtgcccatgagttacatattttcgagcaccagctcctgatatctgaactgtgcttcttgatgcctcgtgaaaggaggagaggagggttcttggtctatacccaagtggaactgcattaatctgtctcttagttacacccttgggtggtgccagaataactttagggacgagaataaaatgaggcttttataccacaaaggattctggttaaaatatatatatatatgatctgtgaccacttcttagtttctctgataaaatagtattactgaaatcaagctggggagaaaaggacctatatcatcctacatccttgctacgaatggcccccatagactcctgtgcttggatgcttggctatagggagtggcactattaggaggtgtggccttgtgagaggagtgtgtcactgtggaggcaggcttggaggctttttttttttttttttttttttacgtatgttcaagctatgcccagtgtgatgcacagtcctctcctgccacctgccaatcaagtagaactctcagctccttaagctccatgctcgtctggatgctgctgtgttccctaccatgatgataatagactgaatctctgaaactggaagctaacccccaattaaatgttgttctttgtaagtgctgccatggtcatggtgtctcttcacagcagtaaaaccctagctaagacaatcctgtagcctgtcgtccaggcaagtcagggcaagagctcaaagcaggaacctggagatacgaactgatacagagaccatggaggagtgatgccttttggcttgctccccatggcttgctcagactgctttctttctttcttttttctttctttctttctttctttctttctttctttcttttttctttctttctttctttgcttgcttgcttgctctctctctctttctctctttttcttccttccttccttccttcctttctttttctttctttctttctttctttctttctttctgtctttctttctttctttctttctttctttctttctttctttcgttcttcctggctagctggtgttctctctctctctctctctctctctctctctctctctctctctctctctctctctctctcctctccccttgttattatggctttctctctagagaacatttcatcttcaagacttgactcctataacaggtatcaaaaccagaaaatcttaagattatttttcttctgtagtgataagacttatttataatgactatgggggaagggaatcaattaccaataagtgttaatgagagcatacccagtgtattaccatgcagccttggtcagaaactgcttccatcctaaacagtggcttaaggactcatttggattttgtggagaaaagtatgtttctgtgcctggaagccatgttggtatccacatgtacctcagggctgtaaataaaattatatagaggcctgaatacttaagtgaaactctgggagcacacaacagctgtgttggagcacttagttggtagacaagctttcagagcacagttcagccttctttcttacacactccaagactcctggctcagttggtaccacccacaatggctgggccctcccacatggtaaatcaacaaaatgtaacatagccttgcccacaggccagtctggtggggacatttttcaactgagattccctcctccaaaatgacttagcttgtgccaagttaacataaaactcgccagccacagacagtaaaggggcacctgggttgagacgcgaagggtggatttggttggtttaggagggctgaggtagcggctgaggtggcgtgagagcctaagacaagcccaggatgtgcagcttccatttgtgtccatgtattcctggcatctggcatggacccagggcatactcgccaaatgacagacagcttatgtcctgcctaggtgagaaagaataatatcttataaagaacagattcgtgggaaagaagggggtttataacccaactggttagaaacagttattggatatttaagttcatttcctgggacgttgagtatatactttctacccctgtaagagaaagcgttaagatcccaagtggctgcctttgcttggaacctatccccacgaaggtcttagacaagacacaaagcttacagggaaccagggctgggtagtaacgtgctttgcttttccaaatattatgttacaacttctctcctgcaggagtgaagaccatgagggtggcaggagatggtagggaggggcttgtccataggtcttctagaggctcccaggcctgtgaatgcaagtgactgcctctctctttcagccatccctaaatccctaaagtctctgtggctagaatgtggccattgatgtgtagtcctcaatgttgtttgcctgcagtaacttcccaaagaattttataaatttatatacccacgtgaatctaagtcttaataaatcacttaaagtaattgtcaatgatgtgatttccagagtgtaatatactgatattggtgtgtttatttatacaactgagtcttcaaaactattacagtgtgataccctaaacatttacttagtacacatagctataatacaatttggaattaatttttgtgggttgaatacaatataagttatgtatctcttagtcagcctctttgacctgaagaagtcaaaattatttctaaaattaattctttaaaaaatatttctaaagctttttaattcttcagcttcacactaaaatcacatggtgacccctgtgcagcgatgtattgatggctgggtctctttcaattgggttgaatgaataattagaaaccccttgtatccctgaaggatttattacccattcattagcgacatcgactttcttaataaagacagcaatatttctaattacttttgtctggtgccggagaggttgttatcacaagagacagtgcatttagtagaattgagggtgggtgagaatgttgccctgctgtgaagttaagactgagaggaagggcatagaacatgcccaaattcagtgtgtcagtctgaaaggaaacacacagaggcctgctgatacctgggagtttgtcccctccccagtgcctatatctgcatggactgtctgtgtccatactcaaggactgcaccgcagtccttaaaccctgatgggctgatagaaagacagtaaatgaagaagtatatgtggcctgaagccctgactgacctagaaactctacttccacaacctcagaggaagcagcttgtggaggtatgcttgtgtgtacatatatgcgcatgtttgcaatgacatgctatgtctcaccctgctaggtcaatgtgtgtgatgttgcttaattcattttcacagtgtccctgaggtcaggttgatgtttaataagccctaacatttggttttctcacagggctgatagagggctgggtgcttgtgtgtagctgtgaagtgaagcatgctggtaaaggaatccgtgaggtgatgtataccaggtaaacaggataacttccctactagctctttgagcatctcctccccagaaatcaggaacactgggaaggctgtggagaggctccagcagacatcacagagccacctcgacggatgatgtagccgaagcaatctggactctctcagaggcccccagggtgctgcccaatgggtgctggaaatgagcgctttggtccaccggatctgtggacctgttgttcgaaataaacttggcatcgagagatgaaaatgccagtgtcatttgtaaaggtcagatgacagtttggggatatttcagttactctgcggagttcccagctgcctctgctcggactgtgagaatgttcacgaagtttctgccttcccagggatgacagtcttgccttacgggggagttgtgcggcacgagccatcagagccaggctctgaaaccctgtcccggctgttcattatactctgctttctttagtgaaaatctcttttgatttcatcagtgtatttaactcctcccactacaatttcctgctgctggacagagctcatgcaggttgtgtttctcgtcctccctgttttagggtttaagaagccaaaacgttaagatgctacattaatatgcttgtttctaacacgcatgatctctctcctgtgcggatcctagcttgtaactttatatatagcgtttccacgggagtgaagaacgtgggtacagactggtaaagtagaaggaaatccatgagagagaggagaaagaatctttaagggagagaggttataggacacaggtgatgtggaagtagaaagaaggacttctggagatggaaacattcaagtggggaggggaacgggaggggggaagtcaattgaaactcatgatgtccaggagagccatgaggaagtctgatgcttagtaagttaatcaagatattttaaatgaagtttgaacagagatacacacaagtgcataaaacatctcccagaagtcacaggttattaaacagaaaatcgcagtgccagcgtaccagaaaataggttgttggtcaggaggacccccaaaataggagaggccattgccactgttgttggagcacactggaatggggtgatagcctatggctgaagacattacatgggtacgacccggttggctagccatcgtaccagaaggtgctgtgcagggtttaccaggaggatagccatcagcagtctcattggctgtggatcctacggacagtaataccaaccagccagggcagatatggctcccactccaacagtggtgtggctgttgtaggataaacaccattttcagataggattcagtgctcaacccacaggaggatatttatttctgatgctgtaaacctggtcaacgcttatggctggagaggccacaggccctaggagggaagttactgctgccatcttgtaaatcgacattatgtacctgtcaacctgccttctaaataaccgtgtccctgcctctagatgagtgatgttgtcagctttggtctctttgcagtggtcagcagagaatgcagagactcatagctcgtctcagtactgagataaatggcttttaaatacccagccacaaatgggactgctttatcattcttcccaccaagacgtggggacatcatggaagaaaggtagatgtaagagccaggggaaggaatgggtgaggtgtggggtgctacctcagctacggtactcacacccacagcagctgtgagcactgcacaggagcctcaaggggtggctgacaccctgccatggaagaaccctgcgtcttttttccctctaaacaacaagcacaatagggagaaagaaaatctgaaattttctgttatgatggttttttaaatatatattcacattctaatatgttaagtaaacacccttttttaaatactgggggtttgttgttgtttcttttttttctttttttgtttgcttggtttggtttttgggggggctttggttctgtttttttgtttggttggttaattggttttttgtttttgttgttgttttgcagggattgttgttgttttaaggaaggttggtggtggtggtggtggtggtggtggtagtggtggtggtggtttttggtttttcaagacagggtttttttgtgtagccctggctattctggaactcactctgtagatcaggttgacctcaaacacagagatccaccttcttgtgcctcatgagctctaggattaaaggccaccagctccctaatatgttaaaatgtgtatctataattgcacatttatccaggtgacctctaatatactatctctttgaaaatgagcttttctgagtacttctgatgggtggtatcatataacattcagcattttgttttggtaagcttgtgtcttcgtgtcctcggtctggcaggggactgtcatgatgacaacttcttttttttttaaatactttttattaggtattttcctcatttacatttccaatgctatcccaaagtcccccataccctcccccccaatcccctacccacccactcccactttttggccctggtattcccctgtactggggcatataaagtttgcgtgtccaatgggcctctctttccagtgatggccgattaggccatcttttgacacatatgcagctaaagtcaagagctccggggtactggttagttcataatgttgttctacctatagggttgcagatccctttagctacttgggtactttctctagctcctccattgggggccctgtgatccatccaatagctgactgtgagcatccacttctgtgtttactaagccccggcatagtctcacaagagacagctatatctgggtcctttcagcaaaatcttgctagtatatgcaatggtgtcagcgttaggaaactggttatgggatggaaccctggatatggcaggctctagatggtccatccttttgacacagctccaaactttgtctcagtaactccttccatgggtgttttgttcccaattctaagaagggnnnnnnnnnnnnnnnnnnnngtacgaccccggttggctagccatcgtaccagaaaggtgctgtgcagggtttaccaggaaggatagccatcagccagtctcattggctgtggatccctaccggaccagtaaataccaacccagccagggcagatatggctcccactccaaacagtggtgtggctgttgtaggataaacaccattttcagataggattcagtgctcaacccacaggaggatatttatttctgatgctgtaaacctggtcaacgctttatggctggagaggccacaggccctaggagggaagttactgctgccatcttgtaaatcgacattatgtacctgtcaacctgccttctaaataaccgtgtccctgcctctagatgagtgatgttgtcagctttggtctctttgcagtggtcagcagagaatgcagagacccatagctcgtctcagtactgagataaatggcttttaaatacccagccacaaatgggactgctttatcattcttcccaccaagacgtggggacatcatggaagaaaggtagatgtaagagccaggggaaggaatgggtgaggtgtggggtgctacctcagctacggtactcacacccacagcagctgtgagcactgcacaggagcctcaagggatggctgacaccctgccatggaagaaccctgcgtctttttccctctaaacaacaagcacaatagggagaaagaaaatttgaaattttctgttatgatggtttttttaaatatatatttacattctaatatgttaagtaaacacccttttttaaatactgggggttttgttgttgttgttgttgttgttgtttttctttttttgtttgtttggtttggttttttttagggggttggttctgttttttgtttgtttggttagttggttttttttgttgttgttgttttgcagggattgttgttgttttaaggaaggttgttgttgttgttgttgttttggtttttggtttttcaagacaggatttttctgtgtagccctggctatcctggaactcactctgtagatcaggttgacctcaaacacagagatcttcctgactctgcctcatgagctctaggattaaaggcaagtgccaccagctccctaatatattaaaatgtgtatctataattgcacatttaaccaggtgacctctaacatgctatctctttgaattgagcttttctgagtacttccgacgggtggtatcatataatatttagccttttgttttggtaagcgtgtgtgttcgnnnnnnnnnnnnnnnnnnnnnnnnnnnnnnnnnnnnnnnnnnnnnnnnnnnnnnnnnnnnnnnnnnnnnnnnnnnnnnnnnnnnnnnnnnnnnnnnnnnnnnnnnnnnnnnnnnnnnnnnnnnnnnnnnnnnnnnnnnnnnnnnnnnnnnnnnnnnnnnntgtcatgatgacaacttctttacaaaactctgctgcacactgttcatcagctcattcactgatggttgcctcagcaattttcacatttcttgctattgtgaaatgtgctttcaggattttaccatagaatattggtctgatcattggttgtaaataactcctagagtcctgttctaaactgtttggggacaaaaataaattagaaatgctaactgaagcttgcaacagttttgttgttggtggtggtagtgttgtttttgttttcttttcttttcttttttttttttttttttttttacttttttattggttattttatttatttacattttaaatgttattccccttcctggattcccctccacaaacccccatcccatcccccttcccctgcttttatgagggtgctcttcttcccacccacccactcccgccacacagccctagcatcccccatgctgaggcatcgagcttccataggaccaaaggcctcccctcccaatgatgccagataaggccatcctctgctacatatgcaggcgacaccatgggtccctccatgtgtactccttggttggtgatttagctcttgggagctctgtgggatctgattggttgatattgttgttcttcctatgaggttgcaaaccccttcagctccttcagtcctttctctaactcctccattggagttcctgtgctcagtttgatggttggctgtgagcatcctcatctgtatgtgtcagactctggcagcgcctctcaagagacagctataccaggctcctgtcagccagcacttcttggcatcagcaatagtgtctgggtttggtttttgctgttgttgatgatgatttttgagattataatttaactaaaatgtttcttccatccctttcctccctccagtacacccttttccactctcctttaaactcatggcctcttctttcattaactgttgttgtatttgtatatgcataaatattcccaaatataacttcttaggtgcacataatatccattgttcatatgcttccagtgatgacctcttggcatggaaggaccggctggcacgctcttctctgggaaggaccacctctttcactgctagctttgctcaggagcctgtagctctgtgtgtagggttgagccctcacaggcctttgtccatccactttgacatgtttgttggtgtcatccttactcagcccctgcttaggcagccatgtggcaagacaataatgggtgtcacttctgacatccctaggagagacaatctcacagcaaactctctaatcctctggctcttatggtcttttccccttctcttccctagtgcttcctaaaccttacattttagagtattctctacatgaatccactggggatgtgctccacaaatctgcattttgattgnnnnnnnnnnnnnnnnnnnnttcacagtgtagaccaggctggccttgaacccacagagatcttcctgcctctccctcccaagtgttaggattgaagtgccaaagtacatataatttcttacactgccacactgtattccataatggctctagccacttccatccccacaagcagagaggagggtgatgtgtcctcaccctagacaacactggcttttggataagtgtcaatcaaaaaagtaagccataacaatctcttaattttgaaattcatgtttcctttttcatgtgtgcttctatagcactcctgatggagtcagcactagtctgccatacagttttcttcctagagctgtttatttttagctcttgtttataaagtaggttctacgggcccagctctgtccctttgtaaatgaatacctgtgttttcacagctccatcagttgaaaacattcttccttactctttgccttatcttgaaaataactgacttggtcaaaagaaaaaccaagcactaagtcacgcgtgtgcaggtgtgttttttgtgctccttgcacagttcttagtaatacagctttgtagtaagtttgtcttgggaagggccagccctacaatttagctctttctcaggattgtccttgtagctcaaagaggcttataattctttatgaattattaatctgtttttttttttagtacacgttacgatttttctcagggatcacactagattcatactgacaacttcggacagaattatgttttcacattatgaagtcctgtgagctatgaatgcgagatgcctttccatttatgatttctttactgtctcttagccatatttgtttaggtttggggtttttttgtttgtttgttttcattttctcctcccaattcaacccatttgtaaacattctattattgtttgtagtgcctcgtgagttatgtttgagtgtggctctcggtccagttatctgaaaactataatcatattttgctaatagaactgaaaactccagagactggagagatgactcggtcgtgaagagtgactgagctctcccagaagacataaatttgtaatttaccagcataaattatcagcacccacgacgctttcatccctctgtagctacagctccagagtactcagtgctcgttcctggcctctgcaggggcctgctctccaatgcaggtacctacacacaaagacgcacaggcataaaagtgagtcttgagttttccttaagaactgaaacgtctatgacggaagcatggacaccatatgcagattatgatgttgcacatcatagacaagtgggaaggcaccttgcacaccgccatcttgcccttttgaaggcaagacataaaggggcacgtgtttcacagggtcatccagagccattcagggcttctggactcagttctgaagagcaaaggcctctggtaggcaggcttgtcaatcacttgattctccgtgatgttcctctttagagtgaccccagacagcctccagagatttaacttttaagtatggaaacagagggaaggcctctattctagacctaggtttataaaatttatctgctgcaagggttttgttttggtttttttttgttgttgttgtttttttgtttttttgagaaaagtaaattttttcttttttttttattacatatcttcctcaattacatttccaatgctatcccaaaagtcccccataccctcccccccacttccctacccacccattccctttttttttttttttttttttttttttttggccctggcgttcccctgtactggggcatataaagtttgcgtgtccaatgggcctctctttccagtgatggccgactaggccatcttttgacatatatgcagctagagtcaagagctccagggtactggttagttcatattgttgttccacctatagggttgcagatcccttttgctccttgggtactttctctagctcctctattgggagccctgggatccatccaatagctgactgtgagcatccacttctgtgtttgctaggccccggcatgtcaatattttttattaaacatttttaaagggtttcaagccagtgagatggttcaccaggtaaaaagtgtttactgtctaaacctgacggcctgagttaatacctggagccagtactgaaagaaaaaaactcaactcctaaatgtcatgtgatcaccatatataccccatggcacattcatgccttcgagcacacacacatacacacacacacacatacatgcacacacactacaattatatgataaatatggttgttgttatataagagctgagtatcatatctgtaaccccagagctgcagagggacagaggcagcgggatcgctagggttcattggccagccaccctagccctgtcaaggagctcctaattcaatgacagacttcaacttaaaatataaggtggagaataatgagggatgatagctgttgccctccattgaccttcaacttccacaagtgagtgctcactcaacctgcttgcttactccctccaccagaaaagggcttccctgttgtgctggcaacaggtcccagtagctaagcagagtgctactgatgctggcaaataatgctaattacaagggccacaaaaagttgtttatgcaccaggagccagtgctttgcatagtctacctcttttaatcctctaaacaatctcagaggtgccatgacatcacacccaaaggcccagtgacccgtgccttggaggcccttggtcacttgcctcagaccactccctagaagaagtgaggagctgagaattgaatactggtggtcacattcacatgcaaggtttctcacatggtttttgtctttattatctaatttgttggtattctttatttttctttgtttttagtttaatttgcttttcaatttttaggtttttttaaatatcttttttcttttgtttttaagattgttttttattttttattatatatatacatatatgtacatatgtatcatatatatgtgtgtgtgtgtgtgtgtgtgtgtgtgtgtgtattttataggcacatttcagcagcattacacactatttaagttttaaatctacttttaaaaaatagaatatgatgtgttataatgatgtctttgcacagacatagcatgtgcatggctaatattctctcctaaaattaccctgtatttctctctctctcttttatttgccctcaaaatagttccttctaattttatgtcttttatgtatatattttaatatctccattctacaaatgaaagaaaatcctcatagatatcatttggtttttggactctggcttggatctcataatacctgcagtcgcatccattttccttcagatgacaaaattttgtccactttataactgaataaaatatatgatatatcatatatcacatatataatacatgtagtatgtataatatgtatatatcccatataaaaacatgtgtgttttctaaaggaagttagcaacagaaagattatacctcaatatagtggaagcttcatgcagcagacttataatcatcattgagatttataaacatttctatttatataaagcacactttccttatccactcatcttttgatggacatctggcttgatggaacatcttgtgaatgctggtgtgatggacatggatgggaaggttctgtgggatacagatttatggtccccggggtgcatactcaagagtggtacaagtagatcacatggcgtttatcttctttttccatatgtgttctttcatccaactttatatatgcattacatgtgtgcagtacccatggaggccagaaaatgtcatcagaccacacattgatccatgttcccaccggcagtgtgactgccacagtgcacacagtgatccatgttcccaccagcagtgtgactgccacagtgcacacagtggtccatgttcccaccggcagtgtgactgccacagtgcacacagtggtccatgttcccaccagcagtgtgtgtgattcctttcctgcacttctttgccatcatttactgtcctttgccttgatgacagccactctggtggaaactcaatgtagttttaatttgcatttccctggtggctaatgacagtgactttcctatacttttgcccacttgtatgctgtcttctgaaacctgcttgttccatttatttgtccatttgatgactggatctttttttaagcaccatatagagcaagactgcagatggtagacactgctgtctcattcctaatgttggagtaagtcctttcagttttcactaatgtcctataatgtataatataataataatagtaaccatgtataatgtaggttataagtccattacatgaagtctccattgtgttgaggtatagtctttatggtttaactaactccctttaggaattttatgatgaagagatattgaactgtattagaggccttttctgcacttgctaagaaaatatgctttctggccctggccatttatatgctgttttttaattggattcttgcatgcctagaatggaatcaatttgattgtggtaagtgacctgtacgattttcttgtgtctttgtctggttttagtatcgggataaagctggcttattcaacgagctccttagcactccttctctttctgtttgattgagaagtttgaagtgcattgatggtatttcttctttagaggcactgtggaaatcaatggcttgttcttgtccttagctttcccttgctaaagaccctattcagcatccttgctcattatatagatcttgatttaattttgatagatcacgtgtggctggaaaattttatatatatatatatatatgtatatatgtatgtatgtatatatatatatatatatagttataaacacatacaatttctagaattttgagtggcttgtaaagggtttttaagtattctctaatgtttctctatattttacttgtatctattgtatttttcttccattcacctgcttgcttgtgtctctctgaaatcatcaatcattttgactcctaagcttttgagttctatttctggcattaagtatctttggtttcagttgctgagtagttgttggtttttggaggagtcacatcacattgtctgttcgtgtctcttatatttcaatgttgcaattggttcatgtgttggatgtttctcctagttttatatgtctcttagttgaggttttactgctatgaacagacaccagaactaaggcaagtcttataaaggaatacatttagttggggctggcttgcaggttcagaggttcagtccattatcatcaaggtgggaacatggcagcttccagtcaggcatggtgcaggtgcagctgagagttctacatcttcatctgaaggctgctaacagaatactgacttccaggcagccaggatgaggttcttaaagcccactcccacagtgacacgcctactccaacaaggccacacctactccaatggggccacacctactaatagtgccactccctgggctgagcatatataaacatcaaaatatgggaatcttctgctaattagcctctttttcttgagggctcaatcttcagtaatactcacagaggggaaaggtcataagagcaatgtcaccaagcccaacctgagatagaaatatattaaatctattaaaattggagattactttcatcatcagtgaccttaaaataaaataaaaataataatgttataaatgaaagtataatttagagtaaaaactaaaataatgactgcaataaatgaatgggaagacagacacaaaattaaatttttaaaaattaaattgaaaaatatttgaaattgagagaacgaatggccaaaggtggcataaatctgattgcacaataaaaatgaaatatattaaaaaatggttacagatgaataataggaaacaaaataaaagctttttaaaaaataaatttaaaagcacactaagcatacaataaaacaaacataaaggataaataagaaatttaaggggaatgtatggatcagttctttctgggtcctctaaaactgaagtttgctgggcagagggaacaacgggtttggagtttcttgtttttcccactgttgaggctggtccatctggatcagttgtcccctgagactacaggccccttaagaacctccttcttgtgcaccagcaccctctgctggccagccagggacttgctcgctctggagacttcccctattgtgaacttcattgtcaacttcatgtgattggttttgagttgcccaggagacacacctctgggcatgtcattgagggtacttccagatgtgcttaacttaggggacaaaatcctgagtgtgggtgacccgactgcgttgtgagaggccgtccaatggacccacactctccagctgagtcaaataaacccttcctcctccctgaagttgcttttagtcagatatttgatcatgatattgagaaccataccgatagaacctgttaacctgaaagtctgagtgtctctcaagtgtgattacaggaaggggaggaaacagcccccatccccatgggttcgcggtcctgcccagtactgagctcgctgtggtgtggggaagacatggaggcggagttctaccttaactgagcttcagaattttctgtcctgctgaagaccatgtggcagagaggcagctccagatcctgtagccaaccagagcacgcctccaggccctccatctccccaggtgatacagtttgctccttgccatataaggcagagccaccaaaccaccttgctgcttacaaccagagtcccccttaaggctggatttctcaacatgtccatgtcccaccttctccctctccacagacattttgtggggccatcttccacccagagactatatcaggctacccccaggttgtctaacttgttagttgtccttgtttttaggattccagagaagttcataaagttccccgtcaagatgtccgcgggataaagctcgctgaggtgtggaacgcgatgagaaggattgcttctcctaaactgacttggacataggaggcatgaagtcacactgaagcccccaactgggcttatctgaggctttttccagtacctcagactcccaattctctttgtactggggtctcctggcttgctgtgtgggcgtggcattagctttctttctttcaaaagggaactggtgttagtgggtaggctgcttccggtttctatagctggcttttgcttcacaaggctcttcagtttgtctagtcacatctttcgttgtgggagtcacatccttccctttgggaatagtctatcatagttatcttgattcttctcattcatgatgccacccaaaggcagcttctgatgtgccattatgcacacacacacacacacacacactatgtgtgtgtatacatatatgttcacatatgtacattagaaatatattcatatatcatatatactacatatatacattaccaatgtgtctatacactataatgctgtctccatatttctctcttcaaaatagcctttcatttcttctaagttactcatacaggttttcttaattttactaagtaactcaaagtttgttaacatctaaacaatgatgtgtttgctcttgcttttgctctgcagctgatctgtggtgtgtgagtcctagctacttgtactcagttgaatatcatatttgagctatatcccagcatgctatgtgtgnnnnnnnnnnnnnnnnnnnntgtaaagagtgccatagataccactacccttggcactgagggcagagtctcatcaactcccctttttgttttataagataagatttgagtgtgcggtgggcacgttccacaatgccttgtccttgagaattacaaggaaggccagtcaagtgagtgacatccatttgatgacaaaattgttgaaatttagtagaagtatatgctggcccattatccgttttaagaattgtgggcttgccccaagcactccacgcttctaggcagtgctgtataacatgagaggctttttcacctgttaaaggtgtggcaaacattacaccagagcaggtgtcaatagaaacatgtaaatattgatttctcccaaaggaggaaatatgagtgacatccatttgccagacctgcaatggcctgacgccacgagggtttactcctacatgaggagtaggtaaaaattgactactacctctgcacataaagcggaggtgcactaggaccctgaagctgacagtccggaggccgagcagcaagctggctttcgccagcagcttttggcctttttctggactgagtagcttacattttatcttgctggtacctttctcccttataacgaactgcttcctcctccgagtccatttcttcagaggcgctaactccttcatctggttctgagctactaagagttagctgcttaaattcacccagtggcgggtagaggctcctttccttatgtgcctctccagctcgatctcccttcttctctccctttccatccctttttctaatctctcccaaggcattctttcctttatatctcttttcctcgggctcaaggcccgtggaaaggcctaaattcttcagtgcactttgtttcctctctacttttactctctctccccgctctacctctgatagactttcttgaatttcgtccagaactttctgccctgcttctaccatttgctgacaatcctcataatcgccgtgcaaacaatcaaaagggcttctaactctggagaaatttcaagattgtacgtaccttgtagagccttttgtcccacggttctgattctgccccgcgaacgagggatcttaccttgcgccggtgtgatgacagttcccgggttcttcggcgccacttattgcgtcccgctcgaccggcaagaaagacgcaacaaaccagaatcttccgcggcaaaagctttattgcttgcttgtcaggaagatcccgaaccgggaaaatggcgctgcttttataacccgcagcatgnnnnnnnnnnnnnnnnnnnnttctttgaatctatgttctgggtgcacatacattcagactcggtacttctggcctgatggattgaccttccttctcattataaagtatcagtgattttcttgtgatctctgttttgaaagctcctttggtgatacattgtattaatatagccataatagctttcacctgcttgcttgtctgttactgcttttctcatccgtctgcctctacccgctctcctttctgatactcagaggtgtcggctgtaaatagtacatagttagttcttgtttctttatccagtttgcctttctaattctctcctcccaattaagaaggaaataatctgtaagcttatttcaataaaccctgctgggaagctcagatagagtaaacagccccaacattctctggttgataattggactttctgccttggattttctttcgacacctatttatatatattgcccaaatacagatgcatccttctagcattataatgtaacttttaaaaataagatttacttttaatttatgtatgtgtgtggtaagcatgtatgcttgtggacaggtggccacaggacaccagaagaaggtgtcagatctcctggtgtaggagttacagatagctgtgagccctctggtatggtgattgtgacccaaactcaggtcctctggaggagcagtccacactcttaaccactgagcaatccttccagcctttgaaatagcttttgactaaagccctaataactctatgtatcactttactaacctaatctatgtcttagagacccttcccatgataaatcttttattaatttgttatgtaatctgaggacattttctaccagtataaaccttagaaagtgtttttttttttccttttgattgccagtctagagatggagagtgtcattctttctagttctgcctgctataactctgttctaggcaagcacagagatgtcccattgttctgtacttgtatgtatccttattcttgggtatctatcctgattcatacacaccctaatgaaacatacaatgctttatatgcagtgatttaaaggcaaataatgccataatgggctgttcctatttttccatgctatgccctgttttgaaagtctgtttatgtggccctctagtgtgctgcttttaacagtgaaagttctctctccctctctctctttctctctctgtctctcttctcctcctcttcctnnnnnnnnnnnnnnnnnnnncttcttggcatcagcaatagtgtctgggtttggtttttgctgttgttgatgatgatttttgagattataatttaactaaaatgtttcttccatccctttcctccctccagtacacccttttccactctcctttaaactcatggcctcttctttcattaactgttgttgtatttgtatatgcataaatattcccaaatataacttcttaggtgcacataatatccattgttcatatgcttccagtgatgacctcttggcatggaaggaccggctggcacgctcttctctgggaaggaccacctctttcactgctagctttgctcaggagcctgtagctctgtgtgtagggttgagccctcacaggcctttgtccatccactttgacatgtttgttggtgtcatccttactcagcccctgcttaggcagccatgtggcaagacaataatgggtgtcacttctgacatccctaggagagacaatctcacagcaaactctctaatcctctggctcttatggtcttttccccttctcttccctagtgcttcctaaaccttacattttagagtattctctacatgaatccactggggatgtgctccacaaatctgcattttgattgcgtctgtattcccaaagtggtctccatctattgcaaaacaaccccaaaaaacaaacaaacaaacaaaaaactttctttaatgaaggctaaagactgtacttatatgtgagcttaagaatccatgtttataaatttttgttagatttttttttttttgagacaagatctccctatgtagtcctggctatcctggagttcacagtgtagaccaggctggccttgaacccacagagatcttcctgcctctccctcccaagtgttaggattgaagtgccaaagtacatataatttcttacactgccacactgtattccataatggctctagccacttccatccccacaagcagagaggagggtgatgtgtcctcaccctagacaacactggcttttggataagtgtcaatcaaaaaagtaagccataacaatctcttaattttgaaattcatgtttcctttttcatgtgtgcttctatagcactcctgatggagtcagcactagtctgccatacagttttcttcctagagctgtttatttttagctcttgtttataaagtaggttctacgggcccagctctgtccctttgtaaatgaatacctgtgttttcacagctccatcagttgaaaacattcttccttactctttgccttatcttgaaaataactgacttggtcaaaagaaaaaccaagcactaagtcatgcgtgtgcaggnnnnnnnnnnnnnnnnnnnnnnnnnnnnnnnnnnnnnnnnnnnnnnnnnnnnnnnnnnnnnnnnnnnnnnnnnnnnnnnnnnnnnnnnnnnnnnnnnnnnnnnnnnnnnnnnctccacatacacccacccccgccaaaatgtaaaaaaacaaaaatgtaaaaagcaacctcctacttattttgccttttttttctcaattatattcaggaccacatacctaaaataaaacatattcattttaaatgtactgcttgctgtattgttgcaaatctatgaatcactaatgatagtttatcatttgatcctctgcagttctcctgcttaaaatgttttatgtgctttttctccagaaatgtaaatttgttctagaacattgtgtaagtatgtaatggcatcatttgttccatttctttcctatatttcctataatatatacatacatatatgtgtgtgtatgtcatatatatatatatatatatatatatatatatatatatgcatgtatgtctgagattgatccatccgttcttgagataggggtgtgtgtgtgtgtgtgtgtgtgtgtgtgtgtgtgtgtgagagagagagagagagagagagagagagagagagagagagagagagagagaccttggttttatctgtttgctgtttcccagttggggctgtcatgaaaaaagctgctatggccatgacttaccaggtttgtaaccacgcatgcttttcacactttcctttcctagagacgagtcagagggccagtggattttttaagtcttcccacgttagtcttccttgtcagtatgcaatagtttggttgtggtttcagtttgtacttccacagttaactgatggcagcagcaagggtctcttaggtgggaattggttctttctgtgcttattcaaatctgtttcctcttgttgttgttgtttattttttgttttttgtttttgtttttgtttttgttttaacttgggtttgtttcctttaagcttgtgggaacttgttctgtagcccaggctcactttcaactttattttccctgcttcagacatctgagtacctgaatgcagtggttacagatgtgtcgcacaaggattagctaccggcttttaccaaagagaaactgagttgccgagctgtgtgagggctcctgagcgaagtgctttctgcataaatcttatgacctgatccatccttggctcccacacaaagcaacgactgccacagatttgacctatgacctccacaagtccatcccgatttgcannnnnnnnnnnnnnnnnnnnaaaatgggaatgggtggggggggagggggggacttttgggatagcattggaaatgtaattgaggaaaatacataataaaaaaaaagatttaaaaaaaaaggaaacaaacaaacaaacaaaagaaaaaaactcaaaggattgtaatttcaacatctattttcatttatcagtgatgttaatcatatccccttctcatatattcctcatgattcatattctggttaattttgaaccccgtggtcagcatccacctgaagatatccttcaggtaaaacctttagactgaggttgtggtgccttgagaagcaaatcacagggcagaggaccgttgccatgacactgtgtactttattgtcccactgttccacaattggtcgttaggtttcagttggtgtgggttcacttccagtttttatttggttgattgttgaatgtaccccttaccttctggcattccaagcagcaccaggctcatctagtgtagttcccactacaggcctggagtcagctgtgttctaggaatttgtggttccttctattttagaatagcatagaaactaccccgcctataagggcccatctcagcatatcctaccaacggcacatgagatgaatgtgatttatcaacgatgatgctgactttgatactctaaacaagataggacttagctccttcactgtagagataatgccctctcccctcttccatttggactctttggaaggacattattgggcacaacacacacataagaactagagagctatgatctacattcttacataaatccttatgtaaggttttactattcctctatttatcaggttaatgcagattcatagctgtttgttttacagcttcagttgtgatccgtttctctatgcatgctactgtagctttggctagtaagattttcagtgtgcctttcatgcccctactcacaggtaggagatttagcacttggtttgctttggtttctgagcacttccctgctttctagacttacaaaatatctcagagaaacctggcatgtttcttactgaggcctaaaaccagctatttatttacatcagtctggttccttttattggaagacagtataagaacaagatttgtgttctaattgtgctcaaagctaccagcatatcattgcttctaaaccnnnnnnnnnnnnnnnnnnnnnnnnnnnnnnnnnnnnnnnnnnnnnnnnnnnnnnnnnnnnnnnnnnnnnnnnnnnnnnnnnnnnnnnnnnnnnnnnnnnnnnnnnnnnnnnnnnnnnnnnnnnnnnnnnnnnnnnnnnnnnnnnnnnnnnnnnnnnnnnnnnnnnnnnnnnnnnnnnnnnnnnnnnnnnnnnnnnnnnnnnnnnnnnnnnnnnnnnnnnnnnnnnnnnnnnnnnnnnnnnnnnnnnnnnnnnnnnnnnnnnnnnnnnnnnnnnnnnnnnnnnnnnnnnnnnnnnnnnnnnnnnnnnnnnnnnnnnnnnnnnnnnnnnnnnnnnnnnnnnnnnnnnnnnnnnnnnnnnnnnnnnnnnnnnnnnnnnnnnnnnnnnnnnnnnnnnnnnnnnnnnnnnnnnnnnnnnnnnnnnnnnnnnnnnnnnnnnnnnnnnnnnnnnnnnnnnnnnnnnnnnnnnnnnnnnnnnnnnnnnnnnnntgattcgttctgtccttgcttaagttcagctcttgctgatgcctttgaagaagtcatttcagtccatgggatcaggccagacattcttcaatattccctcataacaccattccctttataaccttaaccagaaaaatacatacatgactaattttgcaaagggatcatataattgctttctctctcttaggacactggctttgtgaagaccttacatcccttgctcagagctaagcatgcattatgtacacatgtggtaaacattaaagaggtgttgaagtcatagacttgttcttctgcccagtgagacaggaaaaaggctgagaatgccatcttaaggccatttctgctttctggcatttttagatcctcaaaataatttgcttatgcatctccaaagttcacaaagtagaaatggcactatatggaagttaaaaataggcacacacatacacaaagagtcataaagtcattcagaggacaagattccatgtgggatgaatagcactgagataagcaacaactagattaaatgttccagtccctgagtgtgcctgtgttagccattgggagggaccaaaatgtcacattttaaagcttcagaaagatatatgtctcatgatacaggagttggatattggtaagagccaggcatcatggagtgtatgggtggtgcctttctccttccctagaggagatgctgatgtaataaaaagtgtcactggattttgttttgttttgttttggtttggtttggttggttggttggttggtttacattccatttgcctagaatttgtttttatattattatattaagttatattacattatattatgtactcagattcctgttgacagaaaaggaggtagattcagatggaaagggagatcaggaggaagtaggagatgtagagagaaaagtgtcactaaattttgttttgttttgttttggttggtttgttggtttacattccatttacctgtaatcaaaagaaaactgtaataaaaaaaactgtaatcaaaaaacccagatgtccctcaacagaggaatggatacagaaaatgtggtacatttacacaatgaagtactactcagctattgaaaacaatgaatttagctaggcatggtggcacacgcctttaatcccagcacttgggaggcagaggcaggtggatttctgagtttgaagccagcctggtctacagagtgagttccaggacagccagggcgacacagagaaaccctgtctcaaaaaaaaaatgaatttatgaaattcttgggcaaatggatgtatctggaagatatcatcctgagtgaggtaacccaatcacaaaagaagtcgcttgatatgcactcactgatacgtggatattagcccagaaacttagaatacccaagatacaatttgcaaaacacaagaaaatcaagaagaaggaagaccaacgtgtggatacttcattcctccttagaatagggaacaaaatacccatggaaggagttacagagacaaagttcggagctgaaatggaaggatggaccatccagagactgccccacccaaggattcatcccataaacaaccaccaaatccagacactattgcatgtgccagcaagattttgctgacaggaccctgatacagctatctcttgtgaggctctgccagtgcctggcaaatacagaagtggatgctcacagtcatctattgaatggaacacggggtcaccaatggaggagctagagaaagtacccaaggagctgaaggggtctgcaaccctataggaggaacaacaatatgaactaaccagtacccccagagctcgtgtctctagctgcatgtgtagcagaagatggcctagttgaccatcattgggaagagagaccccttagtcttgcaaactttatatgccccagtacaggggaacgccagggccaagaagtgagagtgggtgggtcggggagcagggcggagggagggtaaagggaaattttgggatagcatttgaaatgtaaatgaaaaaactatctaataaaaaattttaaaaagaaactgtaatcagaacatattgtatgaaaaattattttcaataaaagaaaaattaaaaattaataaaaatgaaggttatattcatgtaacctttcttatagtaaattgttacaattgcttagggaaaaaaaatctgaggcaatggcaattgtatcttgtttgtcttttgtagccattgagggtgggggaactactctgaacatacatttagctgtttagcattgctctttagaccttgaccatttaattgaaagctttggcaggaggattagctgacagagtaatacattggtattgaggaaataggaagagtgagcctttgggggccaggcctgttcatattaaaactcctcccctgcaagctttgcctcccgtttatactgggactcaaaccaggtgcctgaaggagtgactgttatgtaaatgctattttgcattaggaaagtaacaaagctttaaaacatggaggatattttagttattagagggtactacttgcggtagtaacagttttgctactaaggttactgtaacattttcccccttctgagccaagtgcagccagagaatccttaaggaacgtaggctgagtgaaaggacacagaacaaaggttagatcccaggagggaatgaagaagccccacaatagctgtgctattttcctttgaaatgtcctgtgctctttagaggacagtggtcctgtatgcagggactgcgtatctgattctgtgacagtgccttcgccatttcatctcaaggcaccgcccgaatgccagggcttctggacacactcagcacttttnnnnnnnnnnnnnnnnnnnnagatctgcaaccctatcggtggaacaacattatgaactaaccagtaccccagagctcttgactctagctgtatatgtatcaaaagatggcctagtcggccatcactggaaagagaggcccattggtcaggcaaactttatatgccccagtacaggggaacgccagggccaaaaaatgggaatgggtgggtaggggagtggggggggggggcttttgggatagcattggaaatgtaattgaggaaaatatgtaataaaaaaagattaaaaaaaagaaaacaaacaaacaaaagaaaaaaaactcaaaggattgaaatttcaacatctattttcatttatcagtgatgttaatcatatccccttcccatatattcctcatgattcatattctgattaattttgaaccccgtggtcagcatccacctgaagatatccttcgggtaaaacctttagattgaggttgtggtgccttgagaagcaaatcacagggaagaggaccattgccatgacactgtgtactttattgtcccactgttccacaattggtcgttaggtttcagttggtgtgggttcacttccagtttttatttggttgattgttgaatgtcccccttaccttctggcattccaagcagcaccaggctcatctagtgtagttcccactacaggcctggagtcagctgtgttctaggaatttgtggttccttctattttagaatagcatagaaactaccccacctataagggcccatctcagcatatcctaccaacggcacatgagatgaaggtgatttatcaacgatgatgctgactttgatactctagacaagataggacttagctccttcactgtagagataatgccctctcccctcttccatttggactgtttggaaggacattattgggcacagcacacacataagaagtagagagctatgatctacgttcttacataaatccttatgtaagattttactattcctctatttatcaggttaatgcagattcatagctgtttgttttacagcttcagttgtgatccatttctctatgcatgctactgtagctttggctagtaagattttcagtgtgccttttatgcccctactcacaggtaggagatttagcacttggtttgctttggtttctgagcacttccctgctttctagacttacaaaatatctcagagaaacctggcatatttcttactgaggcctaaaaccagctatttatttacatcagtctggttccttttattggaagacagtataagaacaagatttgtgttctaattgtgctcaaagctaccagcatatcattgcttctaaacccttcacttccagcacaagaaaatatgtgtgtactcactggtgtacatctgtgtctatcaccatcttcctataaccatgtcatccgcatcaaactacacaatgttcaaaatgaagttggctgctctcctccattacaggtgaaacattcgagcctctattttaaattatcactccagggactgaagtccctagtgccaatatctgcgatcaatcattcatgaaaagtggaaacacggtggtgagatgtccctttcagaattcctaccataggcttagtgattcgttctgtccttgcttaaggttcagctcttgctgatgcctttgaagaagtcatttcagtccatggatcaggccagacattcttcaatattccctcataacaccattccctttataaccttaaccagaaaaatacatacatgactaattttgcaaaggatcatataattgctttctctctcttaggacactggctttgtgaagaccttacatcccttgctcagagctaagcatgcattatgtacacatgtggtaaacattaaagaggtgttgaagtcatagacttgttcttctgcccagtgagacaggaaaaaggctgagaatgccatcttaaggccatttctgctttctggcatttttagatcctcaaaataatttgcttatgcatctccaaagttcacaaagtagaaatggcactatatggaagttaaaaataggcacacacatacacaaagagtcataaagtcaatcagaggacaagattccatgtgggatgaatagcactgagataaggaacaactagattaaatgttccagttcctgagtgtgcctgtattagctattgccttgggagggaccaaaatgtcacagtttaaagcttcagaaagatagatgtctcatgatacaggagttggatattggtaagagccaggcatcatggagtgtatgggtggtgccttcctccttccctagaggagatgctgatgtaataaaaagtgtcactggattttggtttggtttggtttgttttggttggttggttggttggtttacattccatttgcctagaatttgttttatattattatattaagttatattacattatattatgtactcagattcctgttgacagaaaaggaggtagattcagatggaaagggagatcagaaggaagtaggagatgtagagagaaaagcgtcactaaattttgttttggtttggtttggtttggttggttggttggttggttggttggttggttggttgaaaaaagatttcagagcaaggaaacaatgttaaaacttgcaagaggaaaatgacaactcacaagggcaaattctttttgcctcagagcagaaaccctaactgctacagaagcatgtaaggatnnnnnnnnnnnnnnnnnnnnnnnnnnnnnnnnnnnnnnnnnnnnnnnnnnnnnnnnnnnnnnnnnnnnnnnnnnnnnnnnnnnnnnnnnnnnnnnnnnnnnnnnnnnnnnnnnnnnnnnnnnnnnnnnnnnnnnnnnnnnnnnnnnnnnnnnnnnnnnnnnnnnnnnnnnnnnnnnnnnnnnnnnnnnnnnnnnnnnnnnnnnnnnnnnnnnnnnnnnnnnnnnnnnnnnnnnnnnnnnnnnnnnnnnnnnnnnnnnnnnnnnnnnnnnnnnnnnnnnnnnnnnnnnnnnnnnnnnnnnnnnnnnnnnnnnnnnnnnnnnnnnnnnnnnnnnnnnnnnnnnnnnnnnnnnnnnnnnnnnnnnnnnnnnnnnnnnnnnnnnnnnnnnnnnnnnnnnnnnnnnnnnnnnnnnnnnnnnnnnnnnnnnnnnnnnnnnnnnnnnnnnnnnnnnnnnnnnnnnnnnnnnnnnnnnnnnnnnnnnnnnnnnnnnnnnnnnnnnnnnnnnnnnnnnnnnnnnnnnnnnnnnnnnnnnnnnnnnnnnnnnnnnnnnnnnnnnnnnnnnnnnnnnnnnnnnnnnnnnnnnnnnnnnnnnnnnnnnnnnnnnnnnnnnnnnnnnnnnnnnnnnnnnnnnnnnnnnnnnnnnnnnnnnnnnnnnnnnnnnnnnnnnnnnnnnnnnnnnnnnnnnnnnnnnnnnnnnnnnnnnnnnnnnnnnnnnnnnnnnnnnnnnnnnnnnnnnnnnnnnnnnnnnnnnnnnnnnnnnnnnnnnnnnnnnnnnnnnnnnnnnnnnnnnnnnnnnnnnnnnnnnnnnnnnnnnnnnnnnnnnnnnnnnnnnnnnnnnnnnnnnnnnnnnnnnnnnnnnnnnnnnnnnnnnnnnnnnnnnnnnnnnnnnnnnnnnnnnnnnnnnnnnnnnnnnnnnnnnnnnnnnnnnnnnnnnnnnnnnnnnnnnnnnnnnnnnnnnnnnnnnnnnnnnnnnnnnnnnnnnnnnnnnnnnnnnnnnnnnnnnnnnnnnnnnnnnnnnnnnnnnnnnnnnnnnnnnnnnnnnnnnnnnnnnnnnnnnnnnnnnnnnnnnnnnnnnnnnnnnnnnnnnnnnnnnnnnnnnnnnnnnnnnnnnnnnnnnnnnnnnnnnnnnnnnnnnnnnnnnnnnnnnnnnnnnnnnnnnnnnnnnnnnnnnnnnnnnnnnnnnnnnnnnnnnnnnnnnnnnnnnnnnnnnnnnnnnnnnnnnnnnnnnnnnnnnnnnnnnnnnnnnnnnnnnnnnnnnnnnnnnnnnnnnnnnnnnnnnnnnnnnnnnnnnnnnnnnnnnnnnnnnnnnnnnnnnnnnnnnnnnnnnnnnnnnnnnnnnnnnnnnnnnnnnnnnnnnnnnnnnnnnnnnnnnnnnnnnnnnnnnnnnnnnnnnnnnnnnnnnnnnnnnnnnnnnnnnnnnnnnnnnnnnnnnnnnnnnnnnnnnnnnnnnnnnnnnnnnnnnnnnnnnnnnnnnnnnnnnnnnnnnnnnnnnnnnnnnnnnnnnnnnnnnnnnnnnnnnnnnnnnnnnnnnnnnnnnnnnnnnnnnnnnnnnnnnnnnnnnnnnnnnnnnnnnnnnnnnnnnnnnnnnnnnnnnnnnnnnnnnnnnnnnnnnnnnnnnnnnnnnnnnnnnnnnnnnnnnnnnnnnnnnnnnnnnnnnnnnnnnnnnnnnnnnnnnnnnnnnnnnnnnnnnnnnnnnnnnnnnnnnnnnnnnnnnnnnnnnnnnnnnnnnnnnnnnnnnnnnnnnnnnnnnnnnnnnnnnnnnnnnnnnnnnnnnnnnnnnnnnnnnnnnnnnnnnnnnnnnnnnnnnnnnnnnnnnnnnnnnnnnnnnnnnnnnnnnnnnnnnnnnnnnnnnnnnnnnnnnnnnnnnnnnnnnnnnnnnnnnnnnnnnnnnnnnnnnnnnnnnnnnnnnnnnnnnnnnnnnnnnnnnnnnnnnnnnnnnnnnnnnnnnnnnnnnnnnnnnnnnnnnnnnnnnnnnnnnnnnnnnnnnnnnnnnnnnnnnnnnnnnnnnnnnnnnnnnnnnnnnnnnnnnnnnnnnnnnnnnnnnnnnnnnnnnnnnnnnnnnnnnnnnnnnnnnnnnnnnnnnnnnnnnnnnnnnnnnnnnnnnnnnnnnnnnnnnnnnnnnnnnnnnnnnnnnnnnnnnnnnnnnnnnnnnnnnnnnnnnnnnnnnnnnnnnnnnnnnnnnnnnnnnnnnnnnnnnnnnnnnnnnnnnnnnnnnnnnnnnnnnnnnnnnnnnnnnnnnnnnnnnnnnnnnnnnnnnnnnnnnnnnnnnnnnnnnnnnnnnnnnnnnnnnnnnnnnnnnnnnnnnnnnnnnnnnnnnnnnnnnnnnnnnnnnnnnnnnnnnnnnnnnnnnnnnnnnnnnnnnnnnnnnnnnnnnnnnnnnnnnnnnnnnnnnnnnnnnnnnnnnnnnnnnnnnnnnnnnnnnnnnnnnnnnnnnnnnnnnnnnnnnnnnnnnnnnnnnnnnnnnnnnnnnnnnnnnnnnnnnnnnnnnnnnnnnnnnnnnnnnnnnnnnnnnnnnnnnnnnnnnnnnnnnagagggagagggagagggagagggagagggagagagagagagagagagagagagagagagagagagagagagaaagggaatggtagcagaacacacaggtctacacttggtgtcttaaagatataaaccattctgataatgaaaaataacacatacgtaccaaattgaactgagctctctgtgtatttgaaagaggaggatatatttgacctgtctcaagtacgtaaggaggaagcgcttggacatgcagtgaattggggtaagggctatattgtgaaaaccttggtaattgctctctgtgtttatttgtttgattgtttgtttaaaggtgcagctctcaccaaactggtgtgtcagttctatactgaacagtcaatgctaaagttgacagaatgtgaacttcacatagaaatgcaaaggacacagaacagtggaaaaacttcagaagtgaaagaagctgtcagaggactgccaccacatggccagggattcacagagctgtgacagaactccaaatgtctggccccaaagttaatacatgtacagacaatagatccaagtagacgttctagaaggaaacccactcagatgtgcacaaccaactgtttttagcaaaggttcaaaagtgcttcagttgtaccaggtacatttatagcatatagatgtctatagacaacagaaaagaaatgaaaagcctaataaggcatattaaatcagctgtacagatactctgacctgtatacaggtcggaagtggactctagcctatatgtgtgattactcctgctgcagcaacttagaactcagtagacctttaaaaaaatcatcatgaaagttgatatgaactagcacagggtaattgtaaatgatttagtataaaagtaacagaaactattaaaatagtcatttcccactcgagggaaaataacatactaaaacttcctttgcctgggatgcttcccacccttaaatccttttagaacaaggtgggttgtgaacaatgagtagagttggaatgatggaagatctaattacttcacgctcagggcacgacttgcatccccatcgcgtttgaaaaatcctccaggcaacccacttctcttcctttcataaaattatttctcagtttacaatcatttttattgtcacttttgataagttctttaaaattagcatgcattaataatgagggtcataatgacactgtcaatcatgtgtgtctttgtacttcactcctagtcacagctcattatcttcccttgtttgccacaccctcccactgttgcccatgtgtccctgttctttcttgtcctgtcatccatatgtgtatgtatgtagaaagatagataggtggatgataaatagatagatagatagatagatagatagatagatagatagatagatagatagatagatagatagagcaagctatacacatacatgtatacacatatatgtatgtatgtatgtatgtatgtattttgtggggcatttagttatgtatctacattaagttactttgcccattgcttacatagaatataaggcaaaggcaacctaagacagcaagggtttgttatggtttctggggacaatagaacaaagcagggacatcatggtagcaagagcttgaggcagccgatcacactgcatcctctctcggggaggagaaggaaatgaacacttggttcagctgattttctccttttctctggagtccttccctacagcacaggggaggcactgcctacattggagtggatctttccacttcaatagttcttgccaaagtaaccccataaatgtgttttaaaggcaacactgacgaagaactacttaataggtttgtttccttggcagctctagataaagggtcctcagccttcctaatggtgagaccctttaatacagcccctcatggtgcagtgcccccccaaccataaaattatttcattgctacttcaaagctgtaatcttgctattgttatgaattgtaaagtaaatatcggataggcggggtatctaacatatgacccctgtaaaggggtctttcaactcctcaaaggggtcatgacctttggttgagaaccactgtcctacatcctgtcatatgaacagtcaggtgattttgcaaatactgtcattgtaaagcaagagtttgttatgtcttctagttttctataacttccccagatagtctatggacccctcccctgaacacatcttctaactcctgctttttcacagcctatacagggacatttacagtctttacaattgttctctatacatgtgtttttagtacaccttttaaatccagagttcacttatgagaaaaaataaataaataaaaccatgccatttgtagttctgagtctggctgattgaacttgacaaaatgatctttggtttcacctattttcctgtgaatggcatacaagttgtgttcttgatacttcacatttctttatcaattcatctgctgatacacatctggacagacagcatacgtgagtagtgctacagtaggtgtggtcgggcaagtatgtaagcgatgccagtcccttcagctatatgcccagggactgtatatctaggtcaaagggtagatacatctttaatgtttttgaagaatcttcattctgatttctccagtgtcttgactgatttaaattctgagcaatagtatatgagggtttcctttgtccccacccacattcttgctaacatttccccattgtttgtagtcattgtaactattgtgagatgtaatctcagtgttgatttttaattttatttatttattttgagaaattgtcatctttacagttcctcattacatttttaacagtagattaacaatgtaagctttcaaaatgtattatatgacattgtccaaccattaactgccttttaaaatgtttatttactttcatgtgcattgtgttttgcgtggatgtgtgtctgtgtgagggagccagatcccctagaagtggagctgccatgtcggtcctgagaattgaagctggatcttctggaagagcagccagtgttcataactgctgagccatctcttggtattcatgccaataccatgacatctttgtctctgtattataatttgatatctgatattatgatatcgaccatgtttttccttctgattaggcttgctttcactatccttcttctgcatttccctatgaattttaggattgggtaatttggttagttggttgggttggtttcgttttttgtttttgtttttgttttctctattcttatagagaatgtgtggccttagctagtctgaaacccattctgtaaaccatattgccctcttacgcacagagatccaccagtatctgccccccattcgctgggatctaagcctacaccaccatgcctggcttgcagtggagttctgacttttcatttccccctggctaaggatgttaaatatttttctcatgtattagttgtttctgcttttgagaatttccagttctattcgttttcccacttattgattggatgaattgttttggtgcttaatttttttaggcctttacagatattaatcccttcacagatttacagttgacaaagatttttctcccattccgtaggctttctcttagttctactggaagtagtgtctttccagtacagaagtttttaatttcatcagatccagtttgtcaatccttgccactatttcctgagtgtctagagtccttctcagaaactctttgcctgtgcctatattgtgaagtgttttccctaaattctaatctaacagttctgatgtttcattttcttgtattaacggctttggcctgttttgaccttcagtgcagggcagatgtagacttggtgtcattcttctgcatgtccatatccagcaccgagtctttcttaatgaatttttattatttttcagttatgtatatgtatgggggaggggcagtaggatacacatgtgaatgtggttgcccagggaggcccagagatgtggaatctccttgaaggtgaagtcacatgcagttgtgattccactcctaacccctgagacatctctctaaccccatttcttgaagtaacacctctctattttaatgtactttccatctttgtcaaatgtcggtggctgaggcttggtgaaatttcttctgggtactttttccatttgtccacatgcttcaccttggtaccaataccctgccatccttgtctctctgcattataatttgaggtcaggtattatgacgctgaccacatctttccttctggttagactgcttccactatccagagttttctgtgcttccctgtgaacttttgttttctcttctctgttcctatgaataatatttttggatgggacttgtgttgggtctgtagattgcttttctgacatacagctgttgtcatgatgctaactctaccaatctgtgagcattgagagtctttacctctctccaagttcttccttcataatcttagagttttcattacacaggcttcacctgatagacctactctttaattatttttttaggttactgtggtgtcttagttaggtttttattgctgtgaacagacactgtgaccaaagcaactcttataaagaacaacatttgattggagctggcttacaggttctgagagccagtccattatcaatcaatgcaagagcatggccgcatccaggcaggcatggctcaggaggagctgagaattcttgatctaaaaccagacagaagactgacaaggctcatcccacagtaacacagttcctccaacaaggacacacctcctaatagtgccactccctgttggccaagaattcaaacactcgagtctatgggggttaaacctattcaaacagctatagtgagagtgattgtgtcctaatttctttctgagcaagttcattatttctatatagaaaagctactaatttttctgttgatttttgtgctgggtagttttatgtcaaattgacacaagctaaagttgtctgagaagagggaatcaaaagtaagaaaatgcttccataagatggggctgaaggcgagcttccagggcatcatcatcattattattattattattattattattattattattattattcccaagctataggtcccttgttgcttgctgtttgtcatggccattcacttctggtcaatggtggttccttcctcctctgtcttcctctcctctttttttctcaaacttccagttccaccttttccctccactgcccaatcacagtctctatccttttattgaccagttagattgggaataaggttcacatggcattactttatgcgatctgctcatggggcaaccacatcttaaggaaccagtatttagcattagaatacaagccgcaacagaacaacccactacaggtatccctagctggtggcactctttgggaaaatttaaaaactttaggaggtggatcctaactgtaagtttttaggaactcccttgaggttttactacccagccttacttcctgctcaagtctgcacacgatgtgactgaccaacctcctggtcgtccaccaggcctcccctgcctgatgtcatttattttttctgttatgatggattctaactttctggaactgtaagccaagataaaagtaagccctttctctcttaagtcacttttgtcagtatattttatcatagacatgataaaggaactagattatgttatgaatgaaacaatgtggtgttttatagaatgtttcatagaatgctgagaggaacatctagtgtgcacaccaacagaatatctgatccatttgatctagggtataattaactctaaagttggctgttttctgaatgacctatttggtgatagttactgaatcagtgattattatgtctggccccttatgtgtaatagtacttgtgttgcagaattggatgtcagtggttgatacttgtatttgtaattgttatatattttatgggttattctttctttgtctcctctgaccaatttttccttctagtctacttctttgatatattgtatggcttggttttaattgtcacctttcagcttgtcttgtttccctttgtttggagtataattttccaaccttttgctttcagtttatcattatcaatgagacagtttttgggctttgttgttgttgttgttggtggtggtggtggtagtagtggttggttggttggtttggcttggtttttgttttgttttgatttttgttagtttgctttgattggttggctggttggttttggttttggttttggtttttggttttttttcaactagccaatcttcatctcttagggggaaatgttaaatgcatttacattaagctactatcatttactgatttgtgtaataatgcttttaagttggttcaaatataattcctttactttcccatatccatcataaatttttatgaagtttatgaaagaatgattaatttctcctgggttttcatttgtttctcatattgttctcatgaaatttattataacacaagctcttgttagtgtttcttttctctctgcatataattcccttaagtttattctggagtatgtcgtcaccttaggttgtttatttgtgcttatcttagaaggtctttatttcctcatcacttttgaaagataactttgctgggtataaaaatcttagttgtcagggctgtttattttcaagacttgaagtacatccttacatgcttctgtagcagttagggtttctgctctgaggcaaaaagaatttgcccttgtgagttgtcattttcctcttgcaagttttaacattgtttccttgctctgaaatcttttttttttttatttagacagttctcactatgttaccctggttaacctggaactctttacttagaccaggcttgccttgaatactgagatctgtctgcctctgcctcccagccaaggtatgtgtctatagaaatgaaaagtttggagaaagtcattctgaatgacatcacttactaaatcatgaagtttcctagggaataaaatgactcactttaaaaaacaaaacaaaacagggagttaattctttcttaaatagattcaatctggagacaaatgagaagcatttgataattacaggttggcttcaaataagtgatattggggcactgacacctagtttctttctttctttctttcttcctttctttctttctttctttctttcttccttccttcctttgtttctctctttctttttttctttcttcctaaagacagggtctatggagctctggctatatagacctggcctcaaatatagagagatccacctgcctctgcctctcaagtgctaggactaaaggcatgcactactatgcctttgtttctctttaagtcttgggccatctgcatgaacagtgaggctaaagacactgagaaagtcaaaatgacagtgaactggggacaggggggtgggcagggagtggatattccctttggaaaccttaaaattttgaaaccatagtaacttcattgtttacatggatcactacatattaataaaagttactctcatctcttttcccttttgtagatgaggaccactcgcaaggtttctgtctggcctgtgggactagttggtgggcgacgctatgaacgtccgttggtaaaaaatggcaaagttgttggctggtacaccggatggagagaagacaggccttttgccattgacatggctggtgagcagaatgcatgggacatttgtccctgtaggatggggcctagaagaaactgggaaagaccaattttcataaaacccttaagtgtacttcattcatcagaggaaatattaatattcaaaatagattctttgatggttcaagttgaagttgattttagaagtggttagaaaatactctctatacttttgtctaacaaagtttatacatcagtattgggttgggcatatggggtttagagataatggaaccatagctcccacctctgtgtagtctattagctaaaaccttttggtgcctctgtctaggaagctgataaattaaatatgtcatgtctagtgacaaatttggtaataaattaaacttgacaagtcattttaatgtttattgataaatttagtggtctactaatatatttaaaagctaaaacataaaattgggttctggttttccatatatccattattttttgaagagaactatcttttaaagttttcatttcctgaccaaccaactgaattgaattagacccatgtggaccacaaagttttcaaacgctgctttgtcaagaagagattcattttctgtgggctctagaaagtgatgcttttgattgctgtggaaggatgggatgtggaacctgagggttagagggaagatgatcgctaccatctataactgacaaggtgaagagaaagcttttagaatctattgcatccatcaccagcactgtcttgtcagcttgggctctctcacttctttcatgtgtatttctcaaccacagtcagagactctctgctctgatggtaagaatactatgctctaaactggactcgccacccttattctgaaactataaatcttgaggcaataagattgtaaaaaataggaacaaagtatccacaatttggtcttccttcttcttgagtttcatgtgttttgcaaattgtatcctgggtattctaagtttctgagctaatatccacttatcagtgagtgcataccatgtgtgttcttttgtgattgtgttacctcactcaggatgatatcttccaaatacatccatttgcctaagaatttcaaaaattcattgtttttaattgctgagtagtactccattgtgtaaatgtaccacattttctgaattcattcctctgttgagggacatctgggttttccagcttctggctattataaataagactgttatgagcatagtggaacatgtgttcttattacaagttggaacatcttctggtatatgcccaggagaggtattgctggatcctcctgtagtactatgtccagttttctgaggaaccagcagactgatttctagagtggttgtataagcttgcaatcccaccagcaatggaggagtgttcctcttctccacatccctgccagcatctactgtcatctgaatttttgatcttagctattctgactggtgtaaggtggaaactcagggttgttttgatttgcatttccctgctgattaaggatgttgaacatttttttcaggtgtttctcggcccttcggtattcctcagttgagaattctttgtttagctctgtaccccatttttaatagggttatttgattttctgaagtccagcttcttgagttctttgtatatattgaatattagtcccttatctgatttaggattggtaaagatcctttcccaatctgttggtggcctttttgtcttattgatggtgtcttttgccttacagaagctttgcaattttatgcggtcccatttgttgattctcgatcttacagcataagccattgctgttctgttcagaagtttttcccctgtgcccatatattagtgtggatacttctgttccttcttagaatggggaacaaaatacccatggaaggagttacagagacaaaattcggagctgagatggaaggcaggaccatccagagactgccccacccaaggattcatcccataaacaaccaccaaacccagacactattgcatgtgccagcaagattttgctgacaggaccctgatacagctatctcttgtgaggctctgccagtgcctggcaaatacagaagtggatgctcacagtcatctattggatggaacacagggccccaatgaaggagctagagaaagtacccaaggagctaaaggggtctgcaaccctgtaggaggaacaacaatatgaactaaccagtaccccccagaacttgcgtctctaggtgcatatgtagcagagggtgagctagtcggccatcaataggaggataggcccttggtcttgcaaagattatatgccccagtacaggggattgccaggccaggaagtgggagtgggtgggttggggagcaggatgggggagggtataggggacttttgggataacagttgaaatgtaaatgaagaaaatatctaataaaaaatctgaaaaaaaaagattgtaaagaataatagaagttgagaatgaaacacacaaccatggtgtatctatcgcaatgaatcatgggaaaaaacaaatgagttttgagcctcattttacagactacaaaagaacataaacttgaggatatttgccatggtctctggaaccttggctagtctagatctcttgttcctgcctcatggcccaaatccactgtccatatttttaggttttagtttttaaagccccagagctgtgcaccacctcatttagctggagcggctaagaggtaggttcactccatgcatgggagaacccattggttcttttttttttttttttaataaaaatgttgagaactccatctatttcattctcaagcttcctttgccccctccagctcctccagtggcccccaattcctgacctcttctctaattattactcatacatgtatatacatgtgtgtgtgtgtgtgtgtgtgtgtacatgtatatataacctactgaatgcatttagcattgctcatatgtacatgtgtcctaggctgagcagcttctccatacagtaatctaattctccctctcagcagccaatgattacctgtgggtggggccacatgcaattctttgtccacattggctcgtcaatgatgttgctcctacgttggccttgtttagtcaactatgctgttgagagttcatgggcacacttcccctgtcatgtctagggaacactaatgctcttttcacctcctcttctgtgatttctcttaggtgtagcgttgcactgcagttgtatcatttagggttaggcatcccatagtcagttattgatcctaggggttatccatgtctcatccatggctctgaaaattcaagcctaaaacatcatgagtgttagaaaaactaaacatcttttttgactatgatgtaagctagagcagtcaacttggagaaaccagggaaagtccctccatttctctgggatgcagtgtcctcctgtggtgagaaagggggctacatgagagtcccactgcctgcctgctcctagtgccacaccttggtaaacacagagagaggcttacatgctggacagccaagtgacaattcaccaccattgggagagaagccagctgacacacgttcgtttggtcctgaacatccatggatcttgtttcatgaccattcccagacagcttccaggatgcacactaccttacatgagcagtttggtgagggcagcttggataatttctagcattcgtttccaaattgatatttctgaaatacaaggaagacatgcaggcttattcactggggactttcattgtaagacctgagagatattgtcactactaaaattctatgaaaatctcttccccgtgacaggactactgtttggacttttctgcccatttcagtacatttctaaaccacgatgaagcatgcatatcataaatttgtctgatctaactgttgtcttggaattcttacttacaataagtataccatgtcaccttcaagaaaacttcactccccacttaaatttgctatgtatcttagttttcaataaattattgatatttctggaagcctaaaaatgtgggtaatctggttggcaagataacgagtctgggtttgaagaactctgctctcattctgaaactttaaaatgctcatcttagtttagactttacttgtgcagtctccatagaaatggggagaagtggacatatacccaaaagatttttcaacatatatcaaggacacatgctccattaggttcataacagccttatttataatagccagaagctagaaagaactcagatgtccctcaacagaggaatggatatagaaaatgtggtacatttacacaatggagtactactcaactattaaaaatgatgaattcatgaaattcttaggcaaatggatggaactagaaaatatcatcctgagtgaagtaacccaatcacaaaagaacacacatggtggtatgcactcactgttaagtggatatttgcccaaaagctccaaatacccaagatacaattcacagaccatgtgatggtttgtatatccttggaccagggagtggcaccatctgaaggtgtggccttgttggaataggtgtgacctggttggaatgagtgtgtcactgtggttgtgggtataagatcctcaccctagtttcctggaagtcagtcttccactaggagcctttggatgaagacatagaactctcagctcctcctgcaccatgcctgcctggatactgccatgcatccaccttgatgataatggactgaacctctgaatctgtaagccagccccaattaaatgttgttttattaagacttgccttggtcatggtgtctgttcacagcagcaaaaccctaactaatacagaccataagaagctcaagaagaaggaagaccaaagtatgggtgcttcagtctttcttagaaagggaaacaaaatactcatgggagcaaatatggaggaaaagtataggacagagactgaaagaaaggccatccagagactgtcccacctggcgattcatcccagataccaaacccctacactgttgtggatgtcaagaaatgcttgctgacaggagcctgatatagctgtctccttagaggttctgccaaagccttacaaatacagaggcggattcccacagccatccattggactgagcatggggtccccagtggaggagttagagaaaggactgaaggagctgaaaaggtttgcaaccccataggaagaacaacaatatcaaccaagcagaccccccagagctcccagggattaggccaccaaccaaggaatacacatggctccagctgcatatgtagcagaggatggccttgtcaggcatcaatggaaggagaggtccttggtcctatgaaagctcaatagatgccccaatgtaggggaattgagggtgaggagacagaggtgggtggtgggtggaggaacaccctcatagaagcagggggaggggataggaagtttctgggaggggggaaactgggaaagaagataacatttgaaatgtaaataaagaaattatccaacaaaaaaaaatggtgaaaaaaaaaaagaaacagggagaagagctctcaggtccttaggcccatgaattaggtactttcttcctcattttcatgttagtatggagagggaggggagaaggaaagggaaggggagagtgaatgagtgaatgaatgaatgaatgaatgaatgaatgaatgaatgaatatgagaatgaatgaatgaatgaatgaatatgagaatgaatgaatggctatggatgaataagtgtgcgtgaatgataatctctaaagtgggagaaggaagccagaagctgcatcctgcagagaaaatggtgttcagtggctccgtggcagttgtttatgacaatgttttgcacttcgggtatctctagtatttatcaggctgactgagaagccatatagcgtggaatcactgtggactatattgcttttgctcctgagcatggccagcagcagtgctcagaacccagcatgctggtgttttggtgaagccatagcttagcccagcactgaagctcctgtaaatatcagatatagaggagagatgctcctgcctgcctcgtgtcctccatacagccttcagactgtcttctggtgtcgcattggactttcctgatgctgaaaatctgtcagataacgtaagacactgctttgaagttttcctgtgtgcatgatgttagacagaagcagacgtggcatgatattttcttgaaggtgacatggtactactattttaaaggaaaggatctgctctatagggcatttttaaaactctctaatcattaccccttaagttaacatccctctgagatggagaggaagcattgcaggaggccggcctgtggcttgctgttggctttgggtatgcactgctctgccaagacaatgggaaccctggagtattctacagggctgtgcctgaggcttctattcccagaataactctggcatctgacaactgactcaaacaggcagtccacgcagcattttaggtctgctctgtgggcagggaattactttcaagtgacagcctcatttcggccacttctgcggaaatgtcagtaacgaacattgcttgaaagagctgagctgaaggtaatttgaagccactccagggaatccagatttgcttaaattcagaacttaatgctgagagccttatattgaattatacatatatgttatattaaaatgtctatatttcatttttatattaaaatgtttccataaagtatattttgatcatgtttatgttgaccttacattaccttagcattaactccaggaagcagcaaggcgaacattgtactcggttaataacggcatgaacaatttctgggtgagtgtctggcgtgcagtggatactctcttctgataaaaacaccaaactgaatgtgccacatttctggtactaatcagctaaggctggtgcatgttccataaatttgagcttttcagacagacacacaagccacactttgggattcctaggccaagtatggcttctgagactccattgtactgatgtgttcatatacaaagccagacgcccgttaagtgatatcccggtcacttttgatgctttagatatttcatgatggacacaaaatgatcatgaagtgtttctcacatgtggctttccaggtacatcttcctgatgcctgaaagtccaaccaccatgagaacatgaaattcctgagaaaggactctttcattcagggaacatggagctgcctggggttgtatcctgggagacagaaccagggaagatggtagaggaaagaaaggacagagaaatagattgtgcgtctggttgttaaataccacaggcgtcacaggctgtaggtgatggtgaatgtagagtcaggagcacgggcagtatggaagacaggagtccacaggggcgacacccagtaagaacaaactgtcatcaaaatggaggaaagttggcttccagtagagcagacaggacgttttatctctgaagagcatagaggtttggagagaacaggaacatcaagggtgttgtggatatatgaagccaaaaggcctacaagaagaggttcctgggagaggttaggatagaatgactcctgagattccatcaacgctaggtgtgttatttgggcaagttctggttttaggaactggagttattagacactaaacctctgttcacagtgtagtttctgttgacacaactttttctaaccattaggcttcatcatctaaccaggtggcaggggatttagactctggggcccatcctagacctttgggggaagtgggttgataatgggtgtgggactggaagggccaagggtgaccaagaggtaagagaaaggcggtgtcagtttcagaagccagagactattatctccttccctctccctcaccccacctctatgtgttcatctccctccccctctccctccctctccccctctccctctccccctcttttcctctcttctctctctctcaggtggccatagtagaacaggcatgtaatcctattgtttggaagatagagtctgaaggctcaggaatccaaggtcaactttgactatgtggcaagtttgaggctggtctgacctatgtaaaacactgtctcacatagtagggggtagagggtataggagggatagaaagagggaagggaaagttttgaaagctccaatggaaaggaaattagggtggtagacacaaggatatgtgatggaccagttctcctagttgaaaacttttacttctggatgaaggatgacattagttaaaataataattaataataataatagtgatctaggactggaaagcaggaggtctggctgtcaaggtgggggtggggtcaccagatgagtggtaaagtgttatctgtcccttttccacactgattgagcaacacactcagcattttagacagttcatgactgacgcaaacgtgatgagaccatgaagtgtttctcacatgtgacttaccaggagtgtctcctagatgcttgcagttctctgaattccctgcctggagttcagtggtcacaagtgtgtgaaagccaggaaaagggggcctttgtttagggagaatagagctgcctgagattgtatccaggggacagtcacctcacctggccacagaagcggttgggggaggagccagggaagattgaaccagcagagaggatagaccaaggaagggagagatcacaagacccaactcaattggtagcatgcaataggaaatgtatttggggctaaattttgtgtacacagagcatctgtttcatcagattcaggacagatgtggtacaagaggtggcacttgagagtcaccttattctgctggctcggagcaaacagggatcagtctcaatgggacgcatcttgggaacaacagatggggaaaggcaacaggggtcaaaccatgaggacttagtgacgatgcagtacaatgccctgtgcttagtggagagtctgaaatgcttcaaataggcaacttgtgttattagacatatatttgcagccacatcagcagatacagtgtgaatgatggctgtggctgatgactctgcagctctctgggtaggagagagatgaggacagggtaggaggtaagaggtgagaggtggccttcaatacccagtcaccagggacataacatcctaaggagccatttcattttactgtcataaatcagcagacatgtagcttgtagcactttttctgtatgtgtcccagtggtaactgatgtgttaaactgaagtttgctttagctttaattgatgtggtttgtattatcttttaagttgcaattttttattgtttggggtggggttgttttgtttgtttgttgagatgtttgttttgtacaccttggctaagagccatctgggatcaaatggccaccaaagccagaggagcaatcgcaccaagacatttacttgctttctgtgtaaaatggttgcaagaatatacgatggcttccttgttcctttggggccatttgtcatccaagcatgctgttttccatgcatgaaagcccggtaaggtttagaaagtcccagaatgtccacagagtggctttatgtgtgttgtggtgtctactagcccaggctttggtcttgggttggtgtgaagtggctgtcactggagttgtgtgtgtggggggggggagtctctaggagaaaacttcagtgcagagcagggtagcggcaaagtgttcctgtgatcggcaacctgctgcttgtttcttgcccatttgcagctaagatgctctatagagatgttcacagggaacttcagctcccagggcacttcagtcatgactgtgtggagtaaaaatgggtacccagctccgtgcaactgggcgctcacaatcagagaaactctctggtgcagctggtgagggggcagggcaaggcagtagaggaggggcagggagcaggttccagagtgcatgtaccacttcaattccagctgctctgtttatatagtagaagatcagaagatccctcgaggtattgatacaataaaccatttcttcaaaactaaggatacgggaaacctatattttccttatgtctttgaaatccagccaactcaataattacatgttacttgcttaacatttagcaggcattcatcggtccctgtgtgcatcctcacttttaatccactcaacagtttgctactcgtcttcctcatttcagcacacagacctaatacttaaacgtgatcggtaacttgtatggggattaagcgattaagagctgggaattagttatgtccttgtggctacagaggcagccttcccactttgtttcaaatcccatatctctgcttacagccataggaccccagtctttgatgtctgggcctccatcttctttctctgcagagcagagaaaatgaaattcttaaggtgtagcatacaagcacccagcagaacactgtaaatactcaaaggctgtaatgtgtcttaaccaagaaagatgaatgtgactcagaggtcacctgattttagatgaatctggttagcgctttgattaatacagcagtcggatccatgcaggcagccgtggataggtgggtcactgacctccaggtcccacttggacatcagcaggcagcacatggtaaagatctaacccagaaacacagtctgcttcctgatctatcgatgagggtcataccacctgccctctgggtgatgggaagttcagatgagaatgtgtgctcagatgtgcctgctgttatgtgaatgttggaacctatacctgcatttggctatttcaattcagtccaaagttggtaacttcagagcacgcaaactccactttagacctcatttttctgctggctggtggatcttgctcactatcattcttgctcagcatgcagactggcacgctgaggtaaatgttggccccagcttttagatgaaacaccccaagaagagagtgatcaatgagagaagagaaccataaaagatcattaaagagctgttcagaagcacgtatgtgttcatttttataatttcccagctgagtaagccaaccaagcaaaagcactcaagcttgcaaaagcaaaggccatttgtaacatttagatccataagatgtctgtctgatgccactgcccctgtgattggtcggcggaatccagctgcccctgtgattggtcgacggaatccagctgcccctgtgaatggttggtggaatccgctgccccagtgattggtcgacggaatccaggcatacctttggttgctggatgtactcataacctgtggggaaagagttaaaagaattctccctctttttatttttttttctttctactgagtcacaggaagaaatgttgatcactctgtcaccctcattttacagagaacatctgcagatacaactcagatctgttaaagaggtatagcaattattcatgtaaataattagaattaagatgttctctctggttaaaccaagagctggcacggatgccagcttttctttggaacatggattggctgctgtggctaccatgcttctctctgcactggcttatgaagttaaatttaggcaatgatctcttggctcccagaccacccagacaccctggtccctcattctaagcacagtagacaccaccaactaccagggtcagccattgctgccctttgttactggatggcccggtcatcgagagtggcatgcgctaccctcagcccaagggtaggatgtctccttgccttcctgtatttgccggccaatttctagttccttgtacaaggctcatcgtggatgcagtaatggctttctctgggtgatttttcttgatcttagcctctggaatcctacatttatttatgtgtccacaaggtggcgcacatgtcactgttctcctgacctcagctaggaagggccccagcctctactccgtgtctccctccaggtgaagcttctgttcctggaagtagcagttgaagtgtttactgaattcattaattttaacttttctcccttctccgctctaaggagtttatcaaaatgaagagttaatgccctgttattggttctgagacaacactgccactgtttccttacaaggaaatttaaacagcaaagatgctgagctcgactgcagaacgcaccgagcatagtctggtccacgggtcctcattgggctacacatcaaaatcaccaatatgctcgcctctcattggttaggggaggagccaggtgctggtgtgggagctggtgttttgttgttgttggtggtggtgggtnnnnnnnnnnnnnnnnnnnnnnnnnnnnnnnnnnnnnnnnnnnnnnnnnnnnnnnnnnnnnnnnnnnnnnnnnnnnnnnnnnnnnnnnnnnnnnnnnnnnnnnnnnnnnnnnnnnnnnnnnnnnnnnnnnnnnnnnnnnnnnnnnnnnnnnnnnnnnnnnnnnnnnnnnnnnnnnnnnnnnnnnnnnnnnnnnnnnnnnnnnnnnnnnnnnnnnnnnnnnnnnnnnnnnnnnnnnnnnnnnnnnnnnnnnnnnnnnnnnnnnnnnnnnnnnnnnnnnnnnnnnnnnnnnnnnnnnnnnnnnnnnnnnnnnnnnnnnnnnnnnnnnnnnnnnnnnnnnnnnnnnnnnnnnnnnnnnnnnnnnnnnnnnnnnnnnnnnnnnnnnnnnnnnnnnnnnnnnnnnnnnnnnnnnnnnnnnnnnnnnnnnnnnnnnnnnnnnnnnnnnnnnnnnnnnnnnnnnnnnnnnnnnnnnnnnnnnnnnnnnnnnnnnnnnnnnnnnnnnnnnnnnnnnnnnnnnnnnnnnnnnnnnnnnnnnnnnnnnnnnnnnnnnnnnnnnnnnnnnnnnnnnnnnnnnnnnnnnnnnnnnnnnnnnnnnnnnnnnnnnnnnnnnnnnnnnnnnnnnnnnnnnnnnnnnnnnnnnnnnnnnnnnnnnnnnnnnnnnnnnnnnnnnnnnnnnnnnnnnnnnnnnnnnnnnnnnnnnnnnnnnnnnnnnnnnnnnnnnnnnnnnnnnnnnnnnnnnnnnnnnnnnnnnnnnnnnnnnnnnnnnnnnnnnnnnnnnnnnnnnnnnnnnnnnnnnnnnnnnnnnnnnnnnnnnnnnnnnnnnnnnnnnnnnnnnnnnnnnnnnnnnnnnnnnnnnnnnnnnnnnnnnnnnnnnnnnnnnnnnnnnnnnnnnnnnnnnnnnnnnnnnnnnnnnnnnnnnnnnnnnnnnnnnnnnnnnnnnnnnnnnnnnnnnnnnnnnnnnnnnnnnnnnnnnnnnnnnnnnnnnnnnnnnnnnnnnnnnnnnaactctttcttctgtaggtgccttggtcatagtgttttatcatagtaataaaaaaaagtgcctaatatggacaggatttccctggtgactgtacactatactattgttagccagagtcccccttcctgtgctgtacaatagtggaacttactcatcccgacagtaattctgtggccattaaccaacctgcctccccctctcatacacacacacacacacacacacacacacacacacatactgctctctccttgtgtatcttcagtggaattttttttgttgttgttttttggtttttcgctgtatagccctggttgtcctggaactctctttgtagaccaggcaggcctcgaactcagaaatccgcctgcctctgcctcccgagtgctgggattaaaggcatgcgccaccacgccaggcttcagtgggattcttgaggctgtgaaatcataaaacaagagctggcagctatggtgaaacatcacttagagactagacaaggatgccccaagggtactgagtatccaacccaaggtctctgcatgccagccgggaagcaagggatcttgtacagcaagatcaacagcaggaagtctgaacagtcccatgtgaggcggcctcggcacagtggctccaggaatatggggctgccaggaagggttccctactcaagagtggatggaacgctaccactggggagtctacagaatggcagccaaacaacagagaaagctgtggggtacagaggaaacagtacaaatccaatgggttcagtgagagttcgtgatcagaaaataaaacagatctgtgtgagcgagaaatcaagagaaatcgagtacctttttcctttgacactggctcatcacccactttgaatttgagctctgacccctctaggagggaggcattggtaagtccacttcccctgccaggctgtctgctgtaccaccacactgggtcctgtatcttgtcgccacctcttacacaggccaggagtaaggttactggttccaccgctcctgtttgtgtcccagctgagccagtaggttcccactccacacttcagtagtgatttcagtagcttcccgaggtgaagcaggcccatggtcccacatcaccacaggctgtcacatataccatatgacctgcaacaaggaatgtgtccccctctccagataccacttcattgctcttgagacctgccagccaccatcagatttcctcttggagggagaactgtgaccatagtgtatggttacagtcaagaatggcattgatcacacccccagccccgcccccaccctcaccccgccccgtccccaccccgcctctgcctttcctagcattttgcctttgtatgtgtgctttttgctcaatgaatgaaaaagccctgagtttaaagcaattgtgccaagatttacaaacaagaacattcagaattttattggagtagcctgcctctgtgcaggggcagttatcagactggctttagatttctgagactcttgtagtatggatttggctgaagaagagcccagagttctgagggagaaatggaccctagacatttgtatccagtgatacctcactttctcaaagaaaaattaccaaaagtatgttgccaggacatcccaggagaaactgcgagtccacagtgactcttggtctcttccctgggtaccatccacatataaccccatttcccctctgggcatctacataccatgcagaggtacagccccaggcaagcagaatccggtctgatttagagggagggtggagcttctgatgggctggagggagaaagtctttctcaggagtcttaagcatatggctctttaatcgaagcccactcccatcacctccccaccccccatggcaatccttaatgaagcagctgtccgagacaatccttgtttgtattgttttatttgatggtgtaacagatacactttattcgtggtgaaccagggattattatatacctcttatgagaaggaatacccaggaagggaaggtcattggctgaaagctcacggctatgtagatatctcattagcatggagaagcactcccgatgttaggctatgtgactgagtgcccagagtcctcagagggtgtcatggttacatgttccacagtaggtagaggtgggtaggggaaggctccactcctgcccatctcagttccctgagagtcctgggattggagctcattcatcctggtagcatggacccacgtgccctacaaaagtatagtagctaaagtcaattagaagaaagaactaaataggaatgggaggtggcttgccttagggttctattactgtgaagagacaccatgaccacagcaagtcttattataaaggtaggtatctaattggagatggcttacagttttagaggtctagtccattatcatcatggtgggtagcatggtggcacataggcagacatggtgcaggaatggtatctgagagttctacatccagatgggcaggcagaaggaagagacagtatgccactaaacccagcttgagcttctgaaacctcaaaactcacccccccacaaatcacacttcctccaacaaagccatacctactccaacaaggccactcctgatgtgtcgtgaggacgggcattttcatcaaaccatcacatagttaaaccccgaagaggagtgagcagtgaggtcagcagcccttaccattatgaatgatatctattactaatttaaagcacttggttgttagctaaattgtcacaaagaccatgtgctggaacttgactgctagctgatgggctctggggaactaactggatcacaaagagtctgacctcagctgcaagttgatccatgagtggtttcataccagggagactagaataggagatccagtggaaggcaccgggtccctgggtgtgcccctgggggattgcttatccttgactccttctcctttaccctctctgcttccaaacttcatgaggaaaacacttttgcttctaccacacattggctgccatgaagtcagggtcaagcaaccatgggccttgagccttctgcaaccacggaaatccaatggaaatccctcaatgggaaatcaatggaaatcttaagtagcttttcttgggtgtttttgtcagagctggaaaaaaaaaaacccactaatgtttagtatacagaaagagaaatgatacaaaaatcgagttttgaattaaaatttgagcactttaataatgcctggtgtgggggcgcagaaggcagtaaacattgtgtgctcttccagagagagatagattagatggctgcagattaaattaaatttgtgataagaaagtagagtcaactcattgtgccataaacatttaataatatagtaaggattttataacatagtagattatgttttgtattattagaggaaggaaaaaagaaaaagtcaaactcataagaaggggaattagtttaagacaaaacagcaataaacgtgcaaaggctgattagcaccaaggtcaagcacagcaacaaaacttgttcttctccaagattattttaaaatgtgaaatatgtctgtgtgtccatgtgtgggtatgtgcacttgagtgtagctccctgagaagggccagaggcattgcatctggaagctggagtccatggtgcttatgagctgggtaacgtgggtcctggaaaaccaaacttgagtaccttacacaagtgccatctatacataagaaccaagccatctctccagccccagaacgtgttcttataaaaaggtgcacttataaaagaatcactgatgatggccaccagcctatcaccaggatgaacaagagaccatgtctccaaggaaggtagcaaggccacctaacagtctcctccagcttcctaatgtgcagatgtgcaggaccctcacctccatgtatacaccgtatgtatacacactcctaattaaaaaaaaaaaattctggtacaaactcaaaatgagcattaggaatgagtacacagcaaactagactaaaactttaaagaggcgggttaaggagccagagaactgtggtggcagagcttaagacatcaagctggtatcctgagttctacctcagctaatccggaaacgaccacgagacacaaaggccctgggtgtttacagaagcgcagggtgaatggcagaatgtctgcccatgctgctcttaggttttgcctctgtggtcctgagagggagtcttgataccgccaggccacagaatacaagggaatcacggtgtaggagggctgttttgaggcagaaattgaggactacgcatgctcttaaggacaaaggccttcaggaggctcctggcatctgggtcaaacctcctgtggccagactgagataaagctttgactgtgggattctgcatgaagtaacggaggctgtaagcgacgtccttaaagaggaagaaaagtgttttcacagagcaaactgcaagttggatgcccaagacttgggacaacgggtggcccatgggaaatgtccagggggagccctaggcctacctgattaggagtgaggtctgtctatattgttcctttgcctagtgagcgacaagaagtctaaaatgctttccaggtctgtgcaagtcccacaaccagatcctcattactgtctatgctagctagacaccccagcctgtgtgcgcccatctgtctcttctccctggaccacctggtgtaactgccacacctgctgtctttgtattgtggccacagaactttcctaaagctgattatcagtcaaggagccgctagttcctgctgaagagcaggaaaggctgtaggaaaggcagtgtgctcaaggtgagatgaaagcttggtcctcccaccacagctcgcctcaagcctcccagcttcctctgggtggatggtggggggcttcaacagcttccagatccacctcagatttccctctcggagaactccctcattgcactgatatcctcgcctctccttgttctgagtccacaggctttcacctacttctgtagcattgacgacctggccctatttgtcttgattttcctaactggactcggacttaccagagagttaggaccatgtcttacatagtagcatcatcagcactaagacgagccagcaataggtttgggaagggtccttgttttgaacttgctgtgcagccaagtataacctgcacgtgtgtgccacagtccctgtaaaggttttctggaacaatgaacaatggcccaatgaaactgaaaactgaaagatgatgttatttcatataatcttggaaatgaggaatttacagctggcctggggaaaaagagaggtcttttattctggtggttggttcctcagctgcagcgctgtgtgtgctacctgccttaagggctcacaagagtaaaagaaccttctccatttcacatctgaagagaatgtggcatgcacggtgcactgacagcacttcaccaaaccgcctttaaataagtgggaaagaagagatttgaacccaggagcattgggttaaacattttcccacagtgactgtcctacactgccattccatttcattacaggaggtcattaggaaacttcttacagcttagaatcagaacccaacaaggctcccactaagcgctgggaacggatacacgtaatagctttgttactgaacacctcaagcaatggcttcactgctattacccagggttagaacaagacacaagttccttttttttctgttctagtagagtggtgtagcatgacccactaaataatgccatggagaatgcaaatctctaatttctcccaactgaaacatagttcactttttgctgccagttaaaaataactaccagagcttgagaacatgaaacagcgccggcatgcacctctgtggttgcatctgcccttcacaggatggagcaggttgtgttctcagccgtctctgaacccgccaagtctctccacctctaagcttcaaaggcattcttgctcagaaaacataggtgaacatttgcacacttcggttacttgaggccgtgtgattcacaccagctctcaggctttctgtccacagtcatcctgacagaggccggagactgtggttttgttgtctccagattagagatttaaataatttgcccctaaatagcatttctcttcaaagtactttagttccccggccccacagagaacaatgactgctaagtggtttttgtttgtttgtttgtttgtttgttttaagagtacacagtaattaaaggcgctggagaggaatggagagaggcagagcaagccacagcgcgcttgaggagaggtccattagtctgctctaggatcccgactgggaactttatgctcttcagcagaagagaatgcgtctaaattgatgagaagtaatatgccagcagctctgtctgcttgccaggcatggcagattcgaaaggagcctttgccatggtgtgttttgtctagcaggggggtgtgaatggccaggcttagaaccatggcaacgggaaacaggcagaagttcttgctctctcaaaactgggttagttgctaccagagtgtaacaggccacaccatccctcgtatgtctcttccacgtgtgcctgcttgccttttagcctcctgtggcatgttacgatgctactgccttcatggtgtccttgaccctccaggctaaggaaactccagttgtttacaagtgaagtcctgggtttgttatcacaacagaaaagcagctaggtgggaagggaagttaaatatcaatacgcataccacagggagtttgtgaaatccatgcctataaaaattagacagcacatttctaaataaccagttagtcaaataagaaatagtttgtaaaatattttgagatgaatgaaaatagaatagtagcatcctagaacctcatgggtgcagctaatagagtggttaaaggtctttaaatgcctgtgcaaaaaaataataacaatgtaaccttataggatacctggaaaagacgaaaccaaggtaatttgaaaatgattaaagacctgataagtaaatgaataaaatgaaccatatgcagactagaaaagcaaaccagaaagtcacactaaagatccttttgacatataaactaaggggcttggcttggtaggtaagagcagttgctatgcagtgtgagggcatgcgttggaatccccagttctcatgtaaaaggtgagcatgcgcatgcaaccagtgcagggaaggacataggcagagcccaggagcttgcttgctggccagcctagcgaacctgcccagactcgggtgagtgagaaaccctgtctcagggaattaggtagaaggcagtgggggaagacaccagcgtcttctgacctctgcaagtgcactcttgtgggaagcacacacatgtacgctgagtacacacacacacacacacacacacacacacacacacacacttttcaatgggatgaatataacccatcaaccttacagaaactttgaaaaaattcagagaattatgaaaaaaggcatctgaaattaaggaaccaaggtgataataaattcacggttaaactagtaaaactgacttaagaagaggcagaatctgagccaatccataaatacacacacagtgggtaattggtagtcaacaaacgtacagcgcaaatggcttctcctgtgatttctattaaatatctaaagaaaaattagtaatccttcacaaacatttccaaatttcagagagagaattagttttgagccatctgacagaccagtatcactttgataccaaagatgtaacaaagcaattataagtctgtctcccttttaaatatacatgcaaaattgtatattatatgtgtgtgtgtatagagagacagagagactgaaaaacagacactagcatcattttaacaattttttgtcatggccatccaaccatgatcattttggattatccctggaatgtaagctcagatacaacagtcaacattgatataccatgtgaatgaatataaaagagaaaagccatgtgatcttgttaatagatgcaaaatttaaaaagcagttgacaaaattcaaattctctgcatgataaaaacacaaggcaggagttggagagatagctcagtaagagaatgaaaaagcagcatccacactgggcgaagccaggaaaggaggaagtaaaacgctatcaggagaaataccaggaaacaggtaaccttaccaatactatgcgatagataagggagtacaaacgccagctgggtatgggagccacctttaatcataacacttgggagtctgaggcaggcagatctctgagaatttcaggccagcctaatctatatagcaagcaagttccacattatggctacatagtgataccctatctcaaaaactaaaaacagaaaaatcagttataaacagtgacagtgaacagtcagaaaatgaggccgtttcacttttatgttcattaacagatatgtcaggaataaaatgctgaaatgaagcatcaggcccttgtgtaatggaaactaaagtgaaacaacgtaacttaatggaaagacttctctaatggattaaaaaaaaaaaaaacgaatgcagagaagactgtgaggtccttcagagtaagtcacagctgcagaataatcttgtcaaagttgtagctgtgcttctggtagaaattaagagagccatccagttcataaagaaaggaggttgagaacggctaaaacaacctctggtagcagggagtcaggggaggggggatacaaagctagaggaattatacttcccaatttgaaaatgtattttatatcttcagaagtaaaaacacactagggcagtggttctcacccttgcaaatactgcaaccctttaatacagttcctcatgttgtggtgaacccccccccccccaaacacacaccataaaattattttgctgctacttcataactgtaatttgctactgttatgcatcctaatgtgaatatctgatacgcaggatatctgatatgtagtccctgtgaagggttgtttgagaccccaccccctacccccaaagcggtcatgccaacaacacattgagaactgctgctctggaggcaggagaggtggctttagttcataaagtgcttgcctcgtgaatgtgggacccaagtttgaccctcagcacaatgaaaactgtaagcttggtggcattcactttataaccccagagctggaggtggagacagatgtatctctggtacttgctggcaagccagtctggtctaatcaccaagttccaggtcctccaaaccttgagtccttgccttagaaaacaagatgggagctctgaagcccaacacttgaggttgacctctgacctctggcaaatgtacatacatatatgcacccacaaatatacatatgtgtgtatatatgtatatgtgcatgtgtgcatgtgcactatacacctacacatgtgtactcacacacacacatgcacctatacttagcatatgttaagtatatacattaatgaaacataattggcaaccacagaaattttagttacaggtcaaatgattttgctaaagaaaccaagaaaggtcaatggcaaggattagttcttttaaagattagcactcagacttggggatgcctaaacacaccatttgtagtaatttgagtgagaatgacggccccaataagctcatctatttggatgcttagtcactagggagtggtactatttgaaaggattaggactaagagtctttcttcttcttcttctttcttcttcttttcttcttctttcttcttcttccttctttctttctttctttcttctttcttcttctttcctcttcttcttctccttctcctcctcctcctcctcctcctcctcctccttctctctcctctctctctctctctcctctctctctctctggatctgactgtagaactctcagctacttttccagtgccatgtctacctgcatgccaccatacttcctgtgatatgataatggactaacctctaaaactgtaagcaagcccacaattaaatgcttttttaaaaaaataaaataaataagatttgccttggtcatggtatctcttcatagaaacagaacagtgactaagaaaccattttaatggctacatatgtggttttacattttaacacatattttaaccaggaacagtattgaaattaaaacatgcaatattccaagaggcagtgtatgctctgacaggaagagctatgagagacagatactccagagagaagtggtaccacatataacttcctttttccaaaaagttctgactatagtgtctgtatatgtctgtgtttgtaagcatgtgtgtgttttattttggatttgaaatcatttttttcttaagttgatggagagtgatttttgaaattaattgctattggcacattgaaggaacatgtctagggcctggagagatggctgagttcttcaagaagaccctggattgatttacagtacccacaagattcacaaccatctgtaactccagtttcaagggatccaatgttatcttctagtgtctgtaagcactaggcatgcatgttgtacatgtgcacagatatacacgcaggcaaaacacttacacacaatttttttaaaaagagcatgtcaagactccattatccccagggggtaatacagaaagttagtgtctcatgatcaggctatgaaggccttgtagccatgtcagctgcaggaagtgggagtatccttgatttgcaggacatagattattttctttgcagattaagagaagtgtgcatgcgagtgggtcaggtacatggtggtgagaccaagttggtggctgtccagcaggagacatggcaactgctattgatgttactgagaggggaggggggctctgctttgtggactttatgtcacctcttttgttaggagcaaatgggggtgtgcttcttccatgcatctccactgcactgctgaatagtacacagacaagagcagctgtctgagtctcatgagcacctacaggagcttaggtcagcctgcatcttgagggaaaatgtcagttgttttctctgttctagtttttctcctcctcttcctccttcaaatgcccttcaagttgaaaacttcacatttgtaattggttaagtgatattcacttccaacctgagtcacaaaaagattttgtgagtgttgaccatctatcaagatagttttccatttacattctctaatagtgaagtatacagttgagatcatgacaagtcccatccttgagattaacatatgtggccgtggcatcctgcctttttcatgctggctcgggcttgtggaagcttgaggaagctttctgccattcctcatgaactttgcttgccgttttcttgtaatgcttttgcatagtttaggtgtcagggcaaggcaggccttcaggataatttaagggacggttccttttttttattaaaagtaaaaattaatgtagcacttttattagtcctttacatgactactgggattcacaccgagggctgtctggccctagaaagttactgtagtattggaaggtagctgaaccataaaccataaacttctttgttagacggttctaggttgtccacatctattttaatctgagatgtctgaagcttgtcataaagctaatactttttgttactcctgtcactagaccctgttctctccatattggtggtttgtgccttctacttctcgagaacttgtggatagatgcttatctgtgtactagtgacttttctgttgctgtgattaaaacatcatgactataagcaacgtatggaagagtttattgggtctaacaattccagaggaacagaagtccattgtggtgggcaggtgcagcagcaaacagcaggcttggtggcagtagaaagccaagagctcctaccttcaagtcaggaaactacaagtagggtgtggctgtgtactttcaaagacctgccccagtgacatattccctccagcaaggccaaaccttcccaagcagcgccaccaactgagcctatgggagccatttctcatcattattcttctgcattctctcttcttccctctatctcctcttacatttaatagtacttgggttttatttacatctagcttataaaaatgtgatctctcatctttctagtttagtgtttaaaatattttggaaaacatttttgccatgcttgctgtaatgatagatagactgtgtgtgtgtgtgtgtgtgtgtgtgtgtgtgtgtgtgtgtgtgtgtgtgtaatctcagcttcttaagtggcaagactgtgtgtgtgtgtgtgtgtgtgtgtgtgtgtgtgtgtgtgtgtgtaatctcagcttcttaagtggcaagactgtgtgtgtgtgtgtgtgtgtgtgtgtgtgtgtgtgtgtgtgtgtgtgtaatctcagcttcttaagtggccaaggcaggaggtctcacactagcccactggggtaacaggacaacacaggaagaatgaaggctggacatttttagtcatcatttccttccatttttagacctccctctcacctttcattctgactctcttgtcttctttttattgtggtttattagttttgttactttctcacttccctttctctataatttactctttgatcattttcatatatttgaagttatttcatctttggtactgaacttttgaagatcatccttgctaacctttctgtgtctcagatgttagttctacccaggatacttacatcttgtcgttctgtcactgtgatggccttgtcagtcttctctcacagcatgcccacatctcttcagccttcttgaaagtaaaacaataattcagccatgcatatcatttctggatttctccttgctgcagtatttatattcctgcttctttgtatagcaaagaagatctggttctgcgacattttgggttctaaattgttgggtaatgattgatatgcatgtgtatgtatatgtaatataaacacacaaacataacatatactgtattataaatagatattcttgagctctttctgggacatgaccaagttatttggaggcactctagcttttcaaggtttgtttttaagtttaggcaggagcatctgagctttcagagctaatctgacccgacactagccagtcaacatccacgttctgtacagaagctgcagctactactagactgctgtgctcctcctgatgagaacatgaccgctcctgggctgagtgagtcaggatagctgatccacctcctcctttctacttctctacatggtctgggtacttctgtgggcatcagctgacaacactgaaggcttgagaacctctgcccattatcagagctttttgctctacaaattctcactatatagcttcctcacactgttgtcatccaaaggagacagcagagtttgggggttccttgcctgtggggtggcctcttcagagctctggcaggttgaggcctgactctcttggagagtctatcatatgtgtttcaccccaaatgactaaacactcttcctgttgttatgaaaccgtatgtcttttgttaaatagtattctgcctgtatgtacatacatgctcccaagtgcatgccaggtgcccacagaagtcagacagtgccgaaagcctgggagctgaggttacagacgattgtgagatatgacacaagtgctggcaactgaacttgggccctctggaagaggagcaaatgctcttaaccaatgagccatctcttctccaactgtcctgtgggtttatcttgtctggattgttagactctgatgcattcagcaagcatgtaatctactgaggcaaaccctgtccctctgcctagtgaggatgtgccctcagatgctaaggaagacctgtcttcacagccaacagtcccttttcactggcatagcacatttccccctaactgacccagacagaaaaccctacttctacgggttttgtaagaatcctaatacctcaaaagacctttaaagccaaatccagtaaggatataatgctcgaggcaaatacaactgaagaaaacccaagacacccacagcagattggaaatcaatcgtcaggagctaacattgctgcctctttccaagagacagcactttagctcagcatgctatctcatcagggcagaggatttctcctggagcaacccagcttggcctagttaccatatgatgcctgcttgctgtggatgtgccctcccttcccttcctgagcagagaacgagcagagccccctgaagtaggcaaagaacatctggataatgtcctccctcctccctctagccccgttttttaggagctaggttacttatgagccctccctaagggctctgctgttcaggtgcagatcactgcacaatgagggcaagaaggcacccaacaaaaacaatggtagcttcagggccagctgtggcctgtgcttcattttgccatatagatctatgccgtgatgaaatattcctgaaccagggaaatggagaaaatagtcatctaatctgaacctttcagtggctgcagacggcgagtttaacatcttaagggacgatgaaggaaatcaggtctgaatggttttatattttcagaattacctctgcatcatttagatcattgtgtgtgctatgaaaatagggatataaaaagcagtgccttgaagccacataaagaatattccagaagctccagtatgattgagaagggcagacttgcatttagataaagcatgaggcgcatgaaataaaacaagacatcattaacatgaatgcgatctggtctgatgcgaaaaggcacggtctcagcttcaagcttgggttgtgttgctcaggtcttatgctgtagcagctctgcctatggaagactttagaccccttaccacagtcctatgacatacctgtggcctggctctgcccaccagaacgttcacagccacgcaacctgtcacccagggttcttgcagtgtgaatggaggctggtactgcccacccttcttgctactgcttacatggtggcatatttatttacagtcgtttgcacagtgctctgaagttggtaaaatctttctgtgtgctatggtttcagacttctcttgcagactaagaaatggcattacagagttaacagaagtgatttagccagtgtcccaaatgcaaggatctaatgaaaaacaagactagatgctccaaattaatgttgcttactagaacacacggtgtccttccacacagccttagtggaggacactggagtctggaggccactttatgggttctgttgtctgattttgcttcactcagcacttcctagagtactgtctgtgcatagctaagcattagcttcctccaagaggcagcagggtccagggcacgtgactgtgacacttcttcaaaaagtagcattcatctgctgctaatggaagagtagacacacattcctacgaagaagttcctagcttggctctcagctcccgagtttactgtcaagagcaaaggttcaggcttcaggtttctaaactagtcacacatgcagtcggctgttgagtgcgtcgggagtgtattgcagcagattaaacactggtgattctgtcacagaaccaatcactggagggagctggctttttgtctctgcagtgctgaagggtgaaatcacagcctcctacatgtgagacaaatgttctaccgctaagctagatcgttttgattttaagcactccaatacaaaaccaaacttgtcaaatgacccaataaatactgcctagactgatctctaagctccccacttcatgcttaaagagtgaaactaatacttatacattaaatatttatacattaagtaatacttgtttcacatgatcatcagtacctctactaccaaggttgtcaatgtcaagttgtttggaacagcgctgaccttgatgataaagcacacattgggaaggctgggctagcactggaccaccacaacgagagctaataattcttcaacagcgtggagtgttaaatgtggagctgtgctgactccactgaggcaatccctgaaatatgattatcacaggcttcagattttacggcaggtgtcttcagagtgtccaaaccatggactgattttcctcagagagtgtatgcaagcaacgctcttattaaagagtcaataccaagatctaaccacatagcaggttgtactttttgatgtggccacaattacaaagggaaaaagtataccaataatagcatttttctctttacttcatacaaagggtttgctgtgagtctgcaagtcatcttgtccaatccgaaagctgtatttaagcgccgtggatcccagccagggatgcaagaatctgactttctaaagcagataacaacagttgaagaactggaaccaaaagctagtaactgcaccaaggtacctcttcagctccctcatgggctgaccctcagaatgctgccagtgcagctgtttaaattctccccttcctctgcaggttctcgtgtggcacactcggacagagaaggtcaatctagccaatgagccaaagtatcacctggacacagtgaacattgaggtgtagccgccaggaccagcaggtgaggacaggaagtctggagcgtgggctgctgcccattcaggtactgttcctttgccttcagcctttccttaccgccgatggacggccgtttcgacagctacctggatgctacaaaatgtgttgtcttcatttgtctgcatgtgttttctgaactggaagagttttgtagagtgaagccacatgtcactgaaaaggacaacgaagtatctcacactgctccctccctccctccctccnnnnnnnnnnnnnnnnnnnnctccctccctccctccatccctccctcccacaagccatctcaatactgctagaatgacaggttttagaagctgatgaggagtactctgtcaattaaatattcccagttaaattcttggcttcacaacatgaactatttggaaagctgatggcagtgtacactgtaggaaataaaacccacaaataaaaaggtgtgtggattcatctgtttaatatagggaaataacattttgtcaatactaggcaccataaaatgtaaacacaattactgtcataaacctggatataccttcaaggattaaaagtggctttgttttagttaccctgtgtgcatatagtgcagaaaaaggtcttcatattagcactatgtacatgagaagaggcccacattacaagaggcaatggaaatttgaattctgaaaccttcattgagttttacagtagcatccaggtttatctccgttcactaaccacgttccctgttaagcacatcataacaacagcacagtggagtgagtgatgaataaaagaatttgatacactagaaaacagtgctcagtgatacatttacattctatttatatgattaaacatttgatcatacagtacctttctacaggattactggctaatttgggggtggggtttatactgttagaggtattactaacatgataactacttcccttatatgcaaacgttagagctataattttgcaaataaaactgattatgcaagttaactgagcagcttcccaatgtggcttaggacatcatggggagtatgagcaaagctgccctccacacagatggtttctcaacctgctttcacatccaatttaatcagcacagaccaacacggtcaatcaggtcattcttaatgtgagcaaatgggggaaagaaaaaatacgttatgtacatgaataaatgggaactagatgcctttgcagcgaggaatgttggggtcggttctggatggaactctgtgacagcttcttacttccacagctgtgtgctcagcgtctgccccgatgagcttccagaccaccctgctgtcgtgctgggaggctggccaaaacctgcactagcgttagcactactgaggttcatggcagccatctgctgattcatctgcgaaacacaaaaggcttggtttacaaggaggaccctcttttcactcctgactccttagctacagccagacacttcatcagatgtgaaaattagtccagacactggatgtggactacactgaagtctttctactgaaatcagttacttttttcttacttttttctgagttaggtgttacttataaagtaatccataattagttcactttctagattaaccacaactgaaaacacatcaaagtaatctttgagtttatatctgagaccatcactcttctgtgactccaagactgagacattttagaaagtaaaacatctaaaattaccctaacatttacaaaatactcatacctctctattaacatcctaaatgaccttaatatacttcctaaacattaaaaaggtcatatagcatatgttttaggtttatgttataataacataaacagctaaaattaaatttcattatatgctatacaataaacaactacatgtacttttctttcaggctaaaatccagtatatttatcaggctcttagcacagtagttctcccactacccagtttggtgacggaacaagagatgcaggatttacctaaaatagtttcaaacctatgttcaacattatctgtgttctttgtgcaaattttttttaaaacccaagacataataagcacacatgtgtctacagacaggtagcttccatcttcccttctgctcactcttgtggccttgctgttcttcactggctctcctgtactctaacctgagtcatgtgagcctgagcatcctggtcacagaaaagctgttcctagtatctgacatcattcccgaggtttccaatgcataagcagtgtgtacgtatatacctataaaccgcagctgtcacagcacacgagcatttgtaagatacacggtgattctgtgaatgttagttagcagacattgttctgaaggtaaactaggggtcttagtggtcctggttcctgtgagatgctcggtggaccatcatgcaggaatgggaatgggaccatgagcactaagtcaaagcctctgatgtggggtaacagcagaaatgttactctaacctaagccagacagacatggaatttatcagtgaatacctgagggaagcagggtttacattctcaccatggggattcctgagccaatggatgttcctcatacatcaacaggcagtaaccacatgacagcggcagccttgatccctcataaaactgtgctttgaaaatatgaagctggatttctatctcactgataagaattaataaaaaaaaataaaagatgcaaactatcagtgaagatactctggtctaagtgaactatgaagagatcccacccaggagccaagtaagcatggctggcaccaagcctgacaggtaggagctgaggtatgtcttagatgctgcccaagataagactacttctagctagtacaggcatgttcaccattacaacttggttacagtctgaaatgaggaaaggaaagtcctaacatttatatatagaatagtcttagtaaggacagtaactagtcatttatctataaacacttggatctggccaaacttatccctttcttttgttccatcattagagttcaaaacaaataaaagtcccaatatacaaatgtggtttcttagatgttaaggtggtagaagctacaagagccttacctgtgagaggttccactgaggctgctgggcttgtggcaagccgaacttactctgtggtgcacccatttgtcccaccattcctccctgagggccaacaacattctgaggaagtggcatcactccagtctgtgcgtttcccatgaacccattgtgcatgggcatgcccaccatcatgccagtattctgtcccatcatatttcctataagaccgggagctgcaggcactgggacgcccatggaaggaaaaccttgaaatgcagtcggtgcttgtgaggtaaatggtatatttgtgggtcccataaacacacctgtattttaagaaccatgaataaaaaaagaaaagaacaggtcaagaagaggctctttatatggctgcactcctctccggagaaaggggcagaaaactcaaaacaacccatgcctcaaccttcagagctgttactccaggacacagacagacgcacagcctagaggacatgctgctcttgctgactggtaccactgctctcacaaaacccaaccaggcagggagagaagtggttctttgttttatgaagaggtaggtgggtggccacacagtttcagcctatatatgaaataagcttattttggaactaagggtctgatgtattaaaactgaataattatatgcttatatttcactacaatgaaagacagttccaagttttgcataattatacatatgtatagttctgactgcttaattgtttactgcagaggaaacaagagtttacacaaagtcaaattcatgtaaatccaatccagttaattcctgaactcctgtcttataaacttgtagaacaatatcaaatgatatgtgaacaacttgttatgtctcaagtgaataaagttctgtgaatcctatattgtttaattctgatgcttcattcatttcagttctataagctgcaacagaagcatccactggtaccatagaaaactgtaactgaggtcatttcagaggatgcactctacaacaccgtgtcactgtgtgcaagtggagcgcaacatcaattaccaggagtgctttgctgtgctcctgtaccatacagagataagatggagtctttggagagttgtttctttgctacttcttctgactttgtagtttgctcagtaaacagatccaggtccccagatgtaacggtagacagggtagcaggtgctggtacggaggcagtcccctgggcaaaacaccaacagaaacttaatttctacaaaggacagcttatctaatactaaagttcacataaaattatgaaattggtagtatataataagaggaaaagggtgacatctctgaagatcattttccagacacacacacacacacacacacacacacacacacacacacatataatctagaatgcagaaaaaatgtcacgacataagctgtagtgaagaccaaggagcacggagctcctccacagccacgctaagcagccaggaaagagcaagttttgctcatcatcctggaacacagagggtatgacaacatgcagatccagtctgaagactccccagcacgtctctcaagaactagcgtcacttggaataaagaatgttacaccttgcagaagcaaaggctctgtaatgggagattaaaagcttgtatcttttcaaaagctataccgtacaatgtttacacacctattctagaactattttagcaatactagaatgcatctactccagaaaataagtacagaaaactggctacctatattcagccataactttcatgctgttcagaggcaaatcatacaagtaatttagatattgaatataaaacaagtttcccattagtcctctatatcttacacagagatagttttacataaccacaattgacattcttccttaatcattggttttaaataatgaaaaaaaaaaagatttttctggagtctaataaatgctggctcctactcttccggaactacagatagaggtgggtagcaagcagaggctgagcccagtcgcagtcctgctgtaaactaccctcaaagcacttgattcagacctacataggtagaaccatattttgactctgactaactgagcaagacttgtaaaaaacatagaaaaggctgtcttattttgcaaaaattctaaaatatgtaagaaattagacatgggggctggagagatggctcagaggttaagagcactgactgctcttccgaaggtcctgagttcaaatcccagcaaccacatggtggctcacaaccatccataatgagatctgacgccctcttctggtgcatctgaagacagctacagtgtacttatacatatcaataaataaatctttaaaaaagaaaaaaagtaagacacgacagactacgaaacctaacagtgtcttttaatctgactatactttagttcctaatgaagaagcatacaccccagcggccaatagagtggaccctgaccagctgggccggactggatcgctaatcctcattcttgggatttatatgtcgcctgactctgtcctacaaaatgaggacaggcttcgttaccacgggtgctttgtaatggaattaacagtgataacaaaatgacattaccatatggcccttccaacacgtcgcttctatgcaacaccagaatctactcagcaccttgggtttcattcatgatgaatgagacataatcaaaaagcccaaatgtttagggaaatactaattttggtttcatagtagaacagtctaaagaacagcctcatggtctaaatattatataagtaaatatgaacatctacttcagcatagatactagctaatggccagcctcagtggcatgcctagcaagcacctgaaatctggtagtttactggggtgtgtgtgctatcatttcaccttcagagtgcctgttgttttataactcaggctttctggattttccagaatcccagggctggtatcagcacttgtacatattcattcgcatatattcatattctgtctgtctccccactccctcccttcctggtgtatatagatagaaaaggactgctgaacccagttcctcccaccatctactgtacactctggtcagctatttccaagtcgatggtaaacccaagctgtttttatacatgggtaaatctctgactaaaatttacatatgctcagaaaacagcaaaagtcaaatagggttcagagtaatacattatcttggtacttaaactcaattacagcttaacttcatatactaaaatcctaccagaattagcaactttcaccctttcaggactcatatggagacatacatctaagttatactttattggcaaaggcagtattttgaaaatgtatttggattttaatcttagcatgtagtttggataataggtaattcttatcataaattatcttacagggctctgtaattacagagcctacaactggcataattttggtttataaatagtgttcaagaaaagaattaagatatgatttttaaaatgaaccatgttggggctggagagacacatcaatggttaagagcatttactctcaaggctcaaatctagaagatctcttctattctgcccttgtgccttaaggcaggaaagttccctctcacagaatagcgggttgggtattgtgcatttattgtttgttttagtttgttctgaattgaaagtatgtagaataaaaagatgcagggaaaaaagagagcatttgcggctctcctggaagacccatgttaacttccccagcacctacatggcagctcacgacctcctccagttctgggggaagttcatgttctctctcagactccttgagtgtgtgtgtgcgtgcaaacaaggcttctttaaaaaggaagaaaagaaaaaaccttaccatcctatgagtgcctaatcagcaaacacaaggcacaacagtttgtctttgtaacttgccaactggctagaacttgattagcattaaggttagagcttggggctttccagctggctagccagtcaagtttcaggaatctacctgtctctctaccactcccagcactgaggttataggcatatgcagctgggcccattttatgtgggtgctggggatcagaactcatgacctcatgcttgcaggtatctcatgcttgtatctccacagtcccctcagtccctgttttcacatgagggccataaggactaaaaaggccagagataccactgagctagctacctttcctgaaacacacactattgctatactcaaagttgatgatgactgtagcctaactaattcccaagaaatttacttgttaaattcaaggcaagtacacagttactttaataacgaaaatatacataataaaacattattagtcttcctgacacatggacagttatgaaaatctttacatccacacaactcagatgtggctccccttttcatatagaaaagaagtacttcatctcaaatgttttccaggaaaccaactggctatctgtagtgttccagtgtaatagggagtgagagtgtttgtagcaggcttccaagtgactttaaactgaaccttgaaagttaatgtttcatctgaaggaaactctatgtaatgtcacaaaaataactgaatttcttaaccattagtactttaaaaatcttactgctgtattcaatggtttttatttaatcattcaaaaatagcaaggttcattttaagactagcttaaaatatattttaccttcagaaagatacaaacatttaatttgccagaacttatagaatcaaatatattagcatcaacaatgttaataatacgggcttgtgaattaaggtcagattgaaggttgtctcacatacccccatacatatattctaaattgttgttctcataaatttttaagaatggtaaagtctgcttgtatgggtcataacagactctactgtaaccatctctacagctatgtcaccaaagtagctgaaaactataaatcaatagaaatggctgtgtttgaataaaactatctgtctaaacaaaataaaattgcaagatgagcttgctgaatgctggcctaaagcataagttttcagctcagggacaacaatttcaaagttaaacttgtgaagcttttcaagcagagatgtcaccaagagagaacacggtttgctgcttacctgagccgggggcatgacagctgcaggtaaagggttagaaatcattggtccaaaaatgtccagatcatcactcagggctggcgctgtggctgggtttccattggtcacgggtgcctcagcaggaccatctgaaaggaatgcacacttctgtcaatatagaatctcttagttacaggaaacagggagctattttaaaattttattttttaaaaataagaacaattcaaaagaaaacactgtgttccttgctactctagaaccgactccccatcctaaagagaacacttcggtgttgcttcctctccagaagtagacttctggtttcaggcataactccagccgctcctggacaaatgggagcacaccactcacaatggcctgaagacatactttttaaaatcactgattgttttacctacactcatgccacacacacacacaatatagcagctccagaggctctctatcctagacttctcattatatggtcttttaatggtaagctcttgatatcattcccataaatattccttattactacacatacacaaaattattgaaaacccaattcttaataacctcttaattgaaacatttcaacctcacacttcagtaaacacaagctcccaatggattttaaaacatgctgtcattgctcaccaccttcgacaggtctcacagaaattgttttaatctattctgaagatcagtttctaattttcagtatttgaaaaagacagataaagattcattattatgatcacattgtcctagatgtttttaaagaatgtttgcatgttgttggtttctgtcccctgaaacatgatatctgtcttcaggtgctggggtagagatggaaggctgatcctgagggcctcctcagtgtggatcatctagttcagtagctatgtttgtacgacttaactatgcaacagtcttctgatccctagactagtgagctgtctgacctgtctggaaaccacatttctgtaaaagccatagggtcactgggatagaatgttggggaaaaaacaggtagtaacagcaggctgtatgaccaataatatatgaaaaatgtcatcttgaaatgcattattttatttgtttgatacaatactttaaaacccacataactacaaccatgcctaaccacaaaggattacctaaatttttcaaaattaagactcaatcttcaaatatttaataattccttgcactaagtaaaagaattaaatatttgaaaaatcattcatactgattctctatctttctattccactgtccttatacaaagttcagtgatgtatagaggaatacaggtggatatggtcatcaataaacaagcagaaggaaggaaaaacaactaggatatgatgagccctcaattaataaacaatattacaaagtagtagaggttaaatacattctcctgatcaaaggaccactattgtatgttctttactgatggaataaaggctaagatgttgaaaatatagttactaaaattaaacatggtaaatcataataaatcaggatatgttgtacacacacttaaaattaacctttagcattaatccagatttcaaactaagtcctcagaagcaacagtatccatcacacttttcttcctttaaaaatgcacctcagtttcctgtctgcataaatgcaaataccccagattccattcctcatgtttactagtgttcaacaaactgctgctgctcaataaatactaactgcattcaaagtttacttgaatagcagagttatcaggtggtcacaatctatttacagagataatgaaataatgtcaaagagcaacatgaaattttacgcactgccaatctagtttaaggtgagtaaaaaggtgataagctaacagatgttgtatttttcattaccatttttgatagagcatgaacatccaagcctttagtacaacctatcacaatgaactgtcaagtccaattcctcagttacctactgagccaa

SEQ ID NO: 562 - DNA, 1940 bp, Mus musculus
acacacacacacaccccaggcagaggtcgcgcaacccagcagagatcctcctccctacccctgcctctgcccgcaggcagcgcctggtgccaccgggctcagaccccgcagagagccttggcccttcccgcctccgccccgcagcccctctccgccagtagcagcgctgctatcttcccaccggagcactaggaggacgccggagtctgcagcgcccccgccccctcgctttttctttctttccctgctttgggatcttgctgtctggagccgggagaggttccgagaaggagagagcggcacaggtttctgccgcggcgctcgaacgggagcttagggacgcagcatcctcggtgtccacccgggatcgcagctgcaccggccgacatgtgacggaggaaagccctcagcattcccggcaaccgccttcaaaggggtcccggaacgctcgcccaggccagcagctggatcctcttagccctcagcgacgcgggacaggagcgacaaggtacaacgcctggtacgttccaggctcgcactcgggaaaagagcgcagcggggaccgccgcctggcttgcactcggcacaactccgggacctgcggagtgcggctggaccgtgtccagattcccgccgacttcatccagagtgacccaagaccctagccggtcctcctgcaccccctggagttctagcttgccctgcatctgcgccgaccccacaacgcccaggtccccgcaacgccccagtccggaaggggagcgcgcttgcggcttctccctgattgcagacgctgccgctgtcctaactgcacacagaggtcccctacccggagcctagtccttgcagggggtggtgtccgagacgctggggagcgcgcaccatgaagtccgcgctgtgcagccgcttcttcatcctcctgccctggatcctgattgtcatcatcatgttggacgtggacccccgcaggcccgcgccccaactcacttcccgtccctacttctctccccatgcagtgggctgcgggggctcccgagtcccgctccgacggagtagccccgggcgtgacgctgccgagaagcggaacgagtctcggcctcagctgcagccggagccgcgcttgcccaccatctatgccatcacacccacctacagtcgcccgcgaccgtggctgccgcgcgccaccgaacagcgcaacgcgggcctcgcctggctgcgccagaggcatcagcatcagagcgcgcaacccggcgtgctcttcttcgccgacgatgacaacacgtacagtctggagctcttccaggagatgaggaccactcgcaaggtttctgtctggcctgtgggactagttggtgggcgacgctatgaacgtccgttggtaaaaaatggcaaagttgttggctggtacaccggatggagagaagacaggccttttgccattgacatggctgggtttgctgtgagtctgcaagtcatcttgtccaatccgaaagctgtatttaagcgccgtggatcccagccagggatgcaagaatctgactttctaaagcagataacaacagttgaagaactggaaccaaaagctagtaactgcaccaaggttctcgtgtggcacactcggacagagaaggtcaatctagccaatgagccaaagtatcacctggacacagtgaacattgaggtgtagccgccaggaccagcaggtgaggacaggaagtctggagcgtgggctgctgcccattcaggtactgttcctttgccttcagcctttccttaccgccgatggacggccgtttcgacagctacctggatgctacaaaatgtgttgtcttcatttgtctgcatgtgttttctgaactggaagagttttgtagagtgaagccacatgtcactgaaaaggacaacgaagtatctcacactgctccctccctccctccctc

SEQ ID NO: 563 - protein, 290 aa, Mus musculus
LHTEVPYPEPSPCRGWCPRRWGARTMKSALCSRFFILLPWILIVIIMLDVDPRRPAPQLTSRPYFSPHAVGCGGSRVPLRRSSPGRDAAEKRNESRPQLQPEPRLPTIYAITPTYSRPRPWLPRATEQRNAGLAWLRQRHQHQSAQPGVLFFADDDNTYSLELFQEMRTTRKVSVWPVGLVGGRRYERPLVKNGKVVGWYTGWREDRPFAIDMAGFAVSLQVILSNPKAVFKRRGSQPGMQESDFLKQITTVEELEPKNCTKVLVWHTRTEKVNLANEPKYHLDTVNIEV

SEQ ID NO: 564 - DNA, 116297 bp, Homo sapiens
tccagaaacactgttgaagacacatccagaaataatgttttactagttacctgggcatcccttaacccagtcaacttaacacataaaattaagcatctcattccttctctcttaagctttttgccctattgccatccccaattatatctctgccattcagcctcctctcatataactcatatatctttgtctataactgtgaaaactgtaaaaaaggtatagtttgtatcacttttgtcaaaaatgtaaggttgcatgctgtcaaaaagaactagagttggacaatagttaaaattgtaaaaacagatattatttagaaactattgcaataggagaaaagagacatcagtaaagaactgggctcaatgccaaatacagcatggataagtgaggattttcagctatggaacagggcgggaagtcagtggatgaaaaattatgaagaggaaacatcaggggtagaaggattcttactaaaccgacctaagattattgcaaaaggcaagccaaggccatcagatatctagggtgcggaatgaggaatttgatgagatattgagagtgatcagatatgagagaaattctctctcaaccgatttagcaagattcttgctaaattgggtgaggaatacttgagaacagagtccaaggatgaggcctagttgaaaagagggctcaaaggagcctgtctaaagtttggtcaaggagagagcctttgtctgtacattaacaagtatgagcctcataacaaccctttcaagtaggcacagctggctagcacagtttgccactcctagtcaatttctctaaaaataccagtaataataccagataacacaagtagccctcagcaagtgcaagcactatttgaagaactccatatatatcaaataatacactaaattaattttctaaaaatttatattattagagacttttttccccctcttgatagtcaattgccctcgttaaaaagaaagaaaaagaaagtcattcctttgaacccacagtttgtatcccacggtacatcaattacagatgatccagtaaatacccccttcttcctccagttatagcaagtctgatgctggcagcaacaaagaggaagcatggagtgccaataaatccttagtctcaaaaaatattaccttctctaaatactgactaaaatttttatagagctatccctattacagatagaatttcactcaaacactatagaaattaattctatgaactaccaccacaagttcttattgttatgagagacaaaataggaggggccagaaatgggactttgatcttcttaccccaaattcaggcctctttactaccaatttgtgcttttacattacaatgaccacttgattactaatttttaaaaatgcaagcaatcagtcctattctgattgtcactgattcactgcatattcagaggccaaaagtggatcctacacaataataataataataataccagcagcaaaagcttactgaatacttactatattatttgatatagtttggctctgtccccacccaaaatctcatcttgaattgtaatccgaattgtaatccccatgagttgggggtgggacctcatgggagatgattagatcatggcggcagtttccccatgctgttctcatgatagtgagtgaattctcacaagatctgatggttttataaggcactttccctgcttcactctgcacttctctctcctgcaaccatgtgaagaagaacatgtttgcttcctgttctgtcatgattgttaagtttcctgaggcctccccggccatgcataaatgtgagtcaattaaacctctctcctttataaattaccaggtctcatgtatttcttcatagcagcatgagaatgcactaatagattattgttctaaggattttacatgtatcaactcatttaattacaacaactttaaatgccgaagtcacttatgtttagagatctattatctattcaactctttcacatttgtggaagacagttatagtggcaagaatgttggctttggaataaaaaaataggattggattcaaattctgtctctgacatttaactggctgtgtgaccttagaaaagtttcttactctacctacttttcagggttattgtattttaaagtatgttcagtgcattgaacagaccctggttcatgatcattcatatacagtgtctcttagttataggagcattatatttatttgacaggtgaggaaacaagtttagataggtaaccagtgagtggatacctaggatatggactcaggtctcctgattccaatgcaactctttttcccaggtaccatgttgccactctcttgacaagactgacctggatctcaagtaacttctaaagactgtaataactatgtcaggtggacagcgtttgcacacttaggtttctatgttttattaccaccactttctaagtaatcaaggcctaccagaccatatagagtgacaccctgaggcctagctgctggacgttatattagaatatgaatttcatctggaatttgagggcttttgtttttggttagctataatgtgactgttagaaatcatactatagtttgggaatgatgattttgctagcttaattgcattttatttgagtagaattccaagcacttttctttaaaaataatggactcaatttttcagacctcgtgctatttctgcttcagaaccaaactttcttaatgggctccttttctgggcatcccttaacccagtcaagctgacacataaaattaagcatcccacccttctctttgtgtggttaaattcctaggctggggctataaattgatagaggaataaaggaacaaccccccttttaactttaagagatttatatttcacatagaacaccaaatatgtgcctaagccaagtcatacttaacttggcactcaagaagcagaaattaataaatgtagtcatttcaatggtccacctgcaggctcataaatgcacctgttataaaaataataaaaaaattaattcaagccactgaactaccacatttagacaaaaatggaacttaaaacattgacaatgttccattattttaattattatattttggaggtaggttgctcatataacatgtgtttacctacaggaactagatttacttttgagagagtggacaggagatactttcttgtttatgaagatacacaaaccttctttaattatgtctgcagctactagataatatgcaactggttataagatttggtaacacaatatgatattaatagtgtaatgcaaacccatcaacagaactggaaaaatattcaaagtacatttcctatggagtttaccaagaaaccacctacactcattcattctacatacaagaaaactgaagaccagagatctgagacttgtccaagagctagtcagtaactggaactttctatggcctttatcttatacccactccccatattcatattgtttgctcccaatatttgtactcaacatatccaagaaaaggcatccaactaaaccaacagccatttggaaagaacatctttatttaagtaaacatagatggtttggatgcagaccctgctttcgctaaagtttatttttaaaatttgtaccctcaccaatcttcatacagaaaaactgtcttgagacagggtctctgtcacccaggctggagtgcagtgatgccatcatatttcacatatttcattatagcctcaaactcctgggctcaagcgatcctcctgtctcagccccccaaatagctgggactacagccatgccccaacacacccagctagttttgttttgttttgttttgttttgttttgttttgttttgtagatagagggtcttcctatttacctaggctggtgtcaaactcctggcctcaattacaggtgtgagccactataccctgcccaggggttgtatccttgatcaagatgtatccttgagtgaattacagatagatgtgatgaaaagctacattaatttttaaatttcatctaaaatagtaaaatggcttcatgataaaatgactgtaaatgcttctactatcttcttgtggaggaaaggcatggtgacagcagtttctgatctggctgcagagatgcctgagcccacggccaccaatatggcttacggtggccagtaccaatctgttgggggtgacacatctgggcaaaaccccaactggcactacactggccttaaaagccatagagtggggttagatgattcaactagtatttactgggaaaggaggttttcccgtggcagaaagttatgtcagttacggaagacagtattcacttagtaagccttctctttagtctcctccgtcaagcctgttgcctgcttaggcctctcgagtactgcttaggcctctcgagtaccatcaatcataccatagagtctggatttgaaatcccacccatcaatgtttcactttgaagctttgaggaagctgatgagttctgtactcagtgttcttcacctattcctttgttcccatgcatgcgtgtgcacacaaacacctgttggtttcatcctatcattatgcacaagttcctatcagattataattgcactaccaccatcacttcctatctgtattagtttgctacagctgctgtaacaaagttccacaaactgggtggcttaaacagcaaaaatttatgtctcactgttctggaggccaaaggttcaaaattaaggtgtccacagggccgcactcacttcaaatgcaccagggaagtatctgttccatgtgcctcccctagcttttggtggtttttttggaaagctttggcattccttgactggtggcagtatagctccaatctccacgtggtgttctccctgtgttcgagcccctgtgcccaaacatccccttttaataagaacaccattcacattggattagggatctaccctactccagtattaactcaccttaactgcttacatctgcaatgaccctgtttccaaatacggtcacattctgaggtactgggggttaggactttgatgtatgaattttgaggggatacattcaacccataatattttgcacaaatcaggcacttgatgtagttcttaaaacaagagcagttggaagcagtattatcttggcaaacaagtggtagaacataacctgttttacatattttaattttttatcatgggaatgttgacacatacgcaaaaataggcccaataatataaggaaccccaggtcttcatttcctagtttcaacaattacaacccatggccaatgttgttgcatgcccctcctgtaagatagagggagattctcttacaggtatgaactacagtgtctaaaattacattcatctacattatcttctttgattttcataacaaccagaaaggtaggttatgtagttttacaataaaattcatgtctaacaaattactattttaatgtaaatgccaatttttaagatagtgaggggaaaaagaaagaatgccagtatgtctttatgcatgttttattggtttttttgtgcattctaatccgttaataaaaggaaaggaaggaacactggtatgctatatcgtcagctcttattcacactgaatggaattagttttcaatggaattgttaaggtaaattgccaatttctacttttctagaaaatcacttttactgaaaaaccttgttcctaacccatcctataaaaatgggattttactgaactacctctaatgtcacattttgtacataatggctgcaaatgtctaaaatgttaaggaaacattataatttagaacaattctaggcaaaaagagatatttgtagaggatccggatgcataaaagaacaaatgagccatttaatttgtagtttagatgtcatttttctgacagttatcaatgaaactgtcatgtatccctggaatttggggctgttagaattatttattttgatatcattctttcacataattgtgtctgatattttaacagaaggtatttatgttcgcatgcatgtggacattatcaatactttcacgttacattattactcatacatgcattagttctgattctcttcaaaacctaatttgcataactacaatattatatatttataaatacttaattttgtacaatccttttcctacttgactaagaatatcaaagatgtccccaaatgcttacttgaaggttgatttagtcacactagcagaaccccaggctcaaatgtcaaatgggatcatttctgtacagtgcagtaaccatattgcagtctttctgctgctgaagttacagttgcatattactcatcaaggcaaaatgtaaatgtttagtgattatatgatatggtttttgttaattccccaaatgggattttttttacctttgtttatttgagaacaacaactgaatgctgaaatgcagtggctgatgccagcaatctaaggcttcattagtacagacgaagcaatgctcactttgctacataaataattagagagattaaatgaaaataaacactgagaggatgtgcagacgctccgaagttaggtaattattttaattactctagtgacttccagcaaccttcattatcagccacagatcaagcttaaattgttttatgtaagaatatcataagctatatggaaaagtaccatagcttacttagtgattatgcttcataaaaatgacattttctccaagctcccatttaaaggagttgtttccattccagcccctgatagactcgtgacatatttttaaagtataagtttttgcacttaaaaatgttttgccctggttttgtacttctaatggacatccttaatgataattttcgtatctttatatctttgctcagatttgatcataagagattcggggccacatattgagtggcttaatgtaaaacaatatggcatattcagccatctgaaataaatgtcacttggaatcatgtcatccttattgcatgacaagctataccttgcatttggggtaaatttatttcttctttcttccactccctagaccaacttgggaagactctaacatacactctaggaattatcttcattacaagcagaggtactatttagaagcattatcagtcctgtttagatttcattttatattcatttgataacgatgatccatcaagatctcttgtgttaaggtgttcttttgaggaagggttatctgtattgaaatatcatttattgactgcctgtgtaataatggctcttcttcaaactacccaacatacaccatttaatccttgcaagattcccatggagtatgtattattaaccccattttccagatgaggaaacaggccttgggaggttcactgattttctaaagttgcacagtagaaagtatcccagaggggactcaaacccaggtctgcctgactccaagaaccatgaagctccccaacagatgactgaatgaaataaacctgggtacaaatgctaagggtaatagaaaaaaatgaagtgacagtctgtgatgtgctaattaagtgttgtgttttatgacacccatgaattctgggcatgagctaaagtctcaaactgcaaattcaattgattttgaaagtgctttgggctaggcacaatggcttacatctgtaatcccagcactttgggaggccaaggcataaggactgcttgagcccaggagttcaagaccatcttgggtaataggagaccccagtctacaaaaactaaaatgaaaaaattagcagggtgtagcagcttatatctgtagttcctgctactcaaaaagctgaggcaggaggattgcttgagcccaggacatcgagactgaagtgagctgtgttcaagtcactgcaccccagccttggcattgaagagagaccctgtctgtctgtctttctctctctctctctctctcacacacacagacacacacacacacacacacacacacacacacacacagtgtttcatctctgaatagccctggttcctggagaggatgtaatagcaaataggttttatggcatagttggaccaaccaaaagttccccactaacaaaggttagtgatgtttttagtacaattcagtaacaacatgaattttattccagcaaacacaaggcattttaaccaaatttaaaatttccaacaggatgaaccagacttcagtaacttaggggagaggggtgcactgcttcctaagaaaaaccttttcttaaagggaggccttgacttctttcctcttccccatcctggcatgatgctggtgcagaatacatttccaaggttgtgttatattcagaggcacattaggctattcgagagaatgggaagaggtctaatggcttcgttgttttctatgtttaggatgcactaatctgcagagtttaatgtatgagttgtggatggcacagggaagttgggacagaaggctagctctagggagttgttggggtggctgggtgttagtctgaaatttcactctcacgtttcagaatctgaagaggaagttagggaaattcacagatgagccaatgccttttaacaggtggggggttcaggggtaggactgggagaagaggagctgtcagaaaagctggagagccattcgccccagagctctcagttgcaccagaacgcacagtcggagagagatttatttgtgaacaagcccgagaaaggcagacaacccagacaagatgggctcagaaattatttatcataggctagggcagaacagtctggagctttccttctgctttgcaagcacttccctgggacctgcctgggaagcacagcccttcttcctggtaagttacagaaggtcaggcactcagctagtaggccagctagacagcaaaaagtgtctaaactaagtgccaactgtttacttggggtcttccagaccctatcatggttctattcgtcatggtacactctgtttgatttcaatcgcaccatctttatatgtaggaaggccaaaccggcccggctgtgttgggtgggatttctgcaggccatgcagtgaggacgccactagctatagacacacgcaggagacccacgttctatttccatatgccacttgccactgacctcagagaaatcattttaaaccctgaacctcagcttccttatcctgaaaatgaaggccattctacttcttaggccttcttgacaggagccttgggagagccaaacggagtaattccggtgacagcgaagaactgggagggaccgtgactccaaattactgaagaaaaataagttaaacatgctcggctggagttttaggaattccacccgcccccacccgccatgatcaaactgcagtcaggcagcagccctccgaattgattctttcttatggactgtctcacatgccaaacacctatgtgcagcacccctccatctccgtgggctcctattgatgtctgccttgcagtgaaagcgctttttgttgccgctgttcgatacaccccagcacatcaacgcagcagctgggagcaggaggaggaatcccttcgctttctcccctcctttcactccgaaccctaggcatcagcagcaacgcgcgtagcccggcaaatttccgcacgtgaatggattttcctggctcatctccaaagaccttgcggtatttcacaaagctgaagagaggtgaacgagcatcaccccctccaggaggtcgtgcagccccgcggggacgctcctcccgctcctccacccgcggtgcagcggccgcctcccgagcttgctcgcggggccgttagcgccagacccggcggagagccaaggggtccctccgcgcctccctctcgcagcccctctccaccagtagcagcgctgctgtcttcccacaggaggacttgggaggacgctggattctgcagcgcccccgccccctcgctttttctttctttccttgctttgggatcttgctgctggatccggagaggttctgagaagacaagagcaagggactgagagcaggcttccgctgcggcgcgcgaacacagccgggacacaacccccagcgtctccacccgctcctcgccaccccggcgggaatgtgaggaaggaaagcccccagcgccgccgcccgccctcgaaggcgtcccagagagcgtcctgggggcccgcggctggagcccttgtgcccgcagcaccgccggactggagcggcgaggcgcaccgggtgccgcttctcggcttccactcttcagaaagagcgcggtggggatcagcgcctttcccgcactcggcacaactccgggaccggcggcgcgcggctggaccgagtcccgcttcccgccagctcacctggagtcgggggcagcccctgcccgcccgcctgcaccccttgtcgctctagcttgcgcgaacctgccgctcctccacgcccaggtagtgagccccgcggctccaggtctctgcagcgccctcggccccatggacagcgcacccatcaccactccctaagtgctggcgccgccgctgtccaagctgcgcactggggtccctcggctcgcccctctctggggtgtccgagaggccagggagcgtgcaccatgaagtccgcgcttttcacccgcttctttatcctcctgccctggatcctaattgtcatcatcatgctcgacgtggacacgcgcaggccagtgcccccgctcaccccgcgcccctacttctctccctacgcggtgggccgcgggggcgcccgactcccgctccgcaggggcggcccggctcacgggacccaaaagcgcaaccagtctcggccgcagccacagccggagccgcagctgcccaccatctatgccatcacgcccacctacagccgcccggtgcagaaagcggagctgacccgcctggccaacacgttccgccaggtggcgcagctgcactggatcctggtggaggacgcggcggcgcgcagcgagctggtgagccgcttcctggcgcgggccgggctgcccagcactcacctgcacgtgcccacgccgcggcgctacaagcggcccgggctgccgcgcgccactgagcagcgcaacgcgggcctcgcctggctgcgccagaggcaccagcaccagcgcgcgcagcccggcgtgctcttcttcgctgacgacgacaacacctatagtctggagctcttccaggaggtaaaggccagcctgccccgctgggtgggcgagggcgggagtgggcctccgggccggccgggctgcagtcacacgccccttgcactccgggtgcacttttgagttctcagttctccgtgcgcgcattcggggcaccgagtggagccgctccttgctggcactccgcagcctccgctggccgtgggggtggaggggctgtgtgtgagaggatcactgtggcttaaggggcgggagtctgccctggggcttttctgtgtggagattgtgtcaagagaatagcacaggtgtgaggcgcgggaatgatttccaggggccaggctcctgacgacctgaggatggagcttagacctgcaggcgctggctgcgataggagatcagggagggacctgcaccgtagcgggtggcggtggaggggtgggggtggtggggacgggtaggctaggtgttactcgaggcttttcagtgcctacaggtgtgattctcagtctaggaccatatagggagaaaggtggagatagcctagagagaaatttgactattgcggcccactggcacggaaatggttgttagaagaaacactgacttctatggaggtccttcctctctttcccacacctcacaaaagtcttttctgaccctcaagattactttttttttttttttgcaagaaaaccctttctggaaaataaactgttctgccctgtggttacgtcttttttgcagcccaaggtaaacatctgggctgcctgatcccttttcacaacctttctctaaggcctctttttggcgagttagccaggacacatttggcggggccttttgcgtctttctggtgcagccaggtcctgagtgcatccgggctccctgctgttgagatggcccatgagttccctgggatggccacgcgcgcaccgcccccccccgccgcccccggcaggcacagggttagaacaggtgttcttccttgaggctggtatcttgcggtgtgtgtgtgtgtagcctgcaaatgagactgagtggcatgggttttctcagttttcttctgtctacgcaattacagccaaagaaaatcttcttgattgatttgacgccctgtgagactgttgccttcctccacctgaaatttcttgacgtcctgcttcagagactccccctcaattccccttctcccaagtaaactggacattgggaaaatactatgtgtgagttggacactgaactgctaaaataatctgtgtgtctggtcatcagataccctaactgcttcccacactttcatcctcatctctgggttgctttcttaaccccagggcagagctattctgtactcttccagtttaatttttctgtgtggctttaaaaaaattttcttaaaggtaattgccgccttcatttctattcatcctctctttcatgaataaaaggcacagtaattgtccttcatcttttcttttccatcctttcactgtagagggctttctttccacgtttctccaaatgaataaataagcttggcattgtatagtatggtccttactcaacccaagattagagataccatctgacgtttttaactgggcttttaatcctgcatcagtgctcccccctccaaaagaaaaaagtggcttgcatctgaagcaaagactgtacatttcaatgcaccacaatttttaaaccgcaaggtctttttattttcttctacaacttcgaagttgcctcgtctgtgacaatatgtggtcttgttgaagtaaaatagtgcacattactgttaatgaacactgtaggaggctagattgtgaaggaggaatgatttagtttattccgagcttctagcctcttggtgtgaggtgttagaagaattggcacacgcaggcagtgaaatgattcaggacacagccttcctttgatgcttcccaaactgaaaggagggtttgttggtgggggatattaagcatcaggagaaaattccagtaggtttttcattagtccatatgggggaaaatataaaatgaggagagggtaaggagaaaaaaatagtgttgtcagagaggacattataaaggaaaaacgcaaaactttcaagacactaaacttttgtacaattggaagtaatgcaataaaataaaataagagcatatgcaacattttttaatggtgaggtgccacatatacaaaaaatacaacaggtttattgtttctgttgtcattttaagcataataggcatgacatacttagaatttaagttttctatctcctggaggtcactcccagacagtaattttatgactagtacctttctctaccactcccccaccagcattgtttttggacagattaggcctttgtttgacatatatgtatgctgatacattcagttttctttattataacattttccatgcatggcaaacattattgaattccatcattaggctagtggaatttatgaattcttagtcttgtgcattttccagaatttggaaatccgtaggtttatttgtgagacagcctaccatacacccgttctcagattaatgattccgtgtaaattatagtttagacattgttctctggagaaaacgtaggaccagataaaacattgaaaatctacagctccttgggggaaagcaaagatgctgattaggaatgctatagggctgaggcatatatctcagccctttatattgtgcatgcacaccaattagtttttcagtaattcacagtacttaaggaaagaataccccaagtcaggtttcatcttttattcatggtgcttctaatttccatggttgatgttaaagtggataagataaaaggaggaaaatgaaccacgtacaaattagctccgtaagtattggctgcaaatgaaggaaagcaaaggatgaaaggtctccaaattaaattaaagacgcaacaggcaatctgtgttcaattattcctccctggtaactggaatggtgctttgtcatctcatacagctaactaattttcagcctttcctttcaactgatctgcattgccaggaaagaaatatttgcattgaatactcttatgttaacagccaaatccatttgcaaatgaagtttagtgtgaatcttagctacagaaatgggcctgttcattggagaaggaggtggtggggtttttcaggtttcaaaaatctcaacagctactcctcttcttcctgtggcattgatggggttttgcactgtggatcacaggtaatcctgcctccctgtgcatcctatccatctccctctctggaaaagcttacttgcaaaggatttaagctgctttaataaaagccacaactacagataaatgtgactttatttttagtcatgttttcaataacactattgatcagatttctgtttttcaccagaaaaccttcaaagctttcttaaatttaaaacagatgcttttcaggtgaagttggtttcacctctggaaatcaattgaattgaaatactaaaaaaaaatagcactttccaagcaagaaaaaaaaaaactttagaaattttgaagttaatgaaataagactggaagacaggctggctctcagacacttaaggggttatcaaaggagtcagtgactgagattgcatctagaagatgtttctggaaagcaatgaactaaagaagccccttgcttgaatcttttgttgggtgctattcagctatttgtgtactaggcagataaaggagttttgaggattaattctgtcttgcttttttttcagaagtatttgtgtgctttccctctttacctgctgcttattggagtcataatctgaaggatatacgagtttacaatgtttggccctttcccccctaaatagtacttctatttatgtttcctgaaaggaaacatgagatttaccttttacccttggtacatttactttatttagggtaattctttttaaagtgaaggaacctagaagattttcttgggtggaacattaaaagaccattttacctgaaatgtgccccttgtattttatttctttccctctgaaagctattaagagtcatgccataggtctgataaaatgtgagaattttatagaaatgtatatatgaaactacagccaattttcttaggctataaatgttaggttttctttattctccctgggtgtacagtatttgaattatggttcgtttttgataagagttttctttggagaccagtagttttcatttggatgttgatattttaatggaccagaaataacaatttgggcctaaagatgttctcccttctgcctcttcctattgtctttttccatcattcttcctctctcaacctacttttcactgatgattctgtctcgtgaatagacatgaaaacatgttcggattattgcttggtgcaatgaatgttgtatcttttaaacatttaggctgttgctgcttcttggaaaccattgtgggtggctcccttttttctgtctactctgcttgcctctaaattacaagctggtaaattttctcttgtgtgaacagtaatggaatagtaattgcttttaaggcatgctgcaaaagcaaaatagaaaatccaaagtcaatggtcttatttattaactatttcaggtggtattcaagtagtggtaggttttttgttgtcgtcattgttttttgcacagaattcaatattgtacagatatgtctatttaaatgttttggactctggaatattcagcctgtgtaagttaacacatatatatttgattcacagtgcttgtgaagcatgaaatttaagttttgcatggagctcaaattctcccaccaaaatacaaataaaattgttataccagtacatagatagatgcataggtaggtttagaatacatctccaaagcacagaaataaaactaagataatttgttgttcatgcctggtaatttttgcatacaattttaaataaatgttaataccctatatcatggatacaagcaaaatatagttgacataaattgagcatttactataggcaaagaagtacccttagggttttacgtgtattatttaatcttcataacaccctgaggtaggtaatagtactgtctctgtttgtttgctgttttaatactaatgctaatatttagttatggacgcagtcccttggtgagtacagaggacttaaacaaatgcaacctgacggtaatatagttgtttacctctgatctatataatcagtatccccgtttttaacagaagcactaggaagtaacttgaaaatgtcatgtagctgttatgtggcagagatagaattttgaacccaggtgccctggttctagcgcctgcattgttgactgtcctgaaactcatgtcatttaacacatgaaaatatgtcatcattataataagtaaagcacctgattagcaggagccttgtgatattattactgtcttctgccatttttgaattcaggtctttcttcttggttatgtcaactcttagctttctcctttgaccttttgttacttttttcctttttgttgttaatgtattacattgaaaaataaaattttttttttttgcaagaaaatgtactttattagctttctttgttctgtgggttgatcttcctggatatttctttattttattttattttattattattatactttaagttttagggtacatgtgcacaatgtgcaggttagttacatatgtatacatgtgccatgctggtgtgctgcacccattaactcgtcttttagcattaggtatatctcctaatgctctccctccccccaacccccaccccacaacagtccccagagtgtgatgttccccttcctgtgtccatgtgttctcattgttcaattcccatctatgagtgagaacatgtggtgtttggttttttgtccttgtgatagtttactgagaatgatgatttccaatttcatccatgtccctgcaaaggacatgaactcatcattttttatggctgcatagtattccatggtgtatatatgccacattttcttaatccagtctatcattgttggacatttgggttggttccaagtctttgctattgtgaatagtgccgcaataaacatacatgtgcatgtgtctttatagcagcatgatttatagtcctttgggtatatacccagtaatgggatggctggatcaaatgatatttctagttctagatccctgaggaatcaccacactgacttccacaatggttgaactagtttacagtcccaccaacagtgtaaaagtgttcctatttctccacatcctctccagcacctgttgtttcctgactttttaatgattgccattctaactggtgtgagatggtatctcattgtggttttgatttgcatttctctgatggccagtgatgctgagcattttttcatgtgtcttttggctgcataaatgtttcttttgagaagtgtctgttcatgtccttcacccacttgttgatggggttgtttgttttttcttgtaaatttgtttgagttcattgtagattctggatattagccctttgtcagatgagtaggttgcgaaaatattctcccattttgtaggttgcctgttcactctgatggtagtttcttttgctgtgcagaagctctttagtttaattagatcccatttgtcaattttggcttttgttgccaatgcttttggtgttttagacatgaagtccttgcccatgcctatgtcctgaatggtaatgcctaggttttcttctagggtttttatggttttaggtctaacgtttaagtttccatcttgaattaatttttgtataaggtgtaaggaagggatccagtttcagctttctacatatggctagccagttttcccaacaccatttattaaatagggaatcctttccccattgcttgtttttctcaggtttgtcaaagatcagatagttgtagatatgcagcgttatttctgagggctctgttctgttccattgatctatatctctgttttggtaactgtagccttgtagtatagtttgaagtcaggtagtgtgatgcctccagctttgttcttttggcttaggattgacttgacgatgtgggttcttttttggttccatatgaactttaaagtagttttttccaattctgtgaagaaagtcattggtagcttgatggggatggcattgaatctataaattaccttgggcagtatggccattttcacgatattgattcttcctacccatgagcatggaatgttcttccatttgtttgtatcctcttttatttcattgagcagtggtttgtagttctccttgaagaggtccttcacgtcccttgtaagttggattcctaagtattttattatctttgaagcaattgtgcatgggagttcactcatgatttggctctctgtttgtctgttattggtgtataagaatgcttgtgatttttgtacattgattttgtatcctgagactttgctgaagttgcttatcagcttaaggagatttttggctgagacaatggggttttctagatatacaaccatgtcatctgcaaacagggacaatttgacttcctcttttcctaattgaataccctttatctccttctcctgcctaattaccctggccagaacttccaacactatgttgaataggggtggtgagagagggcatccctgtcttgtgcccgttttcaaagggaatgcctccagtttttgcccattcagtatgatattggctgtgggcttgtcatagatagctcttattattttgagatacgtcccatcaatacctaatttattgagaatttttagcatgaagggttgttgaattttgtcaaaggccttttctgcatctattaagataatcatgtggtttttgtctttggttctgtttatatgctggattacatttattgatttgcgtatattgaaccagccttgcatcccagggatgaagtccacttgatcatggtgagtaaggttttgatgtgctgctggattcggtttgctagtattttattgaggatttttgcatcaatgttcatcaaggatattggtctaaaattctcttttttggctgtgtctctgcccggctttggtatcaggatgatgctggcctcataaaatgagttagggaggattccctctttttctattgattggaatagtttcagaaggaatggtaccagttcctccttgtacctctggtagaattcggctgtgaatccatctggtcctggactctttttggttggtaagctattgattattcccacaatttcagagcctgttattggtctattcagagattcaacttcttcctggtttagtcttcggagggtgtatgtgtcgaggaatttatccatttcttctagattttctagtttatttgcgtagaggtgtttgtagtattctctgatggtagtttctatttctgtgggatcggtggtgatatcccctttatcattttttttgtgtctatttgatttttctctcttttcttctttattagtcttgctagtggtctatcaattttgttgatcctttcaaataaccagctcctggattcattaattttttgaagggttttttgtgtctctatttccttcagttctgctctgattttagttatttcttgccttctgctagcttttgaatgtgtttgctcttgcttttctagttcttttaattgtgatgttagggtgtcaattttgaatctttcctgctttctcttgtgggcatttagtgctataaatttccctctacacactgctttgaatgtgtcccagagattctggtatgttgtgtctttgttctcgttggtttcaaagaacatctttttttctgccttcatttcgttatgtacccagtagtcattcaggagcaggttgttcagtttccatgcagttgtgcagttttgagtaagtttcttaatcctgagttctagtttgattgcactgtggtctgagagacagtttgttataatttctgttcttttgcatttgctgaggagagctttacttccaactatgtggtcaattttggaataggtgtggtgtggtgctgaaaaaaatgtatattctgttgatttggggtggagagttctttagatgtgtattaggtccgcttggtgcagagctgagttcaattcctgtgtatccttgttaactttctgtctcgttgatctgtctaatgttgacagtggggtgttaaagtctcccattattattgtttgggagtccaagtctctttgtaggtcactcaggacttgctttatgaatctgggtgctcctgtattgggtgcatttatatttaggatagttagctcttcttgttgaattgatccctttaccgttatgtaacggccttctttgtctcttttgatctttgttggtttaaagtctgttttatcagagactaggattgcaacccctgcctttttttgttttccatttgcttggtagatcttcttccatccttttattttgagcctatgtgtgtctctgcacgtgagatgggtttcctgaatacagcacactgatgggtcttgactctttatccccagtcaagacccatcagtctgtgtcttttaattggagcatttagtccatttacatttaaagttaatattgttatgtgtgaatttgatcctgtcattatgatgttagctggttattttgctcgttagttgatgcagtttcttcctagcctcgatggtctttacgttttggcatgattttgcagtggctggtaccggttgtgcctttccatgtttagtgcttccttcaggagctcttttagggcaggcctggtggtggcaaaatctctcagcatttgcttgtctgtaaagtattttatttctccttcacttatgaagcttagtttggctggatatgagattctgggttgaaaattcttttctttaagattgttgaatattggcccccactctcttctggcttgtagagtttctgccgagagatcggctgttagtctgatgggcttccctttgtgggtaacccgacctttctctctggctgcccttaccattttttccttcatttcaactttggtgaatctgacaattatgtgtcttggagttgctcttctcgaggagtatctttgtggcattctctgtatttactgaatctgaatgttggcctgccatactagattggggaaattctcctggataatatcgtgccgagtgttttccaactcggttccatcctccccgtcactttcaggtacacaatcagacgtagattttgtcttttcacatagtcccatatttcttggaggctttgttcatttctttttattcttttttctctaaacttcccttcttgtttcatttcattcatttcatcttccatcactgataccctttcttccagttgatcgcatcagctcctgaggcttctgcattcttcatgtagttcttgagccttggctttcagctccatcagctcctttaagcacttctctgtattggttattctagttatacattcgtctaaatttttttcaaagtttttaacttctttgcctttggcttgaatttcctcctgtagctcggagtagtttgaacgtctgaagccttcttctctcaactcgtcaaagtcattctctgtccagctttgttccgttgctggtgaggaactgtgttcctttgggggaggagaggtgctctgctttttagagtttccagtttttctgctctgttttttccccatctttgtggttttatctacttttggtctttgatgatggtgatgtacagatgggtttttggtgtagatgtcctttctgtttgttagttttccttctaacagacaggaccctcagctgcaggtctgttggagtttgctagagatccactccagaccctgtttgcctggttatcagcagcggtggctgcagaacagcgtattttcgtgaaccgcgaatgctgctttctgatcgttcctctggaagttttgtctcagaggagtacctggccgtgtgaggtgtcagtctgcccctactggggggtgcctcccagttaggctgctcgggggtcaggggtcagggacccacttgaggaggcagtctgcctgttctcagatctccagctgcgtgctgggagaaccactgctcttttcaaagctgtcagacagggacatttaagtctgcagaggttactgccatctttttgtttgtctgtgccctgtcctcagaggtggagcctacagaggcaggcaggcctccttgagctgtggtggcctccacccagttggagcttcccagctgctttgtttacctaagcaagcctgggcaattgcgggcacccctcccccagcctcgctgccgccttgcagtcgccttgcagtttgatctcagacctgtgctagcaatcagcgagactccgtgggcgccatgtgtgggatataatctcctggtgcgccgttttttaagcctgtcagaaaagtgcagtattagggtgggagtgacccgattttccaggtgccctctgtcacccctttctttgactaggaaagggaactccctgaccccttgcgcttcccgagtgaggcaatgcctcgccctgctttcgcttgggcacggtgtgctgcacccactgtcctgcgcccactgtctggcactccctagtgagatgaacccggtacctcagatggaaatgcagaaatcacccatcttctgcgtcgctcacgctgggagctgtagaccggagctgttcctatttggccatcgtggctgccagctcaaaattatatgttaatatatttgttgtgtagactataatgttttgatatagggatacattgtggaattactaaagctaattaatatattcattaccttacaattttatcattttttgtgtgtgtggtgaaaacatttaaaatctcctcagcagtttgcaggtgtacaatacattgttaataactatagtcaccaatttgtgttgcagttgatcttctaaatgtattctttctaactgaaattttgtatcctttgaccaaacatttccccaattcctacccctaccttttttctcctgataatatttggtcttgtgaaaattttatctcatctctcactatctctgatttatagaccatttgatatttatttttacaagctagataaaaactgccaagttagtatataaactgtagtcttttattttttaaactacgtattcttgtgaataagaattgataacttctatagatattaaaattaagtttttcctcatttgctatgtatacatcaacaactctgtctcctaggcgtgtatcatgtcagggcaggcagaactgaacggaagaataattttcagggtagaatgggagaaaatacagaattatgtgaagcaggctcaggggtttattattgaaacagaggagaggagctgggggcctgagccaatttgcgctgaagccaatgtggctgagatggctccttctgggaacagagatgtgcttggaggagccttggttctcctcaccaatataccccttatgttggctgctgcaggcagcactaccaggttcatttgactgctcacttgttggtagaaggtttgttaattttcttgtccgatttcttctgagattaggaatttccttggattaaaaacaaaataaatcattggttgagtctttttgcaggttaaaaaaaacaagaaaacttggaggtggatttgctgaggaggacagccatgttctctaccagaagtcagattgggtctttttcctaaaacaactaaaaacgcagtagtttgtttactttttaaaatccgtctcctccacctgtggaaagagaactttaaacactatttatgttacatgctgaatctaagactgttgttccttcagcttgaactgcagatattcctaaattgtacctgcatctctagtgaaagctgagtgtgctaaatgctgaccattctccattaactgagatttcagttatctaagagatttgcatcttagcagtactactgtattactctgtaagattccttctacctacctgagctcaaacttcatcctattcagaagatgttttaatataacaagtcagtaggccttctctaccacttaacaaatattaattgagcacctactgtgtacaaggcactgtgcttaattaagtcagggagtatttcagctccctgaaacagagagcatctcagccctcccagattgattctctggactaaatatgcatggtagcttcagtgcctgttgagagaaatgaatgtgtctgggagtgtaaagcagaggtccctaatggagttgttgattgtaggagtaattgtggaggaagtgacatttgagctgagaagtaaagaacaacagggcctagtgggtgatgggacagggatgaaggagccctccagagagagaaaaccatatttgtggacctgaatactcagagacctgaaggatgttcttgatggcaagaggctgggtggtgagaagatgaggtggagaaataggcagccacttttccatcttctgcatgtcaaagtgctgttctcatctttgagagaagctgtcctgtaaagaactcttcaggttctgtgtatttggaagtggcatctaaatcatgcccattggaatcttcttcctggatactatcatgtctttatgtaaacttgtgaatttaaaagtatacatagcagtgtcggagcaggctttcctttttatttttttgcatctggttttcagaatgcccattaggcaaatttttgacctttaactttttcaataggccttggataaggtgggtggtaaattgataggaaaactatagataagtatttgtccatctagttgtaccaaagaagtggtaatatagacttttgtggatcctttagagcacctgatatcacattaaataatatgatacctgaatatgtatttcagttgtttctcccactagaataccagggtaggaattttcttttgtttactgttgtatctgtagtgtccagagcagtgcctagcatgcagtgaatgcttattaaatattttttgaatgaatgaattataagacacttggaagctgagggaatttattataaacagagtttaatccctgaaaggagtcctgcacagagattgtcaatcaaatcatagttttgaagtctgtgttgtatgtctaagattgtattgagccctttaaatagaaactggaagataaacgtggtccctactctgattctaagagcttttatactaaaaggaaagagaatgtcatgagcatttatgtatatagcaaggcattaccatcaacagccattaaaaggggaggtttgtcaaggtggtcgtgagtcagttgagtatttggcctcttcacacgtgtgagaggctggaggctggtggggagctcacataggcgtaacagcccatgttcaaatccagcttcactgcttagtgtttgcattacattggcaagggttgactgcctcgagtgattgttttaagtgctctaggcaagtaataaatattagttctttttgccttgttctttccactatgggtgactgccctaattgagggtataccagataattgcactgtcttgatttgttaagtgcctctaaatgttcttctcctgacatctggactatgtttctagaggcctagggggaggaggaggtaaaggcacttgactttcccaaattagtctgtacccaagtggaactgcataaattgggtaccttaattacaccattgggtattactagggtgattacagggacaagagttaaatagggcttgtctacaaagagtcctgggaggaagtgagatgtgagagaactaaaagcatctaaaggacattttagatggagaggaggtgaagggtgttctcctgtgggttctgacttctgatgctaactcctaacggtgaaagctaggaagttgacttacatgtagctcagaggaggatgctaacctggctcactgcaacttccacctcctggattgaagcgattcccctgcttcagcctcctgagtagctaggattacaggtgcaagccatcatgcctggctaatttttgtatttttagtaaaggtggggtttcaacatgttggccaggttggtctcaaactcctgacctcaggtgatgcacccacctcggtttcccaaagtgctgggattacaggtgtgagccacggtgcctggccctaggtgtggtttttaattactatgtaatcccagggcccagtgtggacctaggacatagttactacatgatacagtgattatcgttggcacaaatgaatgaatcaaagagatagtatgttacaaaggagagggcacgaaatagattttttttttgagcacatgattagaagcagtattttaaggtcatttcctgggctgggaaggttaggaatattcttctgaccagcacctgttggaggaggtggaaaggatcccagatgccagccttctctgtgtccacccttctcccagccttgcctggggacactgagccccttgctgggcttcaagtgcctgatgcttttttgggaagccccataagcttgcttctctttttgcaaacattgcttaagttttcattaataaaaacattctaaagcttatttagtccagaatgaggaaaatgtaggagagagagagggtgtgggtgtgtgtgtggggcgagggggtgtctgtgtgtggttttacctacctatgtggttgccccttcttacctgtgaatgcagtggctgctttccttgttccttctccacagaccctgtaccctccatttcagtttctggcaagaattgtggccagacccagggatctgatgcagtggtccccaacattttctggtcacataatttctaaaagaattttgtaacattaaccctctgggatattttttaattgacatctacattttattttttttattattttattattattatactttaagttttagggtacatgtgcacaatgtgcaggttagttacatatgtatacatgtgccatgctggtgtgctgcacccattaactagtcttttagcattaggtatatctcctaatgctatccctccccccaacccccaccccacaacagtccccagagtgtgatgttccccttcctgtgtctgtgttctcattgttcaattcccatctatgagtgagaacatgcggtgttggttttttgtccttgcaatagtttactgagaatgatgatttccaatttcatccatgtccctgcaaaggacatgaactcatcattttttatggctgcatagtattccatggtgtatatatgccacattttcttaatccagtctatcattgttggacatttgggttggttccaagtctttgctattgtgaatagtgctgcaataaacatacatgtgcatgtgtctttatagcagcatgatttatagtcctttgggtatatacccagtaatgggatggctggatcaaatggtatttctagttctagatccctgaggaatcgccgcactgacttccacaatggttttactagtttacagtcccaccaacagtgtaaaagtgttcctatttctccacatcctctccagcacctgttgtttcctgactttttaatgatcaccattctaactggtgtgagatggtatctcattgtggttttgatttgcatttctctgatggccagtgatgagcgttttttcatatgtcttttggctgcataaatgtcttcttttgagaagtgtctattcatgtccttcgcccacttgttgatggggttggttggttttttcttgtaaatttgtttgagttcattgtagattctggatattagccctttgtcagatgagtaggttgcgaatattttctcccattttgtaggttgcctgttcactctgatggtagtttcttttgctgtgcagaagctctttagtttaattagatcccatttgtcaattttggcttttgttgccaatgcttttggtgttttagacatgaagtccttgcccatgcctatgtcctgaatggtaatgcctaggttttcttctagggtttttatggttttaggtctaacgtttaagtttccatcttgaattaatttttgtataaggtgtaaggaagggatccagtttcagctttctacatatggctagccagttttcccagcactatttattaaatagggaatcctttccccattgcttgtttttctcaggtttgtcaaagatcagatagttgtagatatgcagcgttatttctgagggctctgttctgttccattgatctatatctctgttttggtaccagtaccatgctgttttggttactgtagccttgtagtatagtttgaagtcaggtagtgtgatgcctccagctttgttcttttggcttaggattgacttgacgatgtgggctcttttatggttccatataaactttaaagtagttttttccaattctgtgaagaaagtcattggtagcttgatggggatggcattgaatctataaattaccttgggcagtatggccattttcacaatattgattcttcctacccatgagcatggaatgttcttccatttgtttgtatcctcttttatttcattgagcagtggtttgtagttctccttgaagaggtccttcacgtcccttgtaagttggattcctaagtattttattatctttgaagcaattgtgcatgggagttcactcatgatttggctctctgtttgtctgttattggtgtataagaatgcttgtgatttttgtacattgattttgtatcctgagactttgctgaagttgcttatcagcttaaggagatttttggctgagacaatggggttttgtagatatacaatcatgtcgtctgcaaacagggacaatttgactccctcttttcctaattgaataccctttatgtccttcttctgcctaattgccctggccagaacttccaacactatgttgaataggagtggtgagagagggcatccctgtcttgtgcccgttttcaaagggaatgcctccagtttttgcccattcagtatgatattggctgtgggcttgtcatagatagctcttattattttgagatacgtcccatcaatacctaatttattgagagtttttagcatgaagcgttgttgaattttgtcaaaggccttttctgcatctattgagataatcatgtggtttttgtctttggttctgtttatatgctggattacatttattgatttgcatatattgaaccagccttgcatcccagggatgaagcccacttgatcatggtgaataagctttttgatgtgctgctggattcggtttgccagtattttattgaggatttttgcatccatgttcatcaaggatattggtctaaaattctcttttttggctgtgtctctgcccggctttggtatcaggatgatgctggcctcataaaatgagttagggaggattccctctttttctattgattggaatagtttcagaaggaatggtaccagttcctccttgtacctctggtagaattcggctgtgaatccatctggtcctggactctttttggttggtaagctattgattattgccacaatttcagagcctgttattggtctattcagagattcaacttcttcctggtttagtcttgggagggtgtatgtgccgaggaatttatccatttcttctagattttccagtttatttgcgtagaggtgtttatagtattctctgatggtagtttctatttctgtgggatcggtggtgatatcccctttatcatttttttgtgtctatttgatttttctctcttttcttctttattagtcttgctagtggtctatcaattttgttgatcctttcaaataaccagctcctggattcattaattttttgaagggttttttgtgtctctatttccttcagttctgctctgattttagttatttcttgccttctgctagcttttgaatgtgtttgctcttgcttctttagttcttttaattgtgatgttagggtgtcaattttggatctttcctgctttctcttgtgggcatttagtgctataaatttccctctacacactgctttgaatgtatcccagagattctggtatgttgtgtctttgttctcgttggtttcaaagaacatctttatttctgccttcatttcgttatgtacccagtagtcattcaggagcaggttgttcagtttccatgtagctgagcggttttgagtgagtttcttaatcttgagttctagtttgattgcactgtggtctgagagacagtttgttataatttctgttcttttacatttgctgaggagagctttacttccaactatgtggtcaattttggaataggtgtggtgtggtgctgaaaaaaatgtattttctgttgatttggggtggagagttctttagatgtgtattaggtccgcttggtgcagagctgagttcaattcctgtgtatccttgttaactttctgtctcgttgatctgtctaatgttcacagtggggtgttaaagtctcccattattattgtttgggagtctaagtctctttgtaggtcactcaggacttgctttatgaatctgggtgctcctgtattgggtgcatttatatttaggatagttagctcttcttgttgaattgatccctttaccgttatgtaacggccttctttgtctcttttgatctttgttggtttaaagtctgttttatcagagactaggattgcaacccctgcctttttttgttttccatttgcttggtagatcttcctccatccttttattttgagcctatgtgtgtctctgcacgtgagatgggtttcctgaatacagcacactgatgggtcttgactctttatccaatttgccagtctgtgtcttttaattggagcatttagtccatttacatttaaagttaatattgttatgtgtgaatttgatcctgtcattatgatgttagctggttattttgctcgttagttgatgcagtttcttcctagccttgatggtctttacgttttggcatgattttgcagtggctggtaccggttgtgcctttccatgtttagtgcttccttcaggagctcttgtaaggcaggcctggtggtgacaaattctctcagcatttgcttgtctgtagagtattttatttctccttcacttacattttaaaaatcattttaaactgttgcaaaacttttgatttccagtgcattataaatgttgacatttgtaatgaaatttaaatatatccagtagatctataaatattgttaacagtttgatacccaccaccattcatttaataaacatacttttcaatgacatttggatggagatatatatatacacatatatatatttttaagtgagacagggtctctctctgttgcccagactggagtgtagtggtgcgatcacagcttactgcagcctccacctccctgggtcaagcaattctcctgcctcaccctcctgagtagctgggactacaggcacatgccaccatacctggctaatttttatttttatttttttttggtagagacagggtcctcctatgtttccctggctggtctcaagctcctggcttcaagcagtcctaccgcctcatctttccaaagtactggtattactggtgtgagccaccacacctggccacgtttggatattttatattgctcttttttttttctatcttcattcctcctcagaattttatcttagcataatattttgaggttcaaagtcatctccctattacacatatctacaatgacaaaaagaatatagatagaatttaaagttttataatcctgtggctatcagcctctgtcttagaaaagcttcaggactgacttaccattacaattagtattggtaaacaattaatcaaaacaacaataaatgttacagggttgggtaattaactattaaacataaaagctacatttattagatttcttagtgacatggatggagcattttgttgttgattatatattctgtattgacaaatattacagattgctagagatagaatttagtataaatttcattcctattaggtcaacttttttttacgtaaagaagtaattaaggtgggaatcattttcttacagcagtgtttctcagttttttgaactctcaagctttaagccaaaaattacatggtgatctgacagcaaaaactattttaatgatttattaatgatattaggtcacctccagttttgttgaatgcaaatagttagaaacctctggttgccccaaaggatttattacccattcattagagacattggctttcttaataaagatagcaatatttctgattacctttgtttggtgccctggaggttatattaggtgggacagtgcatttaataacaatacaggatgggtgagcagtcaggccctttgtgaagtgggagaagggtgatgtgaagtggggtggggcgggggtggggggcagagcgagagagaagcatggagaacctgcccctatccaagtggatcagttttaggaaagcttatgccgtatgtagggatgccaagggtctgggaatttattccctaacttaaagttatctgcattcacatattccatggagagttgtatgcattcaggtatcatgcactcccagtctgaaaaactgctcttttggttgaaagagtataaggacttggaagatggggcctctaggcctgactgagccaaaggctcccatgacctcaagggaactgactagtgcttttttcattttttactgcgttctgggtcccacccttggcattcagatgtgtgcatgagctgctgtttaattttcatcatctgctttacaaatgaggaaaagccctgatatccagctccctcataggacctgataataatacatatggttctgagaattaaacgaggtaataggtacgtaaagtgggtaaacagagtaacttcactctctatttgtacgtctctcagaagtctggggcaacaggagctgtggaaggctccagaagacaagatgtcacaaagccacctagctactgtggctgtaccaatcctgacagtcatagcggccccaaggtgctgctctgttggctgatgggaatgcagatttacgtatggtccatatatggacgtgttgttttacatctaaataaacttggcattgcaagatgaaaatgccagtatcatttttaaaggtcaagtgacagtttgggaagatttttataactttgataagttcctcagctacatctgttcacactggcaagagtgctagagacattcttgggaagtcttttctatcagaggagctgcagccttgctctgcagaaaagttctgatgacagtcatcagagtatttggggctcatgcactaactgttaattattttcatttttcattaatgaaaatttattttaatttttttcattcttctttaatgaatttaactatttgcctctacctttgcttcctgctttgtatactgataagacaggttttggggtttttatgttttctggtcttgcttttcccctttgttttaggatttaaaaaacaaaaaggttaagagggtaggttgacagtgcttgcagtttctgttttacagcaatcccagctgttcctctgaaaattggttgattgtcctatagtttaaaatatatagatgttcatttgattggctcttgtaaatctagtgacatttaaaagtacatggcagctagtcatggtggctcacacttataatcccagcactttgggaggctcaggcaggaggatggcttagcccaggagttcgagaccagcttgggtaacatcatgagaccccaactctacaaaaatttttaaatagttgtgagtggtggcatgtgcctgtaccctcagctacttgagaggctgaggtgggaggattgtttgagacctggagtttgaggttgtggtgctctatgattgcaccactacactccagcctggatgatagactgagaccctgtctcaaaaaagaaaaagaaaaaagttcatgtctattctgttttttgttatgttactttcctctaaacatgaagaaaagcagtgaggagaaacaaaaattgagtattcctgtgttttttatcatagtaaaatatacatttgccattttatatttatcctgataaccttcagtgttgtaaaatacacattcacaattattcatttaacctgataacctctaatctcttttccatgaatcggactaggtacctcatataagtggaatcataccatatttatacttttgtgtctggtttatttcacttaatgtccttaaggttcatccacattgtagcatgtctcagaatttaattcctttttggggctgaataacattctattatatgtatattccacattttgcttatccattcatctcttgataggaagttgtgttgctttcacattttacctattgtgaataatactggtaccaatattagtgtacacataatctgagtccctgctttccgttcttttgggtatatacacagaagtaaaattgctagacacaatggtacttctatgtcagttttttgaagaactaccctactgttttccatagcagttacaccattttacatttctatcaccagaccacgagggtaacaatttctccacaccttagccaccacttgttattttttgttttttgggtaatagccatgcaaaaaaatatgaagtaaagtgaaatatcattatgaaaggtgtgaagtgatatgtctttgtgattttgatttgcatctctcctataattagtgatgttgaacatcttttcatgtgcttattggccatttgtctgtcttctttggggaaatatctcttcaagcctattctgcccatttttgaattgggttttgttgtttttaggaattctttagatattttggatattagtcacttatcagatatgtgatttgcaaatgaggatggcctttttattttgttgattgtgttctttgcacaatagtttttatttttgatgaaatataattttctattttgtgcttttggtgttatatatctaagaaatcatgccaaattcaatgtcatgaaggctttctcctgttttcttctaatagtgtgtagttttagctcttttgtacgtggtgttgggtaagggttcaacttcatccttttgcatgggaatatccagtttttttcccagctgcatttgtcaaaaagactcttctttcttccgttgaatgatctcagtggaagtcactgatctcatcaaaaatcactgaccatatgtgggagcataaccacctgatgggttcttcttgcctgctgcccaaatatagctggtttatcaagatgggaattgcaatagagaaagagctttacacatgtacagctggctaaatgggagactggagctttattattaaataaataagcctcccccaaaatttggatgctagggttttctctttttttttctttttttattattatactttaagttctagggtacatgtgcacaacgtgcaggtttgttacatatgtatatatgtgccacgttggtgtgctgcacccattaactcatcatttacattaggtattctcctaatgctatcccttccccctccccccaacccactacaggccccagtgtgtgatgttccccaccatgtgtccaagtgttctcattgttcagttcccacctatgagtgagaacatgtggtgtttggttttctgtgcttgagatagtttgctcagaatgatggtttccagcttcatccatgtccctacaaaggacatgaactcactcttttttatggctgcatagtattccatggtgcatatgtgccacattttcttaatccaatctgtcattgatggacatttgggttggttccaagtctttgctattgtgaatagtgccgcaataaacatacgtgtgcatgtgtctttataatagcatgatttataatcctttgggtatataaccagtaatgggatggctgggtcaaatggtatttctagttctagatccttgaggaatcaccacactgtcttccacatggttgaacgagtttacactcccaccaacagtgtaaaagtgttcctatttctcccatcctctccagcacctgttgtttcctgactttttaatgatcgccattctaactggtgtgagatggtatctcattgtggttttgatttgtatttctctgatggccggtgatgatgagcattttttcgtgtgtctgttggctgcatgtcttttgagaagtgtctgttcatatccttcgcccactttttgatggggttgtttgattttttcttgtaaatttgtttaagttctttgtagattctggatattagccctttgtcagatgggtagattgcaaaaatattctcccattctgtgggttgcctattcactctgatggtagtttcttttgctgtgcagaagctctttagtttaattagatgccatttgtcaattttgacttttgttgccattgcttttggtgttttagtcatgaagtccttgcctatgcctatgacctgaatggtatagcctacgttttcttctagggttcttatggttttaggtcttacatttaagtctttaatccatcttgaattaatttttgtataaggtgtaaggaagggatccagtttcatctttctacatatggttagccagttttcccagcaccatttattaagtagggaatcttttccccatttcttgtttttgtcaggtttgtcaaagatcagatggttgtagatgtgtggtattatttctgagggctctgttctgtgccattggtctatatctctgttttagtatcagtaccatgctatttggttactgtagccttataatataatttgaagtcaggtagcaagatgcctccagctttgatctttttgcttaggattgtcttggcaatgtgggctcttttttggttccatatgaactttaaagtagttttttccaattatgtgaagaaagtcattggtagctcaatggggatggcagttaatctataaattaccttgggcagtatggccattttcacaatactgattcttcctatccataagcatggaatgttcttccatttgtttgtcctcttttatttcattgagcagtggtttgtagttctccttgaagaggtccttcacatcccttgtaagttggattcctgggtgttttattctctttgaagcaattgtgaatgggagttcactcatgatttgtctctctgtctgtttttggtgtataggaaagcttgtgattttgcacattgattttgtatcctgagactttgctgaagttgcttatcagcttaaggagattttgggctgagacgatggggttttctaaatatacagtcatgtcatctgcaaacagagacaatttgacttcctgttttcgtgattgaatagcttttatttctttttttaaatatatatttttattatactttaagttctagggtacatgtgcacaatgtgcaggtttttacatatgtatacatgtgccatgttggtgtgctgcacccattaactcgtcatttacattaggtatatctcctaatgctatccctcccccctctccctaccctggtgtgtgaagttccccttcctgtgtccaagtgttctcattgttcaattcccacctatgagtgagaacatgcggtgtttggttttttgtccttgcgatagtttgctgagaatgatggtttccagcttcatccatgtccctacaaaggacatgaactcatccttttttatggctgcatagtattccatggtgtatatgtgccatgttttcttaatccagtctatcattgttggacatttggtttggttccaagtctttgctattgtgaatagtgcctcaataaacatacatgtgcatgtgtctttataacagcatgatttataatcctttgggtatatacccagtaatgggatggctgggtcaaatggtatttctagttctagatccctgaggaatcaccacactgttttatttctttctcctgcctgccagctcctcctggtacctctgatagaattcagctgtgaatatgtctggtctgtggcttttcttgcttggtacactattaattattgcctcaatttcagagcctgttattggtctattcagggattcaacttcttcctggtttagtcttgggaggttgtatgtgtccaggaatttttctatttcttctagattttctaatttatttgtgtagaagtgtttatagtattctctgatggtagtttgtatttccgtgggattggtggtgataccccctttatcattcttattacatctatttgattcttctctcttttcttccttattagtctgctagtggtctatcaattttgttgatcttttcaaaaaaccaattcctagattcattgattttttgaagtttttttttttgtgtctctgtcgccttcagttctggtctgatcttagttatttcttgcgttctgctagcttttgaatgtgtttgctctggcttctccagttcttttaattgtgatgttagggtgtcgattttcagtctttcctgctttctcttgtgggcatttagtgctataaatttccctctacacactgctttgaatgtgtcccagagattctggtatgttgtgtctttgttctcgttggtttcaaagaacatctttatttctgccttcatttcattatgtacccagtagtcattcaggagcaggttgttcagtttccatgtagttgtgcagttttgaatgagtttcttaattctgagttccaatttgattgcactatggtctgagagagtttgttgtgatttctgttcttttacatttgctgaggagtgccttacttccaactaagtggttaattttggagtaagtgcaatgtggtgctgagaagaaagtatattctgttaattttgggtggagagttctgtatgtgtctattaagtccacttggtgcagagctgagttcaagtcctggatatccttgttaaccttctgtctcattgatctaatattgacagtggagtgttaaggtctcccattattgtctcccattattattgtttgggagtctaagtctctttgtaggtttctaaggactcgctttatggatctgggtgctcctgtattgggtgcatatatatttaggatagttagctcttgttgttgaattgatccctttaccattatgttaacggccttctttgtctcttttgatctttgttggtttaaagtctgttttagcagagactaggatagcaacccccggtttttttgctttccatttgcttggtagatcttcctccatccctttattttgagcctatgtgtgtctctgcatgtgagatgggtcctcctgaatacagcacactgatgggtcttgactctttatccaatttgccagtctgtgtcttttaattggggcttttagcccatttacattgaaggttaatattgttatgtgtgaatttgatcctgtcatcatgatgttagctggttattttgctcattagttgatgcagtttcttcatagcatcgatggtctttacaatttggcctatttttgcagtggctggtactggttgttcctttccatgtttagttcttccttcaggagctcttgtaaggcaggcctggtggtgacaaaatctctcagcatttgcttgtctgtaaaggattttatttctccttcacttatgaagcttagtttggctggatatgaaattctgggttaaaaattcttttctttaagcatgttgaatatcggccccctctctcttctggcttgtagtgtttctgctgagagatctgctgttagtctgatgggcttccctttgtgggtaacccgacctttctctctggctgcccttaccattttttccttcatttcaaccttggtgaatctgacaattatgtgtcttgggattccccttctggaggagtatctttgtggcgttctgtgtatttcctgaatttgaatgttggcctgccttgctaggttggggaagttctcctgcataatatcctgaagagtgttttccaacttggttccattctccccgtcactttccaggtacaccaatgaaacgtagatttggtcttttcacatagtcccatatttcttggagactttgttcatttctttttactcttttgtctctaaacttctcttctcacttcatttcattcatttgatcttcaatctctgataccctttcttccagttgatcgagtcagctactgaagcttgtgcattcgtcacgtatttctcatgccatggttttcagctccatcaggtcatttaagatcttctctatgctgtttattgtaattagccatttgtctaatcgtttttccaggtttttagcttctttgagatgggttcgaacaccctcctttagctcggagaagtttgttattaccaatcttctgaagcctacttctgtcaactcattaaagtcattctccatccagctttcttcctttgctggcgaggagctgcgatcctttggagaagagtcgctctgatttttaaaatttttggcttttctactctgttttctccgcatctttgtggttttatcaaactttggtctttgatgatggtgacctacagatggggttttggtgtggatgtcctttttgttgatgttgatgctagttttgttgatgctttgttagttttccttctaacattcaggaccctcagctgcaggtcttttggagtttgctggaggtctactccagacgctgtttgcctgggtgtcaccagcagaggctgcagaacaacaaatattgcagaacggcaaatgttgctgcctgatccttcctctggaaccttcatctcagaggggcacctggctgtatgacgtgtcagtcggcccctactgggaggtgtctcccactgggctactcaggggtcagggacccacttgaggaggcagtctgtccattcccagatctcagactctgtgctgggaggaccactgctctcttcaaagctgtcagacagggacgtttaagtctgcaggtttctgctgccttttgttaagttatgccctgcccccagaagtggagtctacagaggcaggcaggcctggttgagctctggtgggctccacccagtttgagctttctggccgcttcgtttacctagtcaagcctcagcaatggcagacgcccctcccccagtcttggggccgtcttgcagtttgatctcggactgctgtgctagcagtaagcaaggctccataggtgtgggaaccgccgagccaggcacgggttataatctcctggtgtgccgtttgctaagaccattggaaaagcgcagtattagggcgggagtgtcccgagtttccaggtaccatctgtcacggcttcccttggctaggaaagggaattccctgaccccttgtgcttccagggtgaggtgatgccccgccctactttggctcacactccatggcctgcacccactgtccaacaagtcccagtaagatgaacccagtaccttagttggaaatgcagaaatctcctgtcttctgcgtcactcacgcagatgcatgagctgtagactagagctgttcctcttcggccatcttgtaacgatcctgctagggttttttcaaggatagtttggcagggagagagatgacaaaggaatgagtgctgctgattggttggcggtgcaatcacagaggtgtgggaaatgatccttatgctgagtccacttctgggcgaaggccgcaggactggttggcaggtcaggtggtgccatctggttgtcagaattgcaaaagcctgaaaagacatctcaaaaggccaacctcaggatctataatagtgatattacctgcaggagtaattgaggaagttgcgaatcttgtgatttgcagaataatgactggtaattgttcacatctatgtcttagtagaattgaggctcctctcattctcccattctggtggtctttcattagttttacgaaagtagtttagtttgggggaagggctattatcatttaaactacaaactaaatttcttccaaagttagcttgacccaatcccaggaatgactaagggcatttggagggtaaaggcaagatgcaggctggttggatcagatctccttcactgtcataattttctcactgttttaagttttgcaagggtggttgcatagggtttatttctgggctctctattctagtccattggtctatatttctgtctttatgccagtaccacattgctttgattaatgtagctttgttataagttttgaaattggaaagtgtgacttacttattcttttcaagattcttttggctattcagggtgccttgagattccatgtgaattttaagatgtattattattctgttactgcaaaaaacatcattgggattttgatagagattgcattgactctgtagatcttctttagtagttttgacatttagcaatattaactcttccaatccataaatatggaattttgttccatttatctttgtggtctttaatttctttcaccagtgtttcatagtttttagtgtatatggtttttgcctccttggttaagtttatttatgattttttatgctggtaggttttattttttaaattttgggggaagtgttttattaatacaaatgtatgggttacaagtgcaattttgttacatgtatagattgtatagtggtgatgtcaggacttttatggtatccatcactcaaataacttccattgtacccattaagtacaccccactcccacctgttaagttttaataagttggtttagtctctgttctgtctctgaaaaatgtcagatactactaacagaactaaaaaatccaggactgagagaaactttaagtacatacaacaatataaacagatcttaaaaatatgatacagcatagaaaaatggaaaccaaaacatattccacaatgtcattcagtacttttaaattactacacagaaagtgttatacatttcacaaaaatgtataagaatagcacacacaaattatcaacaaaataatacagggttttctgaattgtctacctgtgagatgtttctaagcagggttttattattgattgattgattgagacagggtctgactctgtcgcccagattggagtacagtggtgcaatcctggcttgacctcctggctcaagtaatccttccacctcagcatcccaagcagctgggactataggttcacacaaccatgcctggctacttctttaaaaaaatttttgtagagagtctcactacactgctcaggtggtctcaagctcttgggctcaagcaattctgacacctcagcctcccaaagtgcagggattacgggtgtgagccgttgcacctggactaagcagggttttaagtgacttggttcttgtttatgttgacactaaacatgcatcaaagattaaccttctaaattctggaacacagaaagaagggcagcccttatttcagggctgggctgatgatagaatttacttgatgcagtttttcatagaaagatatgtgtctttttgttttaaacatataagaaaagagtttccactgtttacctggtactaggtcccaatgtctaaaccaagtttggagaatcacatcctctgagcagcctatgttgatgatgatgctgatgacaatgatgacagaagacacttatatggtacttatttatgtagcagaaccatagtcctttatatgttttaactcatttaatattcaaaacaaccctatgacatggtacattgatgttgttatacccatttatatgtgtggaaatggtcatacagtgtcttattaatttgcctgaggccacacagctaattagtggtggatctgaggttggatttctaggagccagattcacaaatccaacactgcactttgctttttctctattgtctatcgctcattgatttttttattctcaattttatttccttcctttatttttggtttaattttctcttctttttttagtttcttgagatgaaaacttagatctttgatttttctacctctcttcttttcaatatttattatgcttaaagctttacacttcaccctaggcattgtttttgttgcatcccacatattttgatgctgtatttttatattcagaatattttctaatttatatttatttgttcattttaaaaataattttactaaataatataaaatgctaattttgaaatacttaggattttcttacatttggttttgatttctaatttaattctatgtggttttaaaatatagtttcactcaattgaaatttattgatttactttatattcctgcatatggttgatactggtgcatgttgcatgtacacttaaataacatttattctgcgattgttggatacagtgttctatatttgtcaattagattgagtgctgctcagatgttctatattcctacagatatttcatgtgcttattctataaaatacaaattgttaatgtttctgattaggactagaagacttttcttttaccttttaaatatattttttattttatgtattttgaaactatgttatttggtgcctatacacttagatttttttcttgaggaattgatcctttatcattatgaaatatccttcaggcaccccgctcccacagatgtatgcatcttgctgtacccctgcttctgctggcacaaatgcacaggcatggatcctgctgccaccaccttgatgaagtgtgtggccagcacccccatcagagtactgttaccagcatactgggaataccttgcccccagagtgcagcagctttctaacctctatggggcagagaacaaagttggggggcccagtaccagcccatcagcgttacatcacatagcccatgagtgatgagctgagccttggtgccctgaaagcatccagaatgaagccagtcaactgaaccgacattataccacaatcaaaccctcaagaatatcaaagaatataaaagtaaaaagccctatccaaaggatagcaacttcaaagattaaaggaatgtcagcccacacagatgagaaagaatcaatgcaagaactctggcaattcaaaaaactagagtgccttcttacctccagacaaccccactggttccctagcaatggttcttaacaaaactgaaatgacagagatagaattgagaatctggatagaaaaaagatcattgagattcaggagaaagttgaaacccaatccaaggaatctaaggaatccaataaaacaatacaagagatgaaacgaaatagccattttaagaaagaaccaaactgaactgatagagctgaaaaactcactacaagaatttcataatgcaatcacaagcattgttaacatcagaatagactactaacatcagaatagaccaagctgaggaaagaatctcagagcttgaagactggttcctcaaatcaactcagacaaaaataatgaacaaataattaaaaagagtgaacaaaaccactgagaaatatgagattaggtagagaccaaatctgtgactcattgacatccctgaaagagagagagaaaaagcaatttttccagccttgctagagaggccaaaattcaaattcaggaaatgcagaaaacccctgtgagatactatacaagacaaccatccccaagacatgtaggcatcagattctccaacgtcaacatcaaagaaaaaatactaaggcagctagagaaaaggggcaggtcacctacaaagggattccgatgaggctaacagaagacctttcagcaaaagcactacaagccaggagagatttggagacctatgttcagcaaaaaaaattccaaccaagtatttcctgtgcagcaagactaagcttaataagcaaaggagaaacaagatccttttcagacaagcaaatgctaagagaattcattaccaccagacatgccttacaagaggtccttaagtgagtgccaaatatggaaacaaaagactgttactggccaccacaaaaatatacttaaggactagacctctgaacactataaagcaattacgctatcaagtctgcataatatccagctgacatcatgatgacaggatcaaatcaacacatataagtattatccttaaaagtaaacatgcaaaatgcctgacttaaaaagtacagaatggcaaatttgataaagaaataagacacatggagagttgctccaaatggcaggataggaacagttctggtctacagctcccagcaagatcaatgcagaagacaggtaatttctgcatttccaactgaggtacctggttcatctcattgggattggttggacagtgggtgcagcccatggagggcaagccgaagcagggcggggcatccctcaccgaggaagtgcaaggggtcaggggatttccctttcctatccaagggaagccatgagtgactgtacctagaggaaaagtacactcctgctcaaatactgcacttttcccacggtattcgcaacaggcagaccggaagattccctcccatgcctgctcggtgggtcccacgctcatggtgccttgctcactgctagcacagcagtctgagatcgacctgggatgctggagcttggtgggtggggagcggcgtccaccattgctgaggcttgagtaagcggttctatgctcacagcgtaaacaaagcagcagggaagcttgaactggacggagcccactgcagctcagcaaggcctactgcctctgtagattctacctcgggggcagggcatatctgaaaaaaatgccgcagacagcttctgcagacttaaacatccctgcctgacagctctgaagaaagcagtggttctcccagcacgggggcgttcaagctctgataacggacagactacctcctcaagtgggtccctgacccctgtgtagcctgattgggggatacctcccagtaggggccaacagacatctcatacaggcgggtgcccctctaggacgaagcttccagaggaaggatcaggcagcaatatctgctgttctgcagcctccattggtgataccgaggcaaacggtctggagtggaactccagcaaactccaacagacctgcagctgaggggactgtctgttagaaggaaaactaacaaagaggaatagcatcaacatcagcaaaaaggacatccacacgaaaaccccatccgtaggtcaccaacatcaaagaccaaaggtagataaaaccacaaagatggggagaaaccagagaagaaaggctgaaaattccaaaaccagaacgcctttcttctccaaggatcacaactcctcgccagcaagggaacaaaactggacagagaatgaatttgatgagttgacagaagtaggcttcagaaggtcggtaataacaaacttctccaagctaaaggagcatgttctaaccaatcgcgaggaagctaaaaaccttgaaaaaatgctagatgaatggctaactagaatacaataaccagtgtagagaagaatataaatgacatgatagagcttaaaaccatagtacaagaactttatgaaacatacacaagcttcaatagctgattcaatcaagcgaaagaaaggatatcagtgattgaagatcaaattaatgaaataaagcaagaagacaagattagagaaaaaagagtgaaaagaaacgaataaagcctccaagaaatacgggactatgtgaaaagaccaaatctacgtttgattggtgtacctgaaagtgacagggagaatggaaccaggttataaaacactcttcaggatattatgcaggagaacttccccaacctagcaaggcaggccaacattcaaattcaggaaatacagagaacaccacaaagatactcctcgagaagagcaaccccaagacacataattgtcagattcaccaaggttgaaatgaaggaaaaaatgttaagggcagccagagagaaaggtcgggttacccacaaagggaagcccatcagactaacagcagatctctcagcagaaacactacaagccagaagagagtgggggccgatattcaacatgcttaaagaaaagaattttcaacccagaatgtcatatccagccaaactaagcttcataagtgaaggagagataaaatcctttatagacaagcaaatgctgagagattttgtcaccacgacgcctgctttacaagagctcctgaaggaagcaagaaacgtggaaaggaacaaccggtaccaaccactgcaaagacatgacaaattgtaaagaccatcgatgctatgaagaaactgcatcaattgatgggcaaaataaccagctaacatcataatgacaggatcaaattcacacataacaatattaaccttcaatgtaagtgggctaaatgccccaattaaaagacacagactggcaaattggataaagagtcaagacccttgactgtattcaggagacctatctcacatgcaaagacacacataggctcaaataaagtgatggaagaagatctaccaagcaaatggaaagcaaaaaaaagggtttgccatcctggtctctgatgaaacagactttaaagcaacaaagatcaaaagagacaaagaaggccgttaacataatggtaaagggatcaattcaacaagaagagctaactatcctaaatatatatgcacccaatacaggagcacccagattcataaagcaagttcttagagactaagtctacaaagagacttagactcccacacaataataatgggagactttaacaccccactgtcaatattagatggatcaacgagacagaaagttaacaaggatatccaggacttgaactcagctctagagcaagcagaactaatagacatctacagaactcttcttcccaaatcaacagaatatacattctcctcagccccacatcacacttattctaaaattgaccacataattggaagcaaaacactgctcagcaaatataaaagaacagaaattacatcaaactgtctctcagaccgcaatgcaatcaaattagaactcaggattaagaaactcactcaaaactgcacaactgcatggaaactgaacaacctgctcctgaatgactactgggtaaataacgaaatgaaggcataaataacaatgttctgtgaagccaataagaacaaagatacaacgttcaagaatctctgagaaacatttaaagcagtgtgtagagagaaatttacagcactaagtgtccacaggagaaaacaggaaagatctaaaatcgacaccctaacattgcaattataaaagaactacagaagcaagagcaaatgaattcaaaagctagcagaagacaagaaataaatcagagcagaactaaaggagagagagacacaaaaaacccttaaaaaaaatcaatgaacccaggagctggttttctgaaaagagcaacaaaataattacatgacaagcaagactaataaggaagaaaagagagaagaatcaaatagacgcaataaaaaatgataaaggggatatcaccaccgatcccacggaaatacaaactatcatcagacaatactataaacacctctacgcaaataaaatagaaaatctagaagaaatggaaaaattccttgacacatacaccctcccaagactaaaccaggaagaagttgaatctctaaatagttcagtgacagcttctgaaattgaggcaataattaatagccaaccaaccaaaaaaagtccaggaccagacagactcacagccaaattctaccaggggcacaaagaggagctagtaccattccttctgaaactattccaatcaatagaaaaagagggaatcttccctaactcattttataaggccaacatcatcctgataacaaagcctcacagagacacaacaaaaaaagataattttaggccaacatccctgatgaacatcgatatgaaaattttcaaaaaaaaatactggcaaaccgaatccagcagcccatcaaaaagcttatccactacgatcaagtcgacttcatccctgggatggaaggctggttcaacataggcaaatcaataaatgtaatccatcacataaacagaaccaacgacaaaaaccacatgattatctcaatacatgcagcaaaggccttcaacaaaattcaacagcctttcatgctaaaaactctcaataaactaggtattgatagaatgtatctcaaaacagtaagagttatttatgacacacccacagccaatatactgaatgggcaaaaactggaagcattccctttgaaaactggcacaagacaaggatgctctctctcaccactcctattcaacatcgtgttggaagttctggccagggcaataaggcaagagaaataaataaatggtattcaattaggaaaagaggaagtcaaatagtctgtttgtagatgacatgattatatatgtagaaaacctcatcgtctcagctccaaatctccttaagctgataaacaacttcagcaaagtatcaggatacaaaatcaatgtacaaaaatcacaagcattcctatccaccaagaacagacaaacagagagccaaatcatgagtgaactcccattcccaactgcctcaaagagaataaaatacctaggaatccaacttacaagggatgtgaaggacctcttcaaggagaactacaaaccactgctcaatgaaataaaagaggatacaaacaaatggaagaacattccatgctcatggatagggagaatcactatcatgaaaatggccatactgcccaaggtaatttaaagattcaatgctatccctatcaagctatcactgacttcacagaattggaaaaaaactactttaaagctcatatggaaccaaaaaagagcccacatagccaagacaatcctgggcaaaaagaacaaagctggaggcatcacactacctgacttcaaactacactacaaggctacagtaaccaaaacagcatgttactggtaccaaaacagacatgtagaccaacggaatagaacagaggcctcagaaataacaccacacatctacaaccatctgatatttgacaaacctgacaaaaacaaatcgggaaaggattccctatttaataaatggtgctgggaaaacaggctagccatatgtagaaagctgaaactggatcccttccttacaccttatacaaaaattaactcaagatggataaaagacttgaatgtaatacctaaaaccataaaaaccctacaaaaaaacctaggcaatacccttcagtgcataggcatgggcaaagactttatgactaaaacaccaaaagcagtggcaacaaaagccaaaattgacaaatggcatctaattaaactaaacagcttctgcacagcaaaataaactaccatcagagtgaataggcaacctacagaatgggagaaaaatttttcaatctatccatctgacaaagggctaatattcagaatgtacaaagaacctaaacaaatttacaagaaaaaaaaaaccactgcatcaaaaagtgggcaaaggatatgaacagacacttctcaaaagaagacagttatgcagccaacagacatatgaaaaaatgtccatcatcactggtcatcagagaaatgcaagtcaaaaccacaatgagataccatctcatgccagttagaatggcgatcattaaaaagccaggaaaccacagatgctggagaggatgtggagaaataggaacacttttacactgttggtgggagtgtaaattagtgcaaccattgtggaagacagtgtggcgattcctcaaggatctacaactataaataccatttgacccagcaatcccatttgtgggtatatacccaaaggattataaagcattctactataaggacacatgcacacatatgtttattgcagcactatttacaatagcaaagacttggaaccaacccagatgtccatcaataatagactggatatatagtattctatgtctggttaaaaaaaaagttattcaattttatggatttggattaggatcattcccatttctgtaaatatttacacctataaggatatcaagaaggaatgtcaggcagtttactagtaacttttcaaagtcttagaaaagttgcattttttgctggcaccaagaggggaaaacatcataaaaatagtttcaaaatctacaatcaatgctttctccaaaataaatgtctttgttaaaaaaaataataataatagactggataaagaaaatgtggcacatatataccatggaatactatgcagccataaaaaaggatgagttcatatcctttgtaggtacatggatgaagctggaaatcatcgttctcagcaaactatcacaaggacagaaaaccaaacaccgcatgttctcactcataagtgggagctgaactatgggaacacgtggacacagagaggggaacatcacacaccggggcctgtcagagggtgggggactgggggagaggtagtgttaggagaaatacctaatgtaaatgacgagttgatgggtgcagcataccagcatggcacatgtataaccacgtaacaaacctgcatgttgtgcacatgtacccttgaatttaaagtataatttaaaaaaagaagaagaaataagtcacaattgtatgctgtcttcaagagacccatctcatgcagagctacccataggctcaaaataaaggtttaaagaaaaatctaccaagtaaatgggaaaagaaaacaggagttactattctaattttagacaaagcagactttaaagcaacaatgatcaaaaaagacaagcgcatgacataatcataaagggttcaattcaacaagaagacttaaatatcctaaatatatgtacccaacacaggagcttgcagattcatagaacaaattcttagagacctacaaagagacatggataaccacacggtaatattgggagacttcagcaccccactaacagtattcaatcatcaaggcagaacactaacaaagatacttgggacctgaactcagtatttgactaaatggacccaacagacatctacagaactctgcactccaaaacaacagaatatacattcttctcatcgccacatggcacatactctaaagtcgaccacacaatcggccataagtcaattcttagcaaattaaaaacacaagaatcacactaaccacactcttggaccatggcgcaacaaaagtagaaatcagccccaagaagatcattcaaaacatacagctacatgcaaatcaaacaacctgctcctgaatgacttttgggtaaacaatgaaattaaggcagaaatcaagacattttttgaaactattgaaaataaagataaaatatacgaaaatatctgagacacagctaaaataaagataaaatataccaaaatctctgcgacacagctaaagcagtattaagagggaagtttatagcactaaacacccctatcaaaaagttagaaagatctcaaattaacagcctaacattgcacctagaggaactagaaaaacaagagcaaaccaactgcaaagctagcagaagaaaagaaccaaaacaagaactgaactgaatgaaattgagacaggaaaatgatataaaagaccagtgaaaccagaagctggttctttgaaacaataaataagatggatagaccactgattatactaatcaaaaaacagagcagatccaaataaacttaatcagaaatgacaaagaggacattaccatcaacccaacagaaatataaaaaaccttaaaagactattacaaacacctctatgcagacaaactaaaaaacctacaagaaacgataaattcttggaaacatacagtctcccaagactgaacaaggaagaaattgaaaccctgaacagaccaataacaagttccaaaattgaatcagtagtaaaaagcctaccaaccaaaaaagccctggaccagatggatccacaaccaaattctgccagatgtataaagaagagctggtaccattcctactgaaactattccaaaaaattaaggaggagggacccctccctaactcattctataaggccagcatcatcctgatataaggccagcatcatcctgatataaggccagcttcatcctgataacgaaaactgggagagacaacataaaaagaaaacctcaagtcaatatcctggacaaacatagatgcaaaaattctcaataaaatactagcaatctgaattcagcagcacatcaaaaaactaatccaccatgatccaagtaggctttatacttggcatgtgagattggttcaccatatacaaatcaataaatatgattcatcacatgaacagaactaaaaagaaaaaccaaatgataatctcaatagatgcagatacatctattgaatgcaaaattcagtaccccttcatgttagaaaccctcaacaaactaggcatcaaaggaacatacctcaaaataataagagctatctgtgaaaaaatcacagccagcatcatactgaaagagcaaaagctggaagcattccccttgtggaataagacaaggatgcccactatcaccactcatattcaatatactactggaagtcctaggcagagcagtcaagcaagacaaataaagaaaaggcatccaaataggaagagaggaagtcagacaatatgattttatacctagaaaattccatagtgtctgcccaaaagctcctagatctgacaaacaacttcagcaaagttgcagtgtacaaaatcactgtgcaaaaataagttgcattcctttacactaacaacatccaagctgagagccaatcaaggacacaatcccattcataatagccacacaaaaaataaaatacctacgcatacagctaaccagagaggcaaaatatttctagattgagaattacaaaacagtgctgaaagaaatcagacaacacaaacaaacgagaaaacattcattccatgctcgtggataggaagaatcaatgttgttaaagtggccatactgcccaaagcaatttacagattcaatgctattcctttcaaactaccagtgatatttttcacagaattagaaaaaactattctaaaattcaggtggaaccaaaaaagagcctgaatagccaaatcaatcctgagcaaaaagaacaaaactggaggcatcacattaccaaaattcaaactgtactgcaagcttacagtaacaaaaacagcatggtacttgtacaaaaacagacacataaaccaatggaatagagagcccagaaataaagctgtgtactcagaaccatctgatctttgacaaaattgacaaaaacaaacaatggggaaaggacctgctagtcaataagtgattcgggatggatcgctacccatatgcagaagattaaaactagaccacttcctatcaccatatataaaatcaactcaagatgtattaaagacttaactgtaaaaactataaaaccctagaggaaaacctaggaaataccattctggacatagtccctggcaaagatttcatgatgaagatgccaaaagcaattgcaacaaaaaaacggcaagtgggacctaattaaagatcttctgcacaacaaaaagaaactatcaagagagtaaacagacaacctatagaatgggagaaagtatttgtaaagtatgcatctgacaaaggtctaatatccagaatctataaggaacttaaacaagtttacaagaaaaaaaaatttttaaagtagctaaagtaaatgaacagacacttttcaaaagatgacatacatgtgaccaacaagcatatgaaaaaatgcccaacatcactaatcattagagaaatacaaattaaaaccacagtgagataccatctcacaccagtcagaatgggtattattaaaaagttataaaatagcagatgttgacgaggttatggagaaaagggaatgcctatacgctgctggtggaaatgtaaattagttcagccattgtggaaaacagggtggcaatttctcaaagtacttaaaacagaactaccattttacccagccatccacttattgggtatatgcccaaaggaatagaaatcattctaccataaagacacatgcacacacacgttcatcgcagcactattcacagtaggaaagacatggaaccaacttaaatttccatcactggtagattggataaagaaaatgtggtacatatacaccatgtaatactacgtaaccataaaaaaagaataagatgatgtcctttgcagcaacatggatagtgctggaggtcaatactctaagcgaactaatgtaggaacagaaaaccaaatgctgcatgttctaacttataagtggaagctaaacattgagaacacatggatacaaagaagggaataatggacactggacctacttgagggtggagggtaggaggaggatgaggagagaaaaaatgacctaatatgcttattacctgggtgatgaaaatctgtacaccaaacccccacaacatgcaatttattgataacaaacctgcacatggacccctgaacctaaaataaagtcttaaaaaaagaagaggggccgggcacagtggctcacgcctgtaatcccagcactttggaaggctgaggcgggtggatcaggaggtcaggagattgagaccatcctggccaacacggtgaaaccccatctctactaaaaatacaaaaaattagccgggtgtggtggtgggcttttgcagtcccagctactcgggagactgaggcaggagaatggcatgaactcgggaggtggagcttgcagtgagctgagatcatgccactgcactccagcctgggcaacaaagcaagactccgtctcaaaaacaaaagaaaaacaaaaaaacaaagaggaggaagaggaaaataaggcccatggtgcttaaagtcacacatgtgccaaagccagctagtaaacaaagcaaagatctgaattcagatatttgtttaactgctgtggttctaattatatcacgcaccttggactcaaagcaggatagagaaggttgggcagtggatcacaaaagatatcagcataaatacacatcatttattctgtattatctgatgccaagcagtgtgctaagcactttacatacatcatcttatttgtacatcccaattaccttctgatacagctgtcaattcccacttttatcaggaaactgaggatcaaagagggtaagtaatacatccagagttacaaagctgttaaaaatattagagggtctgactccagtgtatatatttttaaaagccccttattatctctggtaatcactgtcttgaaaactactttgtctgatattaataaagccacagtagctttcatacaccttcttgtttacatatgatttcccatattcttttatcccatctatgttattaaaatgtgtcttgtcaatagtatatagtttgttcttgtttctttattcattttgttttcctgatactcttttcccaattaaggaggtaataatctgtaagcaaagccttatttacataaacactgctgtgatcttataccaaataaacagccctagcatgtgtgtgtgtgtgtgagagagagagagtgtgtgaatgtgtgtgtgtttgggctttctgaattagattttctttcaagatccacctacatctttacttttggcctaagtaatggttggtcatgttaactgtgtaaaatattaatctttttctgaagctacaaagagtccatgtctacttactgttctaggaaaagttttttcaaatttgggaagtgtctaccttttaaaatattttctgagagtgtttaattacttctatgatcttaaaaggttctctccattttacttttatccagctgtcacatattctgagtatgttttccaccaggagaacctgagaatttttttttctcttagattttgagtatagagataagattttatcctgcatccagttccaacctgttaatataattctatgcaagtttcctctcttgttgtgtttatttccctttatccttatccttagtcatctattccaatgtttatgctgtgcattattatattttcatgtatccttgtgaaatgtagagtgctttatgtgcaatattttaaatgtacataaatggcattatagattaaaacattttttcatgttgtaccatgtttttgaggtttatttatattgctatgtatacctctagtctactgcttctaactgtgaaacatttttttcaaattcaaattctcataaatgctgtacttattttggaaattagaattcagcacaaggtacttctctgtattcaacaccatagcattttagcgctttactaatgggtggaaaaattaaacttcagtcctactgttcaaagagcctatttagtcaaagatggccaagatggaaagcttccactttcctgtgagtcaggtcctagtaaatgtgaatcttacacagagatgattagttatagctcctagcactaactccctggaggcaatgtccttggtgcccctgactctcttccatttaggcactcatctttgttagatgccttaggtttatttacgtaaaatcatgctgcacttctccctgatactgtggttaaagtttttatggccttgcaccaaaccaacagcccagaatagctacatgccagggagatattgtcagcaaggtttgggcattaatatgaagaatcttgtatattgttgaaacttctggtccaacagaatggaaagtgtgccaaataggaagcttttgggtacaggtgacaaaaaccccaactcaaactggcttcaacgctaagcacatatattatctcactatattagcagaataactaaatattggcagctgcagaggcaaaccctgactactgagaggcttgatacagtaaaagcttattgcttggtctcacaaagtttgccaggggttggtgactctcctgggcagttagtgactcagatatgtcgctttataagcaacacatgacttgtaaagtcacccctgcaagggaagaggactggtggatcacatagattgtttttaaggaccaggctggaaattgacttatatgaattttgcccatgctccagtgtgcataaatccgtcatcagtcatatgaccccatcctaactgcaaaggatgcagaaacatggagtcttcctgtgaacttaggaagaggaaaagtgttgagcaagaagccacattccataacaggaagtccagatatacagcaggttttagggatggatgacttagtgactcagtggtgtcatcaccgtcctgaagtctttccaatgctctccaccctgccgtcctcacaatgtcagctttgtcttcaggctggttctcttcctggttgcaaggtggctgctgtagttcagccatcacaaccagacatggcaatgtgctgggacagaaagggaccatccttaggagtgagggcacttttcccagaagcagcccagcacacttcctctgatggccaggactgccaggcccaaactaatcactgacaactcaagatttatccctggcattgagagaccatcaccctcttggcagtcatgtgggggaagggctggttaccatttgaaccaaaatgaagcttagccaataaggaagagaagaaagtagatgttgagtaggcaacgaacagtatctgctatagcccatccctggactcgctgaggtttcatggtaaagtttgtggttttcatcatgttcctgcaccattctcagtaagttgatgcctagcattgcatattttcttttgctattgtaatgctgtttccatgatagttgcttgtgtataggattgtcattgatttttcactcacctttgttcagttttcttttatctatgtgtctgtgtaattgccttaaattcttttttcaagcagtattagatgttaattagagactgagaaacccagaggtggaaggatcttaagtggagcaggggatcggattaaagaataagaaagcaaagaatactgtatttcatttctgtgaaaagagaggttacatttccttgcatgaggaaaaagtaggagtgtgtgcttttctcaaaacttgctataaggctgggtgcagtggctcatgcctataatcagcactttaggtggccaaggcaggaggattgcttgagcccaggagtttgagaccagcctgggaaatctagtaaagccctgtatctacaaaaaataaaaaattagctgagagtggtggtgcacgcctgcagtccccagctagctgggaggctgaggcaggaggattgcttgagcccaggaggaggtcaagcttgcagtgagctgtgatcatgccactgaactccagtctgggtgacagagtgagactctgtcttaaaaaaaaattgctatgagagaatgctctaggtatgtgtgtggtcgtggtagagtataggggtgtacgatcactgtaatgtgctggaatagtacctaattttgaaactgcatggttaataacatcttttaagaatgtctaagtgctttagagacttcttttcccccattctccgtgagaagaataggagatagatcgttggttttcgtgtggaaaaattaagaaagagaaatgaagcagtttaaatttcctcacattatcatggtattaagtaaactagagcagaggtctttgggttagaactcatttgggaaaatagattgagtgtggccaaggcaaccattcctgtagtgaactcagctcccttttatgtagtgaagataaatagttgaacaatccaatacatgccccagtccctctctctctacacacactgcacacacacacacatacacacacacacacacacagtgccaggagacattccgggaccatatttttttaagaagaaaaagtattattatgctttcaagtcagttatgttaatttattccttttttgagatgtagagtagctcctttgtatctgagtttgcctattacatgaaaagactagtggataatgataccagctatcctatgttacaaaaagctgcagatccccatgccaagtggactatacagctacacaaaccttctgttacctgttggacacactgccacagaggcgagcaacatgctgtctgccattaaagaactcgggacccttgaaacccattttggggaatatatgtagcaaataatccaattttaaaaggggcaaaaacgtaggttatcggagtacattagacatgctaatctgcagcagttttgtgcaaacctaagtataatttaattttgtattaagttttccttttgatatccagataaagattaacatagtcattggcaattatatttgtattttcaataaacatcacattttactgaagtatacagatctatgcaagggatagtgaaatagacaaagctcatttgacttttccagaaggaatgcattttaacattggtggctcctgtggttagggggacttccaaagcagtaactcttgcgtttcctcagcagcatcatcataattacaccactatacacaataattatactcctagctgtggttctattctacagcagttgctgctttcctggaaaccttggggaaaatagaaatttaaatagctcatagatttggctatgataagttcacacaaagacaaaattgcatttggcagtttagtttccccaacctttatttgtttcctgataactatatttagtctgaacctctttgtcaaggacaccacataggttatattgtcttcctctttgcatccaatgaagcagcatatattgccaggtcatttttttttatggtgatgccaaacttgaccacttggccaagggagtgactgccatacctcttattgtgaaggcacattttcctcctgtaattaacaagtaaccccaggggtgataccttgagacaatgagaatattttgttttccaataacttttacccaagaatagctacacacaccccctgtaattatagacttatgggtcagtttttctcaccatgtgttttaatccatcgatgtcattctttctgatatttaaaatcgttcacagattggccaggaacccttcagaccagcttctgtcttcattgaacttgtccttgtttagctttgagcacttcttggcgtttttggcccaagatatcttaggcttatctcgtactttcagtactctggacgtgtgtcagacctgaaatcagcctcttctccaaggagacctgtttccctttagtggaaaataatatttacaaaccaagagttgggtgtttgtgttttactgctactggggtgttaatttttctaggctctttaatcgtgagttcatattgaaaccacctaattattttgtttttattttgaattacctttcttgaggtatagtttacctaaacgaaagtgtactcatttgaagtgctgagtttgcttcatgttagcaaattcatataccctgaactgtcaccctgtcacctatgaccttttgcagtcagccctctttcagcctctgacctgctttgtgtcactgtagattagtgtacctattctagaatttcatgtaagtggaataacactatatgaggccttttctctggctacttttactcagcattatgttttggaaattggtacatggtattatgcataccaattattcattactgtctcttactgaatagcagtccattgtatgtatgttttgcttatctatttgtttatctatttacaagttgatgaacatttggaccatttccagcttatggatattatgagtgaagctgtttgaacattcaggcacaaggttttgtatggacatgagctttcatttctctgcagtaaatacctaggaaaggaattgctgtgtcatgttttttaactttataggaaactaccaattttttttcccaagtagttgttaccattttttactaccaccaagaatgtatatgagacctaattattccacattgtcatcagctcttggtattgccaatcttttcattttagccattctggtgggtcagtagtggctttaatttctgttttttaattttgtttaatttctgaaattttaattttattgtggttttaatttccatttctgtaatgggtgatgacacagagcatctttttgtgtgataattggtcattcatatatcttgatgaaatgtccattcatatctttcactgacttttttaattgggttgtcttttttcttgagctatgaagttctatgcattctgaatactagtgttttgtcagatgtatgtattaggatatgttctcccagtctacagattactttaaaaattttcctaatagtatcttttggagagtagaaaattttaattttgatgaagtccaatttatagatttatttaaggttcctattatttatgtcgtgtttaaggaagttttgcctaccctaagacctcaaagattttctcctgtattttcttctagaagtttgtaaacttaaaaactttagcttttgtgtttgggttcatggtcccattttaatttaatttttatgaattttgtgagatataggtgttgttctttttctttcttttttaattttttagttaataaaaatggtatatatttatattgtataacatgatgatttgatacatgtatacattgtggaatacatattacctcacatggttatcatttttttgtgataagaacacttaaaaatctgtctcagcaatttttaactatataatatattaactatagtcaccatgatatacaatagatctcttgaacttattccttctaagtaaaaatttgtcctttgaccaccagcccccctgccacccctcactccctgtccaacctctgataccaccattttactttctgtttctatgagtttgactttttaagattccatttatcagtgagaccattggtatttgtgtttcttagcctggtgaattttacttagcataatgtcttcccagtttttttatgttgttgcaaattacaggatttccttcttttctaaggcagaatagtaccctattgtgtttatgtgtatatatatatatgtgtgtgtgtgtgtgtgtgtgtgtgtgtatatatatatatatatatcccattttcttaatccattcatctgttgataggcacttaggttgattttgtatcttggctattgtgaatagtgctgcaataaacatgggcattctctttgacatactgatttcatatcctttggatatatatgttcaataatggaattgctgcatcatttggtagctctatttttaatattttgaagagcctccatactgttctctacaatggctatgccaatttacatttctaccaaccatgtacaagggtccctctttctccacatctactttttttttttagcatggatgtccattcattccagccctgattgctgaagagactgtccttttcccccattgaactgccttggcatcttagccagaaatcgactgactatatgtaggaggaactatttctaaattctctagtctcttccatttatctatatatttatccttacactaatgccacattgtcttgatttatatagctttataataagcagagcccagtcaggcccctcctagacagtccataccagaattcacaaatacatatgacctaaagcaagtaacataattaagtgaagctgttcttgtataagcagtattactttatttatattaaaatctaacgggctaaaatttcaacgtggttcattttcatttattaatgttttgagtcatgtccctttctcacatgtctcatggttcttattatggtttatttctaatgatatctttatacacatacttttcacactaaatatttaggaacattccctgttttcatacatagaacaatactgcctccatacatttttgaaatgcgtggcccatttgatctgtttttcagtttcccacttcaaagagaggaatacagtatctcccatgacagcatcagctggttaatgaatggtgattggcatgcagactcagcattgagactgcagtggggaatgatggggacactgtggcaaacgggggagggctggcactgctgagaggggcacagccactctacgccactttcataacatcatgtcaaatgtacacaaattcaccattatttattttgttgctcaaattattccagctttgtccactaggagctgtttcaattggctatgtccctttgacacacacaccaatgtgggtttgttcggttttttgtcttatttgaatgcttctttcctttctggctcctccaggcttatcttgtgtatttcccatcccagtcctagaatcagccatttctctaagaatccctggtttcttttataagagaatggcattagaaaatgccacagaggttaagtgtcattcccatcacatcatagcaagggtacatactatcaacacgatttatgactatcgatgttacccttaatcatctagccaagatggatggtgaaatcattaggagggggatgcaataaagaggaagaaaagcagactttatgttcattttcaagcttgttccaaaggaaagttataggtgtatttgatcatataaatatcgttttgttttggaaaatcacgtttagggacaataaaattggaaagaatccttgcttccaaatcacctctgtgttcaaatcttcatcatatttgcactgccctttcctttgtgttcttagttcatgggtcccattggatttgatgggtttcgtttactttttgctactgaaattgttagtttaaaaaaacaggatacagagtgtcacattttttattgtaactccactttcttgaagttgcctatagcattttaaatttcagaagatcgataactttattcatttccctttggaaaaaataaaacaagattttaactagtggcatgtcttcaaggaagctaaagacatttaactttttctgttttgctctaagggcattctgatgattgcctgaatgtgatcttctgagtgttccagtccctggagctggctgttagccatctcccaaggagggtcgaaaagaacgtagcagaaagctgcagaaagaaaagctggctaaagaaacaggagctgccagccagggcaacatagtgagaccccaactctatagaaaatttaaaaagctgtcctggcatggcatgcctgtaatcttagctactcagaaggctgaggtgggaggatcacttgatcccaggagttgggggctgcagtgagtacttccagcctgggtgacagaggagaccctgactcaaaaaaaaaaaaaagagccggttgttgttaagggccaccagactggagtgcatggtagtcacctgcctccctcctttcctggagaagatgacaacgtgatgaacaagcaccactaccctggaatagtttaaatggcattcagcctggaggagtgtgcacatgcaccaaatatatcttgtgtgtcctttgtagccattgggtctatggagattactctggctgtgagtttggttgattaacattgctatgcaagccctgtccatttagctggaggttatcacaggaggaataaaccacagaatatgactttggcattgaataaatgggaagagagtgcttttgggggccagaactgtttgtaatattataactcctataaatacatgaattgctgcccctttatcataatatccattgctttaatgctctgttttagattggagttcacaccagacacctgagattgtgtttgttatgtaactgctatttcatgttgagaaagtagcaaagcttttaaatactgagaatattttagttacatgaagatacttttagtagtcactgttgttgttacattccccctacccctcagaaaataacagggctgttaaggaatcctcaaagagcatagattgagtgaaaatgacacagaacaaaggacagatcccaggagtgaaatgaagaagttctgtaaatagctgtgccgttttcctttgaaatgtctggcacactctatatagtacagtggtcgaggatagaggggctaattctgtgatgaagcattctgcatggaatttcagcagggcatagatggtgagggcatctggatctgtttgagtttttaaactaattatatgacaaactttttaaaatgtagcatacctggaaacatcatcccgccacgtcatctgcatttaaataatcattgcctcacctttaacacccagcctctagaaaaataaagcatgaacaaatgttagctctgagctgctctcagtaatttggagtgtgctaagcaaaacctacattttctagcatgaaattggcacaggaatgcatgcaaagttttgcttctttgattcatctggttacctagaacctgaggccattctgtattctgtggacaaaaccctatatacctttcatgacccagcttaaatgaaaagtctaatgcaaaacatgctgaatttctgtggccatatttaattgttctagtggtcccacaggtatagtttattattctttttaattccctttaatggcaatttctcttttccttttttaaaaatgtcttttgccttctgttcatttattacctgtctcccttttttattgtgagcatgtctcttgcacagcacagacacatagtgatttcttgttacatgtgggcccacatttattttttatttctatttgtttttcattcctatttatttatttatttatttatttatttattttgagccagggtcttgcttcattgtccaggccagagtgcagtggtgcaatcacatctcactgcaacctctacttcccgggctcaagcaatcctcccgcctcagcctcccaagtagctggaactacaggcacacaccaccaaccacacctggctaatgggcccatatgtaaatgactaattagtatttaaacacttgccaagagttgtttaatacctgctgtgtgcagggcacaatcttatacattcttaagggagcacagaggtgtcagatggggtctgcccaccagtttttcacagatttgaatatttagcgttctgggcaaaagcagtttaggagctgaaaaatcatggccattttaagaagattatcttacccaaaaacccacagtactattgttattgccttatatataaagccattctgttaattttttaaaagtatgtattaggtttaacctggtttctctgtgtttgccatgtttaacatctaaggccaaaaatttgaaatatttttactttctgagtatgtcaggaaagaggagtctgaagctggagtgagttggggaggtgggggggactatatttttatgaaaattttagtaaatttcctgggtttttgtcccacctatggggaagatctaggatacaaaagcattaaatgttaatattgattcaagaattaaatcatcaaaacattgctgggagaaattaaagacctaaataaatgtagagagatcatgtttatgggctagaaaactcaatattgttaagatgtcaccaaattaatatatagattcaatgcaatctctatcggaatttgctgaaattgaccaactgactctgaaattcatgtggaaataaaaaggatctataacagtcaaaacaaccttgaaaatgaaggataaagttggaggagtaatactatctgattataagacttattataaagctatggtaaatcaggatattgtggcattggtattaagatcactgaagagaccaatggaccagattagagcatccagaaataaacccatacatatatgcatagctgatttttgaaaaagttgtaatggcggctcagttgttccaggacaattagatatagttggaacaattagttatccatatacaaaaaaagaaaagaacttcaatcagttcctcataccatatataaaaattaactgaaaatggatcatagtctaaatatattacctaaaactataatacttgtagaaaggaggagaaaacccttgtaaccttgaattaggcaaatatatatatatatattttttttttttcaagcagttctcatgcctcaccctcctgaatagctgttgttacaggtgttccccaccacacctggctaatttttgtatttttagtagagacggggtttcaccatgttggccaggctggtctcgaactcctgacctcaagtgatccgcccacctcgacctcccaaagtgtgctggaattacaggcatgagccaccgtgcagagccacaaaaatattttaagtagaacatcaaaagcatgatccataaaataacaaatagatgaattggacttcattaagattaaaacttctgtttttcaaaagacactgttataagaatgaaaagatgagccacggagtgggagaaaatatttatacatcatataaaagatttgtgtgcagaatatataaataactctcaaaagtcaatagtaagaaaacctttttttttttgaatgtgcgaaagatttgaactgactttttgccaaggaagagatacagatagcagtaagcatattagtcattaaaataatgcaaattaaaactataatgggataccactattagtagtatgtattagaattactgaaattgaagatcgacaataccaagtgttggtgaggatgtggaggaactagacgtctcttacactgctgatgagaatgtaaaatggcagaagcactttggaaaataatctgacagtttctgaaaaagttaaatgtatacctagtgcatgatccagccattccacttctatgtatttatcttaaaaaaaagagaaagaaattcgcataaacttgtaaacacgtatttagtttgtagcagcttcatctgtaatagccaaaagcttgaaacaacccaaatgtccctcagcaggtgaatgtgtaaactgtggtatgaactacgcaatagaataccatccagtaaaataaaggagggaactattaatgtacattacaagtagatgaatctctttataactatgccaaatgaaagaagctatatttacacatacacacattcacatacaccccacatgctgaattattacattcatacaaaattctagaggatgcaaactaatgtatagttatagaaaggagattggggtttcctggcgatgggtgatataaaaagggattggagaaatggattaaaagcacaaggaaatttttgggggtgctgggtgtgttaattatattcattgtggtgatggcttcatggctatatacatatgtcaaaatgtgtctaattttagactttaaaaagcgcattttattctatattagtatttcagggatcccaagacaaccctgtttggtggtttactaggacctgtagcactcagcatatagtcgttcttagggctaagacttattacactgacgtagaaggatacacaggtggatcagtaaggggaaatgacatcaggcagggtccagaggaatccatgtgtgggttttctgtgttccctccctccctctgagatcacacacagcataccacctctccagtagtgaaaatgtagtcacaggcgtacaatgattatacccagggaaacccacttaagattcaagagttcagggtttttgttcagggcttgtcacataggcactcttgcccaccaatatttcatattcctgaaaggaaagcagttgttcagtgccccagacagataaaataaccttataagggtaggaaatgtttcaaaagctgtgttcccggacactagccaagggcaagccttgcaagcagacctttctaaagataaggctttagataaagtctcaggcttgttaacacttttctgcagtcacttatacctcagcttgttaaaaaaaaaaaaagttgtaaaagttagtgtgagttagcacaagacagttgcagttcatttattgaaaaaatgataagagattataaaaaatagtaactttagatttgaggcagaccaatgcagtgagaacctcattacctggaatgcttcatacccttaaatcccctctttggaattagccaggagtgttggtgggtggctgtaatcgagctactcaggaggctgaggcaggagaattacttgaacccgggaggcagagattgcagtgagccaagatcacaccactgcactccagcctgggcaacagagtgagactctgactccaaaaaaaaaaaaaaaaaaaaaaaaaaatcccctttttggaacaaggtaggataataataagtaaaaccaggaagcttggctaatgggagcttctaattatttttactctttaatattgtgactttcatttctattgtatttgaaaatctttccaaggtatatcatttttttcctttcataaaaaattccttggttgatgttcattatttaaccactggttaactgattatgacccagttcagttctatagcaaataaaagataaagcactgctgttgaaattataattacctcaacaacaagaccacctcatgcagttgtgcaggttatacctcgtccaaggcacacccagctgtgagggtgcgtggagcttaagtccagcttgtactttgccaagctatgggctccagcatggggtgtgtctgcccgagaaaggggcacctttttctagtttatgctaagatgccttttgagctgttcagcatgagccctggaaaaaggtggtggtagcgattttctcctacagtgctgcctaatatcagcaagctttcttgtgggcatctctttccccttaaagaaatccagctagtaactttcagttgagcgtcatgtttaaccaggattccactgtgtgtaacaaggacaagcgattccaacggtctctagtttggcccaattgcccttaaaaggcaggcaaatgtttagggtatgtgtttctttttatcactctggaagaagccaggttcaggtctgtatctggatcccattattaatgtccccagccaagaattctgtgtatgtatagcaatagaaaagtcagagaaaggacgctcctgtgacttctctgaagtttttgttcttcctgagtaatgaagtttcctaaaggggaattaaactttctcacctcggaagatagaagtattgtttaaagattcaactttgaaacaaataggaaaatatctgatagttgcaacttagcttcaaatcagcgatgtccagatattgacaaccattttatttctcctaaaccttgagccctagcccaatttatgaccgagtagagatcatggcacagcagccagcctaacagatgggggccatactctagcagcagaaggattctgttttgaaaccttcagcttttgaaatcttacaccactaccagccctacttcttctacatagatcacattcatttcctccctctttttcctaaggaaacttaaaacacatgtcttttccctttttatagatgcgaaccacccgcaaggtctccgtctggcctgtgggcctggttggtgggcggcgctacgaacgtccgctggtggaaaacggcaaagttgttggctggtacaccggctggagagcagacaggccttttgccatcgacatggcaggtgagcagtgtgggtgatgacatttgttcctgctggactgttcttatgctcttgtttataacgatgcactagatgaaggaagctttaaaagacaaatttggataaaaccctacatcatatcatattcaggagatgaaatatttaaaccttcaaaataggctctttggttagatcaagtggaaattgatttggagggtgattagaaaatgccctttctgttccattttgtcccctgtctgtgcctttatcccacaagcgtctacatggcagctactgggttggccactggggattcggtggtgagagctagacctggctcctgccttccaggggtctgttagctggaaccttttgactcccttttctagaagactgatatattaaaatatatcatgtttattgataaatttaacaatgatataaaaattgacaagtcattttaatgcttattgataggtttagtgctttattgatatatttaatactaaaatataaacttagatttctggtatttcaagaatttattgagtataactgtcttaaagtttttattccctgaacaaccaactgaattgaattagccctgcagtaggaccacacgttctaaaatgctactttatcataaaacaactcattttctatgggttatagaaaatgatgcctgtgataactgtggaaggatggagtttgaaacatgaggctcagaggcaaaaaaaaaaaaaattcggtgacatctatactcttaaaaatgaaggcagaaaggcttcaaaattgatctcatcaatcttgagctctgaagcacagctctgtcgggctgccagcctgtgcttgccccatcttctgtgcatatttcccagccgtagtcaagatctccgcgttcagaattctgatgggatggaggctgtcttctgaactggattcatcacttttattctgacaatactataaatctgagggagccagaggacgaagaataccaggagtcatctgaggggcacagcgctcatggacagctgtgtggtgggtcttgtcacatggcatcgtgggagaggacaaataggagatttttactcaacatttaacacacatctccacagcaccagccctcagccaggccatgtctcaggcccctgacctctccatccctctgttactccagctgtttgctttggtcttcagttcttgcagctccagaactgagctggcatctcagtctaggtctccacctggaggcagaaggagaggcagctgagccatcttggacggtcctgaggaccctcgaaagaggcctgccctcgacccgctcagagtgcatggccctgaaaacatggggcatagtgtatcttttgaaaatcgggcttcttgctgaccagaagtgtaccttagagcagaaaatttagacaacattagggaaagtccttctgcttctctgggatgtagttttcttgtgtaaagtgaggcagctgccggagatgaccaccagggccctccagtgcagccctcctttcctggcctcccaccttggaactctcaagtaagagcccaagcttgggcttctaagtgaggattgtgactgctcaagcagccgcagacagacttttgcttcagattttcccagagccttgtttcaacacggacttcccagacatatctccttaacacgtgggatgtctgcccatttccttgcatggatcatgcaaggtgagggcaacttgggtaactcttcctggattttaatctaggaactttatgtagatgatcaggtatcaaatagacttgttgaatatttgcattggttcccctagaatttgggtcacattgatatttctaaaattaaagatgtatgtgtttgtgcattagggctggcctatctaggactgccaaattctgtgggaattcttttttccatgacaagaccaatgtttggatttttctaagcatttcagtatattttcaaagcatattaaaaacacccatcataataagatatgaattatttccttgctctgtattcattatcatggttttaaaataggaataaagtgtctctaaggagacaacttttgtcacactaaataatttttttcacttcacacatgaacttgctttgcatcttagctttcagtaaattattgatatttttggaagtctttaagtgtaagtaatttggtcgataggatagttattctgtttttgaggcagtttgttctaattctaacttaaaaatttgtggctttgtttagattccacatacaattcatttattctctgggaagagggaaaagaccttttaggccttcatgttcaattggtgcttcccgcctcatttccaagttacatgtacacacacacacacacacacacacacacacacacacaatctgagctctgaggagctctactttgaaaatgctctgtgatagtcaagtgagagcaccatattggagcctgggtctgtcttgcatttgcaaagcggattaagagcccaaatggaacatttgtgggtttgagcacattcagtagaagcccctcagagcctgtcctgtttgtatctctgtgaggtcatcacatagcccatcactggaaactcatttgagtatcaaacattgaaactgcgatgtttcatgtcattctagtagttcttacactgtcattttattgccatgttgaacttgcctgatactgaaattttgctctcaggtgacatgaaacattgttcttgaaataatcttatgtttacaaccataatggcagaattaagattatttctgttccattggaggatattttttaaaataatgattactacttaaaaaaattaatatgcctgcccacaagatggaaagaaaacactggaggcagccccactggtggtgtgcagttggcttcaaagctgaccagtagccacatagctctgccaagccagtgaggccctggggggtttctactgttctgtgcctcagaattcaattcttacacctcaggaatctgaggattggctaaaagtgaggaagtccaccaaaggttttagctctgttttgaagggaggcagttaatttcaagtgacagactcacttcagccacttccagggaggtgtcagtaagaacgactgcttgaaagaactgagcttaaatcaatcttcaccctcaccaggaggtgtagatttgttcaagttgagaacttaaaacagatatttattaggaattttcaacattggcatgtgccttattattaattctaggatgtggcccgtgggacacggtgctccattaatgacagtatatgcagttcccagttgagttgctggcacacagtaggtactttattctgctaaaaacacaactaggtgtactgcaattagattctgacaccacctggagttggtgcagaccccacaggttagagggcacagtctccaacaagactgcccttatttcacatgccccccacgcgctggagagtcccaggccacctgcacttctgatcaactgactgcactggatgtttcccacaatctcctcaggtttgctaatttgctagaatgactcacagaactcaggagagtgctgtaattatacaaattatcattgtaatcagtgttataaagaatacaagtcaggaccagccaaatgaagtgacacacaggccagcagagccaggtggaaggagcaggctgggagcatacaggtcttctgtgccttttcctcatacaggtgaagtctaggaaagcttagttttctggtctggagtcctgtggaccagggtgtgtcgaagccctggggatggatgtgctcccacagggagactctgtggcagcctcggattgcatcctgggggcaggcatttaaagtgactgcagggggggagccagggaaagagacaaggcccagcaagagggtgttagggtggacagtggcgaggtcactggagagaaggggtggatgaatgatgaattccgttattggatgtgggaagaggaggacccttggtgagtatgggagaaagaccgctggaagcagaatggtctgagcaaagttaggtttctggacgggcatggtagctaacacctataatctcggcactttgggaggctgaggcaggtgaatcacctgaggtcaggagttcaagaccagcctggccaacatggtgaaaccccgtctctactacaaatacaaaaattagctgggcgtggtggcaaatgcctataatcccagctactcaggaggctgagacatgagaatcacttgaaccaggaggtggaggttgcagtgagccgagattgcacctctgcactccagcctgggagacacagggagactgtttcaaaaaaaaaaaaaaaattaggtttctaatggagcagagggggagagatttgatctgggaaaggcttggggaggttctgtcttggctggacagggatttgaaaggatgttgtgatgatgagtggccaggaggtatgggttaggaagaggaagggtgcaatggccactgaggtcccctccaactcgagggttgtgtgattttgacaagttctgattctaaggactgaggttgtgtaaggcggtgcacctggttatacttgtcttctgtcggcagccaactcctcctcgcctacggcctatcaccagctttccagctggtggtagtttctattcaatggaggcttaaaagccctgacttttgtggcgagtgggtggacagtgggggtggggagcatgactaggaggcaggagggccaggagacaactcttaagaaatgcggcagcaaatgagtaggaaagacagatggtggcagtttcaaggggtataacagctttttcctctttctttaatgatggagggggagaaattgaagttttaagaagtgataagtgttgaaagtcccaaaggagaggaaatgaggggagatcaagaccttagatggacaggttcacctagatagagtcacctctgactcccagaaaaaaggtgagataagtaaggaagccaagggctgggaaggtggaggggccagttgttggaattgaccgtccgccaaatgttaatagagggagaagtgacatttggctgaattccacacacactgaatgtagcagcccctcgcctcaaggagttttgtatctagcagagagagaatgtctacaagagcatggcagatacatcgtggggtcgaaaatgagtacaagtggaatgattgggggttacatttaaagagaaaaccacagccactgggggagtttcgggaaaggtcttgggaagaggtgacatctgagaggcaccttccgtgctaggcccaggccagggtagggagggatcatgggcagggtgtgtttttggaacaagttatcccagggtatgtgtagctcttgggaagggcaagctggggtcagatagtgaggactgagtgctaagatgagaagtttttcttcatttctgtggacattggagagtctgacatttttcaagtaggggactgatgtgattagaaatacagtttgagaaccacatgttggcagtgtgggatgaatgggggaggagggctgggcctggaggctcaggcagccatctgggtaatgagcccgtagcgggctgggaggtgagaggaggtcttaaataccacagctattggggacttataaaattttaacagccttttcagattatactctaaatcagcagacacttagatctttttaacacctttttctgttgtatggtatggtgataaatgatgtattaaatttaagtttggttaattttaattggtgtaatttgtattatcctttgagtcgtaatttatgtgtagaaaatacagtgatgttgggtaattaaaacattcttttaaccagaacacctattttgtgtaaaataggagtctgcatattaggaaaaaaaaaaaaaatcacatcacctgactgaagttttcaagctcaggattcactgtgggtgtgttgtcccagtggagggtgtcgaggctgaaagtgaggaagacagtgatcacgcctggctgggcctcctgtatccatacctgccctctcccgtgtccactccacctcgaagcaggaggaatctttcaggaatgcaaaccagattcttggcagtcccttgctcatagctcttcaggggctactcatgctcttggaataaacaattccttgtcactggcacctgccaggccctgcccggcccacccctgcccaccttactattcttgttcccctctactcaatctttgcgggcagagatcacttcctccagcacattctacccttccctttggggcctgcactgatgcccctgcctggaaatgctccttcctcgttcagccctactcatccttcaaatctcagcttaaaggctgccttcttggggaaggttttgctgatgcttcaattaagatagctcctcccgtgttataatgtgctgttctctcagcctcccatacctctgcaccttgtcacagtggttgtacatctctcattataattgttgaggctccgccaccccgactcccagaatgcatccttcctgtaggcagaagccggactatcctgccctccactacttgcccaatcccagccccaggtttcccctagccccagcctgtgagtggggctgagtgacggcactatcccagagcagctgtccccgctacaagtttaccaggcaaacctttaaaaaattattataaatgatgaccatgaaactggagggggtcgagggatcactctgggcaggttgctgaagcctgctttctgtgggctctctgcagggacatgggaatgacagttattctgggtctccttcatctcaatgtttgtcaacaaggaattttgcctgggttaatttatttggcagaccttttctcagtagataatgctgtgatcagcttcagcccagcccggatcagatgatcatcaaagccaaatgagcagtcaaaattaatgacgttttgctttgcttcatgaatataaatactgcaagaaaatggagggaattgtcttcctgccactttggagtcattcgtgatttaagtgtgctgttttccatgcatgaatgttttctatgagaactataaagttactgaatgttctcagtagagtgacttgatgtgtcatgtggtaccttttagtgcaggatctagggaccagcttgggactttgtccttgggttggtacagtgtgattgtcaccgggagaggactgcagctgccagggggtggtaattctgtcccaacaacttatagaaccacagggacaggtggcagagtgttggggcaataggcagcctgccactcagtttttaatctatttctagaacatggtgcagtctagagacttgcagggatttgatgcccacagtactgtgtctggtcctgtctgcatgtgctgtggccagggctgtgctgggtagaggtgggcgtgtggggcaaggagcacatgtgcatctgtgtgctcatactcagggtgcttgctctggagcagctggtagtggggtcaggtggggtggacgtggagagggagggctctgcagaggcctttcagggctgaaggggaagtggggagacgggtttccaggcctctgtccacctcaattctagcagctctgcatttacatattggagatcccctcaagatttcaatggaataaaacattcattccaggactaaaaattttgaaaacctgaagttttcctttctatcaggatgtccagcagactcaataattatatattgtttgcttagcatttaccaagcatcaggcatttggaagcattctgtgttctttcttcatgaatccttacttagctgtgcaagggatatgctagttttattatccccacttacatataaggagcccgaggcctaggtatgctaagtgagttgtctgggattcagagtcaggccagtgtgtctacagagatggtctccaactcacccacctacagccaagtcactgagttcttggtctctgagcctgcagaacagtttcttggtttcttcatctgcagaacagggaaaatgaaatttttcacaaaatcagacatcacgtgcaaagcagccaggagtagaacattgtagacacttggtgaatgtcactcttaaccaagaaacaagactgtgcctttgggttcagctggctcacacatttattttgatgaattaggtcagtgttttgtttcattatcacagtggtgaggtccatgcaggtagctgtagggtggaagaatcactcatcctcgggtcctgctctgacacatacaggctgtgcagcctgaagatctaggggaatatctgtttcttcctaatacctgtagattagggatcattgcttcttcctaatacctgtagattagggatcattgcaccagctttctgggttgtgttgaggttgaagtaaaacgaatacatacagaagttcctgctgttctgtgaatatttgaatctgcacccacttgtagctttgtgagatcactcttaacggtagtatttaagaacatttgaactctgctgtgggctcatgatgaacttcatttctcttctggcgggtggacctgtgctcattatcattcaatgaattggctcagcatgcaggatggcatgctgagataaacgctagcccttactttagattaaatacccccaaaagagagtgatcaacaggagaaaatcgaagccaaaaaagatcattaaagagttgtttaggagcagatacgtgttcattgttaaaatttcccagctgaaaatctaaacaaacagcacttgagctttcagaagaaaatgccatttgtaacattgagatttgcaaggcatttggtgccatgtgagtgccgcttgcccctgtaggtgagtctatgtagaccacgagacaagtattcaatatgcaaattcctgatggcacatagggaaggatttaaaagaatgattctcatgctttctaatcaagtcacaagggggcaaatgtcctttttcaccacctcgactttcctaagagtccctaggagagcatctgtaggtaatagttttcatctagaatctgttaaataggtattatttattttactcatgtaaatagttaggattaagggttgttgccctgcactgctaacgtgggggccggggtgcagaccacttctctctttggcatgcaggttgtttgctgtgactactacacatttttctgcactggcttcagaagttaagccttgcaggcattcttcctgggctccctgagcagctgtaatcaccctgaccccaaacactctgcacatcagttcacctcaattttaaatccctcaggccaaccgctgtggtcagtcggcattgccctaagctgatgggcctgattaaaccaagagtggcacacactgccctccagcctaggatatgcaatgtcacttttcttctcacgtttgcctagctaatttccagttactcttccagactcattgatgaggcaggaatcgctttttctgggaagtttttcctgattttccatcacacgtggatgcccctttctaccttttcccctagaatccttggcttatgcagttatgaatatttccacaaggtggcgctcatgtcagtgtcctccctgcccctggccgccttgctagccccggagtacactaggagggcgctcgggtctgcctgcatctccaggccgggcacagtctctgatggtaatagcttgaacaaatgtttgctgaattcatgaattttaacatgttttccttttctagtgtaaggattatcaaaattaagatttaaagcttctcgcttctgagacaacattgccattatttaatggtggaggtgtaaagggggatgccgagctgtatactccagagctctctgaggagggtctaattcagcgggtctccccatggcttcgcatcaaaatggcaaggggctttgaaaaaacacccacacttgagctccacctaggagcaaagagaccatatagtctctgagggtgaggcctggtatttgtgtggttgcgggttttttttgtttttttttttttttttgagtcttgaggtgatcccgaagtgcacccaggagtaagagaggcgggcgaaagtgatcagaagcgactcctatttccttcctgtggctcgttatcgtctctcagtggtcacagtcctttcccaggccaccccctgtgtccatctcaggtgggataacctcatgacagagtttgggaacgctcaatagagtcacttccatagaaaatacgtcttccattgctcaagcaagaagagaatttgagcataggacaggaatattttaatcataataactgaaaaacaccagcaacaatataaacaaaaagattgcctgtattcattgggaatgcaagttttatctgtgttttgattgtggtgaaatatacgtaacataaaatttaccattttaaccattttgaagtggacagttcagtggtattcaattcattcacattgttgtgcaaccataaccactgtccaactccacaccttttccatcactgaaccaaaattctatgctcactaaacaataactcctgacttgcccctcccctcagcccctggttaccacaattctactttctgtctcgattaattagactattctaggtacctcatataagtggaatcatatttgtccctttttttttttttttgcttattgagcataatatctttaaggttcattcatattatattatgtatcagaatttcattcctttttaaggctactaatattccattgttacgtatagtccacatttcgtttatccatgcatacagccatggacgtttgggttgtttccaccttttggctactgtgaataatgttgctataaacattggtgcacagatatctgttcgagtccctgctttagattcttttggatgtccaaagtagaactgttggatcacaggtaattttttgtttgaattttttgaagaatcaccatactattttctacagcagctgcatcattttacactctccacagcaatgcaggaaggttccagattctccatatcctcactaatacttatttgcttctgttttgttgtattagtttttttaataatagccacctaatggggatgaagtggtatctcattctggttttgatttgcacttcatgtgcttcgtggccatttgtacttccttcttagagaaatgtctattcaagtcctttatacatttctataaaatgtttatgtatttatttgacttcaccaacagaaatggattttctcacagttctggaggctggaggtccaaggtcagggtgtcagcatgtgagttcccttgaggcctctccttgctcacagatggcctttcctctgcggcatgcattctccactctctcctctttttatatcagtcatattggactttgcccatttttgaattgagttgtttggtttattcttgctgagctgtagaaattctttatattttgggtattaatcctttatcagatatgctatttacaaatatttttcccattctatgggttacctttcccactctgttaatactgttctttaatgcactaatgctttagttttggaagaagtctagtttatctatttgatttatttatttttattttttattttttgagatgtagtctcgctctgtcccccaggctggagtgcagtggcatgatctcggctcactgcaagctctacctcccgggttcacacttttctcctgcctcagcctcctgagtagctgggactacaggcacccgccaccatgcccagctaattttttgtatttttagtagagacggggtttcaccatgttagccagtatggtctggatctcctgacctcgtgatctgcccgccttaacctcccaaagtgctgggattacaggtgtgagccaccacacccagcgtacctatttgatcttttgtcgtctgtgcttttggtgtcatatctaagaagtcactgctgaatccaatctcatgaagctttcctcgttgtcttccaagagttttatagtttgagttctttagctttagtctgctgttagagaaagaataacaaaccttcatttatccagaatggttgagggttgggggcagagtatggtcttttttataattaactgtaataaattttaccatttctacattcctccatccattaaaaagatcaggattagaaagtaggaaaatatctaaaaccatgctggaaaacagaaaaggacatgtacaatgaagcttctgggagaaatgtgaggctaagtttggatggacagacagacagaggagggggatcatatgagaagtaagaggatggtgtcctcatgggagcccctggacacccctattctcagagtgcagagatccagtgggctgaagggggccgtgcctcagacacatgccatcaagcccctacacagcttcctcgcatggcagagaatgcccccacatcaggtgggggttgtgtggtaagctcctggttctgcctgacttctgggcagtttcctcccattaacatggagggaaaggctctatcacagcccactggtgaagccgcctctgaagtgttgagtttccctgagtaactccctggtttttctgtggaaaccgctcaaagtggccacaggtgtacctaaaataaagcctctcacaattgctaacaaagaccaatacaagccatcaatgctgttcagccttgacttctgtttgcaaatatgagtagataattaaaaaaagtaaaccaagacacaggagttcccactgaaagagtataggaatcaagagagggcttttaaaatttctagagttcattctcagattttaaaagatgtggcatcataaaacaagagccagcagctgtgaggaaagagtcattggagagcaaggattcctgtaaataaaaggcatgactgctggaataacctcatgtgagagggtgacagcatcgaggctctaagtgtcagtgatactgttagggttgcaatgcagaggagtggatcccaaagccctcctggaagaatcctccaggaattcttccaaaataggagcaaaagtacaaagaaatagaaatgtcagtggaaggagacttataaatccagcatgttcagtaagagtttcagaattagaaaataactatatatgaaatatcaagaaagaaacagggctggttgtggtggctcacatctgtaatcccagcactttggaaggcgaaggcaggagaatcgtttgaggccaggagtttgagaccaccagcctggccaacatggtaaaaccccatctctactaaaaatataaaaattggctgggcatggtggtgcacgcctgtgatcccagttactcgggaggctgaggcaggaggattgtttgaacccgggaggcagaggttacagtgagctgagatcatcccactgcactccagcctgggtgacagagcaagactcacagagcaagactctgtttcaaaaaaaaaaaaaaattagccagctgtggtggtgcacgctgtagtcctagctacttgggaggctcagccagaaggatcacttgagcccaggggattcgaggctatagtcatgccactgcactccagcctgggtgacagagtgagactctgtctctaaaaatcagaaagaaacaggatacaagttcctataatacttgagttttgagagtgattccattgccaggtttgaatttgggctctgctacttcctcagagtaagcttttaagcaagttacttagcctctctgtgcctccatttcttcatttgtaaattatggtagtaatagtatctacctagtggggtcactgtgaggattaagcaggttaatacagacagagcacctaggacaaggcctggttcactgtgaatgtttcctaaaatgtagctgctgttaagccaaccgtcactgccaccactactcttagttcttagaatgtacaggtatgcggctgccctgtgaaagcttcacagtcggtccggtttaccactccagtctctctctctacctcctctgccgcattgccacctccacccccacccccacccccacgccccgtcatctcttacctggaccagcagtaacctcctaactagctccacagcttcatttcttatccccaataatatgctccctgacccgttaggctccaggttaaaacatttctgcagctccccttgcacttcgtttctccatggcctcccaggccctgcatggttgggcatccccacccccgagcctcgctcaagttattttccttgtgttctctgtgcactcagcttcagtggcttgctgtcccatctcacaatcccgccatcacgtgtacttgtctctgcctggaaggctctttcctcaacccacctgcctctcccacaccatccttcagagtccagcttaatcatccttggtccaccctggagggtcagatttcttcacatagcacccgcacccttccttcatagcactcaccaccgtgtgtgcacctgcactattagccaacattccacctccctgacaagcctgcacctgggctataatgactctaagatgcagatcatgactgattttgcttaccaccttctccccagtccctggcagtttgcctggtatgtatgtttttgttgaatgaatgaatgaatgaatgaatgaatcctaagtttagaacaactgtgccaggatttaataataaaacaatcccaagggtattcacagggggtcagggggaaaactgcttctctatgaaggagggaaaaatcagactagcatcaggtttttttctgtaacactgaatgatacagaataatggagaaaggtgtttagagttctgaagaaaagaaatggatcctaggattttttgtaccccgtgaaatcattatgtctgtgtgagggcaaaagagacatttcaaatatttttctcaaaaaacaaacaacaacaacaacaaaaacaaagtcacttaaggaaagcgctttagccaaagtgaattagaataagaaactaaaaaataggaagattgctgtaccagataaagtagtaagcaacaaaagtggcaattttaacaattaaaagtggatagtaactaacatgactgtgaagtttaaagctgtttgttggaatctggaaataggagaagcaaagtgaaaatgaagttttcaaataaaaacgttggtatatttgaatgcctgctggtgacggagaggataggaaatgggagaataggtgcccactagcagatgtagtctcattcaaaaaggtaagggggagggggggcagagagaggctttaattcatgatgataagagaaatatcagttccttaaaagctccttaaacagttaaaaatattttaaataaggaattttaaaggtaaccacagtagaatacatataaaacaaaaccttttcaacaattagaggaagaagagaaaccaaaatgaattcaaaaagaagaaggaaaaaaagcaaaaaaaaaaaagtatgtaatgcacctaagataaaaccaaacatgataaccacactaagtgtgaaaaaaattaaattgctctaaataaaacacagcagcaaagctatatctcatataaaagacatgtaaaaatgtgatggagatggacaataaagagataaactatagtatcctaaggaaggacagacaacaaaagagcaggagtgttcacattcgtgttgaacaaggcagaagtcaaggacaaaaatattgaatgagaaggagaggaacattttgtattgacggaaactatgtatactacaaaagtacagcattcatcagccattgtgtatgagttatcaatgagtccaaaaactaaaggcagacatagataaaaatagaaaatttgacaaaaccataatcatagtagacatgtttaacacacttatctaaatctgacagatttaagtagacaaaaggctgtagaaaatggaatatataaaaaacttgatctaataattatatataaaacactgtactcaatagacacagaatatacctttatttcaagtgttcatgaaacatttataaaaattgaaactgtatcaggccataaaaccttaaaaaagtgcttgtataggctcaaagcactacactagaaactaacaaataataaattacataataatgataattaaaaagtggagttagatctgttgacaagtagatgaccagaggtaaactgacagcagggctggagaagcatggatggtttgatccttgctcagaagcctggtccctggccagtctctccctgtgcttccccatcagcatttgcagggaggaacacaggattacaaaggtcatggctggcttatggaaacacaagctgaaattgaatctcaggtatctatgcctttgtaccttaggacagtgtgttttacccacagttctttttaaagtggggaagcgtggacagtcttacaggcaggtgccttgagcagctccacccccgccgccaccacattcatgtcagtcttggcctgaacatatcttcaggctacaccaaggttcaaagccaatgtaaggtaagatttggctacaggattttgcatgcagaaaccatcagcgctgttagaagcccctttgaaggagtgagaaggagaaaaacctgtacagaggagagcgtacaggttactctaggtacttaagaccaggacttgatggtaagagagcctacaggaaatgtccaggaagaacccatagctctgcagaagaggcagagggtcgggggaaaactgcctggccatggagtgagagttggaccaccccaatcctgctccttctcttttgtgtcttgggtgaaagagtgaaatgccttccaggttctgatgtaagctccttctttgtcccagtgtccaggcctgcactggtgaccttctccagcactctctgtacctgtgctgaacacccccggtggggcccatctgtctgctcttacctgaaccatctagtgcagcagacactttgctggtctctctacctcaggcagttaccatactgctgccagagaaattttcctaaaattgacttttgattacaatctggagccaaggttgcctgccacagagtagggtgcagagtcctgggcacaagcaacttgacagccttgtcacccatcattgctgctccagcctaagacttggcctcacaggtctcccttcctctacatggatgcttcaaagtccctctcagatttcagtgtctccaaagcccttactcattctagtcagatagcatttgcttctccaactcctgtgctcccaaagctctctacttacaccttttatagcatctgtggcacagctgtgcccatatctgttcttctaattaaactaggagttgccagagggcagagaccacattcagtattgtgttaccaatactgaaaaccagcaatgggcccctaaagagcttctgaatgagtgaataatatcaaaaggaagatgaaaaatgaaagataacatcctttagattggtgaataagaatgctcttttttaatgattatgcttaacaaagaatgcttactatgtttccaggtaaatatttgtttacatatattcatttaagatttacaataaccgtataagatgatagctatctgcattttacatttgtgtaaaccaaggcacagaacagtgaaagtaccttcctgagtcactttaatagtagatggcagagtaaggatttgaattcaagccctccaagttacaagcctttactcaactaccgtccttccccgccacactatttcattaaaataggtctttaggaaactctgaagatttccagtcagaaaccaacatagcttccatgtgaaactaggaggtgatgtaatagcttcattagtgaatccctgaagagctaccatttaaaaaattatttcactaggattggggaataagtaccttcttcaccatgctctgctatattttctgggttggactagagtggcttagtttgaccaattcagtagtaccatggcctcttacccaggccatgtcaagcatgttgactctgccatgcccagcatatacaagtaaactctgaagggtttatttcccatcagagtctttttggttctaaacttcagtgttagttgtgcccactaaaaaataattcatggatattttccgtattcagttaattaaacccctttatattatgtttggttattaggatcagattttccatccttgctcagcatcctgattgtttccttagaagattcagttttctatgatggttttttcagagtagagatttaaatgaattgtttatagattaaataaagaacacttcttggaaatgcagagtgtttcacttttttccatggaaaataatgactgctaaataccttttgaggaatttttaaaattagacttttacttaagtttcaccttgaagcaattataaagtttcagtcagtagtcagcagattaacagacctgtttaacaaccaaggcatgctttttcattcttcttccacaccagaagaaaataattctaaattataattggaagtaaatgcgggaagctatggttctgtttactcagtaggaaagggtagatttggaagaaaatctatcatggctgtgaaagaacacttcatgacatatgagcattcagtcttagagccatgaaaattataaaggaacacttgcaggaaacagtggcaatttgggatagtaaataagcaaaggaaacattcctttatatagccttcttttctgctttctatatttgatttaaatctagtggaaatgattcctaaatcaattttactaacacatttgtttctcacttggatagttttgagatgccagggctggaaagtacagggccaggggaaaaaaaagtagttaagtagcagttttctgttttcaatcatcaaaccctacattacagtattttgtttttcttctatacttacctataatgtggtactgggatttggggttgcaaaaagagtaatgtcattgggaatgacagagtaaggacttctgaatattctcatccataaaaacagtgagaacactggcaaaatttgtcaaagtcaacttcttaagaactatggaaattagctaaaagtatgcaagaatctggggagttttgttttttttttttaaaaaaaggctaaatcttggtaagagcagtattgtagtatatcaatttgccctatttccatccccttctctccatttcctccatggtagctttgaaaaccaacagccctgtaattgtggtgaaaaccagcagcatagcagttactagaagggcagaacagggttggaactcattcagagctccattttaagagaattgtcattatgtgatctgtccagcaattccctagaaaaccctgttcacaaggcttgtctttatttgacctcattcactagagcaaacaggcttttccctgggggcgtttgtcaaaaacagcttgtggtgattgtttaccatcacagctccctgaggcaataacagttgtggcaaacaagctaagcaaaaaacttcattccgtaggggcatttgaaaagctctgacatatttctggaaggccttgtggatgtgtaggactatatgcatgcccagggctatgtgcttgttcaagaaaatccttacaaagtcctcagtcttccccctcttagtactgtgagcccctgtgcaatcaagaagtgaaaactaaagcagttgtacattgcctggctgagtgttgaaagcatgcccaaatggacacagagcatcttggcaaagactgagagactctggttccaggcatttaaggaaatctgtgtccaatatttagttgacctcttaagctaactgaacacagacttcattgcccacactcagcaaagaacacagactttacaaagttagttcaaggaagtcactaaaacgataatgacaacaataaaagaacaactaaccttagagaatctgatttccagagttgtcacattatattatttcaaatgttcagttttcagcaaaagagtacaagacatgcaaataaacaagaaagcataaccaatacacaaaaaagaaagcagttgatagaaactgtccctgaaaatgtctggacattatatttggtaggtaaaaactttaaatcagatattttaaatatatggagtccactaaagataaccatgtctaaatagctaaagaaaaatgggagaatgatgtctcacaaatagagatcaataaagagatagaaattatatattttttaaaaagaaccaaatagaaatgctggagttgaaatgtacactaataaaaacaaaaaattcaatagaggggctcaaagcagtttcagcaggcagaagaattagtgaatttgaaacatagataaattgatatgatccagtttaaggaacagaaaaaagaatgacgaaaaatgaacaggacctcatagtcttattattcacatatactaatatacatattatgagtcgtagaaaaagagagaaaaagggacaaaaagaatatttgaaaaaaaatgttagaacttcccaaatctgtatgaaaaacattaaacatcgaggaagctcagtggattccaagtaggataaactcagagattcatacctagacacatcataatcagttgaaaaccaaacatgaagagaatcttgagagtaacaaaagaaaactgaatatgattaacaaaggctctttaataagccattgtttattaacaaagactgatttcttatcagaaaccacagaagctagaaggcagtgggatgacagattcaaagtactggaaggaaaaaaagaaagatcaaccaagaattctgtatccagcaaaactatccttcaaaaatgaaggagaaatgaaaatattcccaattaacaaacaccatgaaaattcattgctagcacatgtgccctacaagaaatactcaaaggagtcctttaggcaaaagtgaaaggatgctagacgggaactgtaatccacatgaacaaataagaacactagtaaaagtaactacataggtaattttgaaaggcagtataaatgtaatctttatagctcttttctcctgttttgaaaaacagctacataaaccagtcatcagaaatctggtttgaggagcacaaaatgtataaagatataatttttatgacaataatagcacaaatgaggggcaaagaatggatctgtgtaggggcaaagtttttttatcctgttgaaattaagttggtattaatctgaactaaactgttagaaattgaaatgttaattataatccccatggcaacctctaagaaaataactcaaatgataaatgacaagagaattaaaatcatacactaggaaatatttgtttaataataaagaaggcagtaatagagaaatagaggaataaaataacattagacatgtagaaaacaaacttcaaaaagacaaatgtaaatcaatttattggtaattacattaaacgtaactggataaaaaacccaatcaaaaggcagatggacaggatgtataaaaatgatccaactatatgctgtctacaagacaaacatgttagattcaaagacacaaataaattgaaagcaagagaagagaaaaaagtatatatcatgctaacaggaaccaaaaaaaaaaaaaaaaagaacgggaatgattatatgaacaccagacaaaatagactttaagacgaactgttactagagaccaaaaaaaagttataatgagaaaagggtcactctgtcaagaagatataactataaacatatacgtgacttacagcagagctccaaaatacacaaagtaaaaatgacaaaactgaaggaaaaaataattcatcaataatcattgcaactatcaacatcccactttcaatactagacagaacaactagatagatcaactgggatagaagacttgaaaaacactgtaaatcaattagatgtaacaaacatctatagaacactccacccaacaagaatggaatacgctttcttctcaaaggcacaatggaacattctccaagattatataccatcttaggccataaagcaggacacaatttaaaataactaaaattacacaaagtatggtcttggtttatactggaatgaaatcagaaattaataccagaaaggagtttgtgaaattcacaaatatatggaaattatacacacactcctaaaaaaaatcaatttgttaagaaatcacaaggaaaattgggaaatattttgaagagaatgaaaatggaaaaacaacatatgaaaacctatgggggtacagccagagtagtgcttagcaggacatttatagcttcacatacctccattaaaaagaagaaagatctcaaatcaataacctaaccttctgccataaaaaaacagaaaaagaagagtaaactcaaaataagcagaaggaagttattagattagagaaaaatacagaatataaaaacaatataagaaaatccataaaaatgttttttaaaaaccaacaaattgggaaacctttacttagactgtcaagaaaaaggagagaagcctcacattactaaaatcaggaatgaaagcacgaatattaataccaaccttacataaattttatgagaatactttaaaaaattgtattgcaacaaattagataacctatatgaaaatggacaaattattggaatgactattaaaactgtctcaaaaaaatctaaataggcctataacagagagattgaattaataatcaacaaaacttccctcagagaaaagcccattttcagatggctttactggtgacttctaccaaacatttaaagaattaccaattcttcacaaatcctccaaaaaatagaagggaacacttttgaaggaattctaccaagccaatgttaccctgataccaaaaccaaagacatcacgaagaaaaaaaaaaacaaaaaaaaaaaaacagacagacctatatcccttttgaatacagatgcaaaaatccttaaaaaaaaaatactagtaaagtgaattgagcaacatatagaaaggattatacaccatgagcaggtaagatttatccctggaatataagattatttcaaatataaaagtaaatcaatgtaacacaccatatcaatacaataaagaacaaaagctgcacaattatatcagtagatgcagaaaaagcacctgacaaaattcagcattctttcatgataaaaacactagagagaagatcaataaactaggaataggagggaacttcatttatttgataaagcatatctatgaaaaattcacagctaacatttttaatagttgaatgccgaaagctttttccctaagatcaagaataagacaagatgacccctctacccatttgtatacaccattgcactatagcttataaaaggcatccagattgtaaaggcattagtaaaactatctccatttatcaatgacatgatcttttacatagaaaaatcctaaggaacacacacacataactgtttttttgtttgtttgtttgtttgtttttaagagattttcttgagggtttatttacatggctgtttggacatctctgttgaaaaggaaaactctttttttttcttttttttattattattatactttaagttttagggtacatgtgcacaacgtgcaggtttgttacatatgtatacatgtgccatgctggtgtgctgcacccattaactcgtcatttagcattaggtatatctcctaatgctatccctcccccctccccccaccccacaacagtccctggtgtgtgatgttccccttcctgtgtccatgtgttctcatcgttcaattcccacctatgagtgagaacatgcggtgtttggttctttgtccttgcgatagtttgctgagaatgatggtttccagcttcatccatgtccctacaaaggacatgaactcatcatttttgatggctgcatagtattccatggtgtatatgtgccacattttcttaatccagtctatcgttgttggatatttgggttggttccaagtctttgctattgtgaatagtgccgcaataaacatacgtgtgcatgtgtctttctagcagcatgatttataatcctttgggtatatacccagtaatgggatggctgggtcaaatggtatttctagttctagatccctgaggaatcgccacactgacttccacaatggttttactagtttacagtcccaccaacagtgtaaaagtgttcctatttctccacatcctctccagcacctgttgtttcctgactttttaatgatcaccattctaactggtgtgagatggtatctcattgtggttttgatttgcatttctctgatggccagtgatgaacacacacaactgttaatgctaattaaatgagtttagcaagactgcattgatacaaaatcaatatatgaaaatcaattgtatttatatacactagcaatgaacaatctgaaaattaaactaagaaaatttcattcacaatagtgtcagaaataataaaatgcttagtaataaagtatgacttacacaggaaactataaaatatcactgaaatgaagaactaaataagtggaaagatatgttcatggattagaagacttaatattgttatgggtcagaagacttaatattgctaaaatggcaatattcccccaattaatctacagattcaatgcaatctttatcaaaattctggctgccctttttgtaaaaattgacaaggtatttgtttctaaaattgatatggaaagtgatgaactcagaaagaagttaggggatttatacttcccaatttgaaaacttataaaactacaataatgccatcaccagatggagcgacatgcaccttatagtcccagctactcaggaggctgaggcaggagcatccctcgagcccaggagtttgagaccagcctggacaacataggaagaccctgtctcaacttaaagaaagcaaactacagtaatacagtgtggtactgacataaggatagccatatagattaatgaaatagaactgacagtgtagaaataaatcatttatggtcagttgatttttgccaaaggttctaagacagttcaatgggaaaaaaagtcttctcaaaaattggttcccagagttatgaatatgctaaaaccgcccttaatcataccatataaaaggacaagttttaatatatgtgaattatatctcaataaggaggggtggtgggcaggaaaggtggaaacacacaacattccaaaaggcagtgtatgctttgctgggaagaggtatgaaaggagagttggccggctcagaattagaggaggtcccacacatatctttctttctccagcaagttccatgactgcactgtgtgtatatactttttaatatgaaagttgaaatctctttttcttattgtttaacgtggggggggaaagagaggcttttgaaattacctgatagctattggtaacactaaacatgtgtcaagagcccaatactctaggacaactacccagagtgattattacacagaaaaagctgttagtatctttcttgtggccaaactataaaagtcttgttgccaaaagtcatcgtttagaaactggaactagttcttatttgtaacagccttgctgagattagatgatgtatagttggagaagagagaatgtggcagtgggatgagcctatggaggtgaggctaaattgatacttacacaatagaagaactgagaagcactattgatactgttaactgtggctgaaggaagaagaggaggcttgctgtacttcttcctttccaatatttctgccttttttgtgggggtgggagccttatttaaatggccaggatctccaggactttgttgaataaaagtcaagagcagccatccttgcctcattccaatcttcagggatttaacactcagtctttcaccaattaagtataatgttggcattaggtatttttgtagatgcccttattaagttgagaaagttcacttctagtcttagtttgctgagaggcttttatttcttcttttcattattactagatgttagattttgtcaaagcattttctccagctattgtgatagtcagatttttttttttagtctgctaatatggtgaattacattgattgattttgaaattttaaaccaacattgcaatctggagataatcctcaagtggtcatgatttattgtctttttattgttgaatttgatttgctaaaattttgagaatttttctgtgatcatgaggattattagtctgtagttttcttgtaatgtttttgtctggttttggtatcagggcaatgctggtcttacaggataacttgagaaagatttcctccttttctattttctagaaaaattcatgtagaattgctgtcatttcttccttaaatgcttggtagaatttaccagtgaagctctctggtcctggagggttgtgtgtatgtgtgtggaagattttaattataaacttaatttatttgatacagggctatttcacattatctatttcttcatgagtgagccttgtagcttgtctttcaaggactttttctattttgatctaagttgtcaaatttactatcataaaaagttgcttataatagccccatattatcattttaaggtttgtagaacctatctctttcatttctgaggctggtaatttatatcttctctttttcctgataagcatgggtagagtttatcaattttattaacttttttttcctaaatgactaggtttttatttcacttatcttctcaattgttttctatttctactttagtcgtttctgctctcatatctattagtatagtcgttttctccatttactttgggcttcatttgctttctttttctaatttataaaggtaggagcttaggttattgaattcagacctttcttatccagtaagtgcttaatgttttctaaaaactagtttcccatctaaacactcctttagatgtatcctacacattttgatatgtcttgttttcattttcattcagttaaccactttatcatttcccttttgatttcttctttggtttgtattttgcttagaattatattgtttagtttccaaatatttgggatattttccaggtatctttgtatttactgatatctattttaattccactgtagtcagaaaacatattttgtacaatttaaattattttaaatgtattgagacagatttatggcccagactatggtctaactatcgtgataatgttccatgtgtactttaaaagattgtattctgctgttgttgggtggagtgttctataaatgtcatttaggtgtagttgaaaatgttatttaagtcttacatatctttcctgagttttcaagtttgtaaatttttcagtcgtcatttcttcaaatttttttccctgtctccctcattcattcacctttgactctgttcctgtgactctgtacggtgtgtgtgtgttggtcttgccttttctgtttcattttggtagtttctatcattatgtgttcgagtttactcaacttttattctgcagtgtctcctctgctgctaatcccatccaatgtatttttcatctcagacattgtatttttcatcactgaggtgtcttgggcatcaggcattttgaattttatgttgctagatactggatgagagagacatatatgtatacacacaaccatacataaaaacacatatatatgtaatgttatactatattataaatacatatgtattcttgagctttgtactgggacacaactgagttaacttggaaacattttgatcctttccaggcttgcttttgaagtttgttaggcaaaaccatctcagcctctagtttagggctaatcaatttgaccttacaacaggcacgataaccttccaagttctcctccaggtgctccagctgttactaggtagctccactctggctactgagaatgggaactagtcccctccagtaattgattcacctgctccttgccagtggttctgtacctggcctgaggtagttgtgtgagcatttgctcttcatactcagttgaagagttgaggagagctgtctacagatcagcagagttcttccttctctagtactccaccctgcatatcctagttgtcttggcctcctcaaattctcagttgtttcctcaattcaaggggactgcagagctttccgggttcccctccctgtggtgtagcctgaaaacatacttcaggcaggaagctggggcagttgtaggggtcacatttctcttttctcagagatctctgtctcatgtgcctcttttccaatgtctggaaacttttttcaatcattttgtctgccttttcgttatttaaaacaagtgaggaaaaaccagtccctattgcaattttgtccagaaatgtaaatagcttgttggacttttaaagtcttacaaattttctactcagtaatcagtaatcatatatggaggtaggccctatccctctgcctgagagggaatagttattcctgagtatccatagggaattggtttcaggactgctactcataccaaaatccatggacgctcaagtccctgatatagtgtttacatataacctaggcagatcctcctgtatactttaaatcatctctagattacttacctaatacaatgcaaatgccatgcaaattgttgttatactatatagctttaaaacttgtattattttgactggctgctgtagctcacgcctgtaatcccagcactttaggaggccgaggggggcagataacttgaagtcaggagttcaagaccagcctggccgacatagtgaaaccccgtctctgctaaaaatacaaaattagccaggcccacgtctgtagtcccagctactcgggaggctgaggcaggagaatcacttgaacccaggaggcagaggttgcagtgagccgagattgtgccactgcactccagcctgggcaacaagagtgaaactctgtccaaaaacaaaaaagccctattatttcttgttgtattgtcatttttttgttttactttcagatatttttaatctgaggttagttggatctgcagatgcatctgcagatacagagggtgactgtgtatcctccccacctagctctgctgaagaagtcaggaaatcctgccttctcagtgaacaatcatttttatttgcatttttttttttactcagctgaccagggcagaaaatcctactcccatgactttcgtaagcatctccaaagtaaccaacatctttaaagataacgaatctcactaaaaaaggaaagatataatacttgaagtataaatacttggaattacccaagaaaacatcttaggttggaaatcaatggtttaggattccctttactgtgatttcagaggggagaactctttaactctgcccccagcttcacagcgggtcagattccccaaaagtaacccaggggttgacctagttaacatgcagtctctcctgccagctgtgacctgcttcctttcaagagatcactgagcaaaggaaattgcgttagctgattgtggggcatctgaattgtgctcctccacccctttgtattagagaatagaaaaacacttgggtactgtggagagccacaggctaacatgtctccagggtgctggcctttcaggtgcgcaccattctctagtgacaccaggaaaggagaccttgctgcaaaatgatgtatagcttcacaactggctgttaactttacataaattgtagattttgccatgtcattctgtgtgaagcgctggaaggatattcctgtgctaaggaaagcaacaaaagaatctgaatccttcagtggtcgtgatggttaatgtgttaaagtcttaggggaaaatgaaggaaatcagatccaggtggctccatatcatttccagaaatcacctctgcacaatttggatcccatgtttttgagagaatggggaaatacaaccagtatcctgaagccatgtgaagaatgtatcaggagtttcagtatgactgagaagggtaggctctcatctgaatttaaaaaaaaaaaaaaaaaaaaaaggataaagcttatttataagcatgtgggaaaaagcaagaaatcttttaacactaaaatctgatctgacctgttggaaaggacactacgttatcaatttgaacctctggcttttgttgaggtgtctggtggttgtcctagttgtgtctaaggaaggctgtggacttgttaccagagttgctatcacatgtaggtgtcctggctttgctacctggaactttcccaaaccttttacatctgtcaaccagtattctttcagccataaatggtggctggcatcacctgcccctcatgatcacactgacaatagtatttttatttatatattgtagtatcttttgaacagtgctttgcagtcagtggagtctttccatacctcaatttttcatcaaacattgagttgaagtgttacacttctctcgcaaataaagaaatggggaagttagaaaatcaagaaaggttaaatgagttggccagtgtcccaggggcagggacctaggcaaaaacaaaaggcttctaattccaaatccagtattctctgctaaaatgtgccacctccctccctttagggttggtggaggtatcgatactggggctagtcctacagctaatgctttatgattctttgttctgcttcactcagcacctgctgtaccacgttatgtttgtaagtggcttagtgttaacttttctccaaaaggcagcagggtctggaacaggagactggcccagtctggcatctggagaggatggtggttgtggtgttttcacagctcctccattaccacctggtatcatttagtattactttgcaaactgaatcataaatcaactcatttaatgtagagaagggcaaaagttgctgagaaatgttttgtgggttggtgcccggagcttcaactctgggagggtgcctgacttgacagtatcaccttagtcactaaggaaaaagagatccagggcttcagaccttcaaaacaattattacttgctgagatggcaaaaacaattgtagagtgcttcaatggctgagctttaaacagtttgttaaactacagattaaatacgaatgattcttttttctttgagacagggcctcattctgttgcccaggctggagttgcagtggcacagtcatagctcacagcagccacaacctcataggctcaggcaatcctcccacctcagcctcctaagtagctgggactacaggcacgcaccacgtgccacaacacccagctaatttttgtattttttgtagagacagggtctcattatgctgcccaggctggtcttgaactcctgggctcaagagatccttctgccttggcctcccaaagtgctgagattacagatgtgagacactgtgcccagccagtaatgatttttcgtatgaccaaaccattgaagaaaatttacacttatttttggtaaatgaaataccaaaaaaaaactttatcagatgatggcctgatatctcctgcactgatttctgccccacataccctttttagattgaaccaaattagaaatataaaccagatgattaaaaattaggtatgattcattttccagctaatcggctttacttctgttgctccctcttctaaatgcaaaatgaatccaagcagtgctggatttaaggaagcatacataattaatattacagggcaggcaggagagctgggcatgtggtctcataccccacatgtagttaggtaagcatgtatgtttttcagctgcatttatttcttagttattcctagtggcaaatgtggggggttgatgatcactgtgaaacagcagcttataaaattcaccctttattatcaacagactaaacttcctattttgcgtagatgctcctgtgcacgcctttattttacacggaatgtaaaatattgtaatgactgattttcctttgagactgtaatacaggtaatgttcctattcaactttgtaaaccaagacctgacacacagtaggtattttaaaaactgttttgatgtgaccaaaattatacagaaaaaaagagaagtacaccaggattttaaagtctcttttttttttttatttttcacaaaggatttgctgtaagtcttcaagtcattttgtccaatccaaaagctgtatttaagcgtcgtggatcccagccagggatgcaagaatctgactttctcaaacagataacaacagtcgaagaactggaaccgaaagcaaataactgcactaaggtattcattacacttgtgctgcccgacctcgagtgtcaccatgaagagtgcgctacccaagctatttccttccccttcaggttctcgtgtggcacactcggacagagaaggttaatctagccaacgagccaaagtaccacctggacacagtgaaaattgaggtataaattgaagcagcaactggtgcagtttgtccagccagtggatccatatggaagaggatgtttggagtttaggctacagagcattcaggtattgtttgttttacttcagtacagcagcctttcttgtcatctgatggacatctgtttaaatggagcttgtcagttaacataagctaattggatggttggtacaaaatgtatgttttgtcttcatttgttctgcatgttttctctacaacaactaaattggaagatttttttgtacagtgccgatactgcaagataccactcttgagtatatattttttctttttctccaatttgcccttataattggtagacttgaacaggttggtagacttgaacaggtttttaaaacagacaagtattttgtcagctaaacgttcctgatgattcctgactttgcaatactaagtaatttttggaaggttagtggcagtatacatcataggaaataaaaacccacaaatgaaaaggtctatggagtcatgtttaatgtagggaaataacattttgtcaatactaggcaccataaaatgtaaacacaattactgtcataaacctagatataccttcaaggattgaagattgaaagtggctttgttttagttagttaccctgtttgcatatagtgcagaaaaaggtcttcatgttagcactatgtacattaagaagagatccaaattacaagagaggcagataaaatttgaattctttaagcattcattaaacgaagttttggagtaacatccacgtttatcttcctttcactaatcacgttccctgttaagcacatcataacaacagcacagtgaagtgaatgatgaaataagagcattttgatacactagaaaacagtgctcagtgagacatttacattctatttatatgattaaacatttgatcatacagtaccttcctacaggattactggctaattttggggtggggtttatactattagaggtattactaacatgataactacttcccttatatgcaaacattagagctataattttattgagaggaaaactgattttgcaagttgagcagcttctcaaataatgcagtacatgaaatcatgggaaatatgagcaaagctgcccttgacataaaatgatttatcaacctgcttttcaccacatcaaattgaatcagtacagaccaacacggtcaatcagatcattcttaatatgaacaaatgggtaaaaagaaaaaaaatatgcatatgaataaacaggggaactagatgcgtttcagcaaggaatgtcaggtggtagttctggatgaaacttgtattgcagttttcatttccacagttgtgtgctgagagtctgacctgatgagcttccagaccatcctgctgttgtgctggagggctggccaaaacctgcagtaggggttgcactactgatactcatgccagccatctgctgattcatctgtgaaacatataaaaggcttagttcaagaggcttacttcacttttaattcttgtttctttagccacacagttggtcattttttcattaatgtgacaactagtccaagcactggaataaaaacagagtaccatacaaatatttcttaaagcaaatagctactttgttcccttctttatctactttctagatacagtttccccaaagattaaccacaacttacttaaaaaaaaataccaaagcaatcttgggattttaatgagtccgctactctaactaactttcacctacactaggatattgtgctttaactactaaggagtaagaaaattttaggaagtaaaatagtctaaaattatcctataaactttgtatgatagatattattctctattaaaatcttatatacttcctaaatatttttaaagtggtcataaagcatttatttctctcgctgatctaacaacataaacatctaaaatttattttcattgtatgcaataaagcataagattacatgtatttttcttcaagactggagtcaaatatatatatatataagcatcttaaccctgtgattctcttacttccaaaattggtgataagagaaggaaaggcaagatttaccatatagtgagtgggtttaaaacttacactcagagttagactgtgttcttaatttaatacatttgacttgacttatttacagtttcaaagacactaacataaactacatcactaatcaggcataagtgtctgaagaagcagatcacgtcttcatacctactaaaggacattttaaccaccttgtcgttggccagtagattgcactgatggagtgctggagaacagcatcacccttctgcattatctggaagtaagagccagtattaactccttcctggttcatctagcaccttaacctgagctgggtgtgcttcagcatgttgaccatgtgactgacacttagcacatacaattttttagattcccagcgggtagagaccaatgttttacctatattcttgtaaatggtggtagcaaaattaactgtgatatatagtgattgtgctaatgttagaaatcactctagactattccctgaatgctctaaaggtaaaacaagtgaccaaacagaaaccaagattgccaaaatgctggaggaacatcaatgggaagtgtaaaaggaagaagagtgggagcatgaacctctctaagagcctttgtctgtgcagctagagaaaagtcagaacacagcacctgaaatagaaatgttctatctcagctctaacttaggtagaaataggattttataatatgaggggatgtctggttcacaccttatgggaattgaatctttttgtactctttttaaacataaaagtcattatagggtatgtaaaaagaaaatacaactttacaaaggtttctcaacaaaaagaatttttacagagccatggggcagtaatcatccgacctgaaaaatagccttagatccctcataaaatagtgctttgagaatatgaggctagatttttattttctaataaaagatcctaaaattattagtgaagctaagttgtctaagtggactgtaaaaatgtcccaccagcaagctggataaagcttagtgctaatctcagaggtgacagagagggagtctcatgatgcctgagataatttctggccattagtggtgttcacgttacagttacattacaatttgaaatgaaagatgtttaaccttttttttacagaatactctaaaatagggataataacacatcatttgtctatctgatacaacttcataatatttatagatacttttgaccctataacatattatccctattgaattctttctgccagatcactagacttaaaaaaaaaaaaaaaaaaaaaaaaaaaagatttagaaaataaatctggtttgatttgggagaagctagaaagtaaatgacccctacctgtgagaggctccactggggctgctgagcttgcggcaggccaaacttactctggggtgcacccatttgtcccaccattcctccttgggggccaacaacgttctgaggaagtggcatcacaccagtttgtgcatttcccataaacccattgggcatgggcatgcccaccatcatgcttggactctgtcccatcacatttcctataaggccaggagctgcaggcacaggcacgcccatcgatggaaagccctgaaatgcagctggtgcttgtgaggtaaatggtatatttgtgggtcccataaatacacctgcaccacaaaaagaaaatgaatgaagacagagctatcacgtgtagttgcactcatctctataatcacagaaaaattgcctttctgaactactcacagcaaacattttaattccagtttggctgctcctactactcagaccaacccacacctaaaccctgagagctggttgtttctaggatgcagacaaatcagttattaacctgagtaaatttaattaagaaatgtaaatcatatgcaacagccacacaaaatatcttccactgtgaagaccaaactatgtagcatgacatcatacactgttttattgctgatttgtaccactggtcccccagtacgaaacagggaagtgagagctgactatatctcgcttcaataggtgtagtgggctgcccaacaattttagctcacatgtgaaatgcagctcattattttaaaggaaatggtgtgaaagattaaaactctgtaaacaataaggcttatgctaatattttgttatgattacaaaaaaattcatagattttttttaatccatgtggtaactcaagactgtttacctgcagagaaaatacactgtacgcagtcataaacttcatgcaaatcgtttcaataattcatcaaagataatccatgttctataagcttgtgaaacaacatttagtgatctatgaacagcttgttaattccaaataaagttctgtgaatcctgtacatgcctcttaattttttaattctaatgctcattcatttcggcttcatagttgtataaactgcaacaacaaaagcactcactacatggaacaataaaagatatataattgatcttattatataattacaaaggatgtacttctagtaatgtcactgaaagcagatatcaaaattcattaccaggagtactttgctgttgaatggttcctgtgccatacagagataagatggagtctttggaaagttgtttctttgccacttcttctgattttgtagtttgctcagtgaataaatctagatccccagatgttactgtagacagggttgcagctgctggtgcagagggtgtcccctgagacaaacaccaaaataagctatcaaattctgcatagtaaagcgcagcttatccattacttaaaatccaaataaagttataaaattagataggaatcaaacaattgtagaaggtaaaatggtgccattcaagaggatcacttacaagcccaagcccatataaaaacatctacaatcaagacagtacttcttaatttgaatctgttaatgtaggtagactgaagcattttcacagtaagttgcatttactacctaaggtgacaccaagtttttgctcatcaaatcctggggctcaacaatagttagagatgagaggaccaccactccatagcaactactgcttcaagaaactggtatcctttggaataaagaacatttctacaactacaacagactgtaagaggatttgcaatggctacttaaaaggttttatcttttcaaaacctgtatcataggatttttatacatctaatcagttttaactacaatattagactgcttctaatctatccagaaatgaaggtacagcaaaactttgaccatctattgtctgaacatatcctgcccttcacttttggacaagggggcaaatgaacacaaatacaaataaacatgtagatatttaatataaaatattctcaatctcatatcttgcacacactattatacaatcacaactgctaaccttaatcatctccgtagtcactaaacattaaatcacattcacatgttatatggacttgttttgaatatgaagagagtttcaaagaattctatgaagactagtaaaagctggctgatccttctcaaactacagaataaggtgagttgcaagtggaaattaaattcaaacatttaatgtcctcctagaacaccatgcaataagttaccatccaaacattgtacttataaactacacagtattttgaatcttatgactaagcaagaattgtaagcgacaaaaagccgcttaattttccaaaaattcaaatatgtaagaaattagatatcatggaatactaaatatcacaatacccctgaataaaatatatctaagctaccaatgaagcagcagcagatcgtagagctaagagcatgggctggagcctgtctgccaggactagagcctgcccccatgactttctgtggtacactcagacatgttactttacttctcctttcagtctctctcctataaacttgggataagcttaatgatcacaaaagtgttctgcacaatggttggattaagtacttggtgtttattgttaatattgtttataaaacaaagcaactacatcactaagtgatctttttatcacacttagtatctgttcaacctaaaagtctgctgaaaaccctggggtctattccctgtggataagagacaactataagaaaacccaaaatgttgggaagctatgattccactctcatagtagagcagcctaatattcacatactgtaaacatcataatatgaaatatctacctcaacaaggacacagtctaaaaacagccaaaccaatcagcaggactagtaagcactcaaatgtccacttactttctggtgctccattcgccagcactacgaccccaggataaaagggaaacaacttctgcctctcattttacacttcaggaagctgcagagcatctaatcgaaggctctctggccttctgggacccaagggcttaaccaagaaaaaacaggacttagcccttgtgtatgtctaggtactgttggtatatgtatatgtatatgtatatgtatatgtatatgtatatgtatatgtatatgtatatgtaatgtatatgtatatgaaagaacaggaaaggggtttctccatgtcaacaatgaagactctggaactgttcctctccagcccccaaaacacaggtacactcctgtcagctaagtatttctaactaacccctttaagaaagactagaccccagacaggtaaggcagatggtaaaatcaatctatttcatattcataagttagaaaatattgtactagaatttgtatatactcagaaaataacacaaggagtgaaagaatacagggttcagaagaattcaaaatcttggtgtccacaactagtttgagctcaacttcacatattaaaaacccaccaaaatgactaaattacatggtagcaatatatgcatagaatctgtagtttcagcaccatcccccattttcaaaggcattattttgaaaatatgtctggatttttttttttttccagacgaagtctcactcttgtcccccaggctggagtgcaatggcgtgatctccgctcactgcaacctctgcctcccgggttcaagcaattctcctgcctcagcctcccgagtaactgggattacaggcgcacgccaccacgcccagctaatttttgtattttaaggagagatggggtttcaccatgttggccaggctggtgttgaactcctggcctcaggtgatccacccacctcagcctcccaaagtgctgggattacaggcatgaaccaccatacctggccaaatatgtctggattttaatctctacatgaagtttagacgaaagatactactgttcaccaaatattttacagggctcaacataacttgtacagtctaaccagtgctcaacataacagtgttccaaaagaagtattagatatgattttaaaaattaaccctatgtcctaccaggtaatgctcagaatgcctaaagtctgaaggccagctgccacccctcttaaagccagaggctacactccttgtcatggcactacttgtgcttaagaattaaacgaagtctgcattgttctacttgctgctttaatacagaacagaacacgtgaagtacactgaaacctcagaggtgggatctaactctcttaagcagttgcaaagcaactgtcagaccccagtgacagtgctaaataagtctagcaggtataacagccgcactacaatgctagactaaaaataaatggcttttcacattctggttgtcaaatatcctaaatgcttctttccaaagacacaatattagacaattttgtcacatgtacacctatgcctgtaccaatttgtaaggtaattaatcttaattgaaataacagtaacaatattctcttttttatgtgtgttacaggaggggaagaaggggcaaagccataaaataagctattttgctgaaaataaacactactgctgcagacaattttgataaagatccatttaatcattcctaagaaatctacttgttccattctaatggtaactatataatgactatcataataacaataaatatgtgcaacagaaatatgttcctagccttataagacattgactttttcttattaaaactgtctaccagaacaattcagatttgactcagtttttctatggaaaaggaaatattttatctcaaaaattatgctgcacaaactgcttgtttatttgtaaagtataaacttaagatagaatcttaatgttgtatgcttaagagtagtttgtttcctgaaagttcatacagttcacattacaaaaattccatgtaatgttaagaaggcaattcaaaatttcttcaccattaatacttttattaaaatatcccgatcattattattactgttctagatttttaaaaaatcacttaaaaaaaaaagcaaggtagattttaaggctaacttaaaacataatttaccttcattttgcctttattttaaaaagacagtactaaatttgctagaacttctgcagtcaatatttacaaacagccacagttttaaaagctctgaagtaagtgaccttgttgatctcaggaaagttgaggtagtcagggtttttccacttgttcattctaaatactgttgtttccctaaagcaagggttagaactttaaagacagtgaatattttaggttttgtgggctatacattctctgtttttaatatttaactctgcttttgtagcaggaaagcagccacatacagtacctaaaccagtgggagtggctgtgtgccaataaaactttatttgcaaaaacaagctgctggcttagtttgctaaactctagcctaaagaacaggagacttttaaatcagttactgctcagaaacaattcttccaaaattgaaattttgaaacttttcaaaaaggaaataagcagtgaccatataaaaccatattcttatcacatacctgagctgggggcatgacagttgcaggtaagggattagaaatcatcggtccaaagatgtccagatcatcgttcaggggtggcaccgttgtgttcccgttggtcactggtgccacagcagggccatctgaaaagaatatagattctcgtcttaacgtagaatatcttaaattacttgaaacatggcattattttaaaaattgatatatggttaaaaaaaaagaacagttcaaaagttggtaaaacatttgttctccttctacctacccccgatcccctttcccaaagaaaccatttccagttttgttgattcccccagaaatattctttatccactggtttctaggtatatatccaaacctcctttttaaccaatggtatcatactattcacattattttgcaccctaattttttttaataagatcatagatttttatggtgcttcctatatgccaggcactgttctgggtacttcacatgtatcaactcatttaatcctcataaccttatgaggtaaaaactacttttgagataaggggctaaggtggaatttgataccacacttattaataatccctctccataaatgtatgtgtgagggtgtgtgtgttttggagataatatcatttttacctaccatggaaataagttttgatgatctaaaacatctgaaatgttatgttttgaagtcacaacatggaagaaaactagatagaaaaaacaaaacacacatacaatacttaaactgattctacaggaagcatccataaaactccaaaataagtcctttatttattccagcacagccacttttagtgatggctgtaccaagccactgcaatgtacagggaaagggactctgacagagcttcctacttaaaaattcaaattaaaaaacagtttttaaaactgtaatttcaagaattcaaaaccggtttattttatatcccctttttatgttagtgaacatttataagggctgggggcaggagatgaagtggagtgctataggtcgagtttgcatgcacagcactccaggactggaacatctcacaaggttcagttttctgtaaccacaaccaagttaacagttcagagcatcacaactccagcctcttgagagttatagcctaattaaccttctatcttaacaatttacagtctcatttgatatctctttggtagaccatactctcatcaaagggaaatctgtcatctttgaaaaccttttcaacaatgaatggggtatcttgcacaaagtagatactcaaatactgacaaattcaatggaggatctaccatctcattcatatttccaccacaatccacagaaacttagagagttcttgtctttttccaagtacaactagagaaattggtatcttttatttccctgtttaagcttcaattacaaagaattattaacacatagtcacgataaaatattttttgctatttaatttacaaaagagtgtgtaaagcccaaattaggttaatctgaaagttattcaactgcaaatttttcaagtcattttcagtgatatcacattatcacaaccattaaaagaaatatattgatatgtattatacatatctatatcaagtactatggacaattaaaaggtgaagaaataaaacaatgtacatagattataatttacaatatatagaattttaaactgagacaactatcaaagaattaagactcatacatgaaaatactttttttcatttctaaccctttcaaatggcaatattcactttaaagttagacctccttaaagcgctactttgttttccagttcattccataccccatttacatgatgtatagtacattataaatatcagccagaaataaagtgatattttaaagggacaaggcattctaggtttaaaaacacaacta

SEQ ID NO: 565 - DNA, 2509 bp, Homo sapiens
gttctgagaagacaagagcaagggactgagagcaggcttccgctgcggcgcgcgaacacagccgggacacaacccccagcgtctccacccgctcctcgccaccccggcgggaatgtgaggaaggaaagcccccagcgccgccgcccgccctcgaaggcgtcccagagagcgtcctgggggcccgcggctggagcccttgtgcccgcagcaccgccggactggagcggcgaggcgcaccgggtgccgcttctcggcttccactcttcagaaagagcgcggtggggatcagcgcctttcccgcactcggcacaactccgggaccggcggcgcgcggctggaccgagtcccgcttcccgccagctcacctggagtcgggggcagcccctgcccgcccgcctgcaccccttgtcgctctagcttgcgcgaacctgccgctcctccacgcccaggtagtgagccccgcggctccaggtctctgcagcgccctcggccccatggacagcgcacccatcaccactccctaagtgctggcgccgccgctgtccaagctgcgcactggggtccctcggctcgcccctctctggggtgtccgagaggccagggagcgtgcaccatgaagtccgcgcttttcacccgcttctttatcctcctgccctggatcctaattgtcatcatcatgctcgacgtggacacgcgcaggccagtgcccccgctcaccccgcgcccctacttctctccctacgcggtgggccgcgggggcgcccgactcccgctccgcaggggcggcccggctcacgggacccaaaagcgcaaccagtctcggccgcagccacagccggagccgcagctgcccaccatctatgccatcacgcccacctacagccgcccggtgcagaaagcggagctgacccgcctggccaacacgttccgccaggtggcgcagctgcactggatcctggtggaggacgcggcggcgcgcagcgagctggtgagccgcttcctggcgcgggccgggctgcccagcactcacctgcacgtgcccacgccgcggcgctacaagcggcccgggctgccgcgcgccactgagcagcgcaacgcgggcctcgcctggctgcgccagaggcaccagcaccagcgcgcgcagcccggcgtgctcttcttcgctgacgacgacaacacctatagtctggagctcttccaggagatgcgaaccacccgcaaggtctccgtctggcctgtgggcctggttggtgggcggcgctacgaacgtccgctggtggaaaacggcaaagttgttggctggtacaccggctggagagcagacaggccttttgccatcgacatggcaggatttgctgtaagtcttcaagtcattttgtccaatccaaaagctgtatttaagcgtcgtggatcccagccagggatgcaagaatctgactttctcaaacagataacaacagtcgaagaactggaaccgaaagcaaataactgcactaaggttctcgtgtggcacactcggacagagaaggttaatctagccaacgagccaaagtaccacctggacacagtgaaaattgaggtataaattgaagcagcaactggtgcagtttgtccagccagtggatccatatggaagaggatgtttggagtttaggctacagagcattcaggtattgtttgttttacttcagtacagcagcctttcttgtcatctgatggacatctgtttaaatggagcttgtcagttaacataagctaattggatggttggtacaaaatgtatgttttgtcttcatttgttctgcatgttttctctacaacaactaaattggaagatttttttgtacagtgccgatactgcaagataccactcttgagtatatattttttctttttctccaatttgcccttataattggtagacttgaacaggttggtagacttgaacaggtttttaaaacagacaagtattttgtcagctaaacgttcctgatgattcctgactttgcaatactaagtaatttttggaaggttagtggcagtatacatcataggaaataaaaacccacaaatgaaaaggtctatggagtcatgtttaatgtagggaaataacattttgtcaatactaggcaccataaaatgtaaacacaattactgtcataaacctagatataccttcaaggattgaagattgaaagtggctttgttttagttagttaccctgtttgcatatagtgcagaaaaaggtcttcatgttagcactatgtacattaagaagagatccaaattacaagagaggcagataaaatttgaattctttaagcattcattaaacgaagttttggagtaacatccacgtttatcttcctttcactaatcacgttccctgttaagcacatcataacaacagcacagtgaagtgaatgatgaaataagagcattttgatacactagaaaacagtgctcagtgagacatttacattctatttatatgattaaacatttgatc

SEQ ID NO: 566 - protein, 323 aa, Homo sapiens
MKSALFTRFFILLPWILIVIIMLDVDTRRPVPPLTPRPYFSPYAVGRGGARLPLRRGGPAHGTQKRNQSRPQPQPEPQLPTIYAITPTYSRPVQKAELTRLANTFRQVAQLHWILVEDAAARSELVSRFLARAGLPSTHLHVPTPRRYKRPGLPRATEQRNAGLAWLRQRHQHQRAQPGVLFFADDDNTYSLELFQEMRTTRKVSVWPVGLVGGRRYERPLVENGKVVGWYTGWRADRPFAIDMAGFAVSLQVILSNPKAVFKRRGSQPGMQESDFLKQITTVEELEPKANNCTKVLVWHTRTEKVNLANEPKYHLDTVKIEV

SEQ ID NO: 567 - DNA, 236246 bp, Mus musculus
  misc_feature (1)...(236246): n = A,T,C or G
tgtgacattggctaatttttgactctgggtttgatcaaacatttactgacataccttaaaccaagatgagttaggctaagatgtagagccctgagttgaacactgtggtccttgtattcaagcaaagcttgcatacactgcaacatagtacttcatttgtgactcatttgtttcaaaatcacgttaatgcttttgtctgaaggcatcctccagtcgggctaggtgggactgtctatacagatttcttgttatgctatacatttcttgagactgagactgtgcaccggactttgctgtgatgtgttaaagagtttgatcatctgaacttcattctttatgtctttctctagaaggtaccctgatgcaccatcccttcagctagtgctttgagactttgagcctggggggtgttccccaacaatcacctaagtgctactacttcagtgacttgtgttcattgcaaagtccagtgacatttcctattcatcccgttaggtaggggccttggtgaactatgttctccaccacattaataagttgaagtcccaactccagtgcctcagaatatgagtgtctttggagatagtatttaataagaaaattgaggtataaagatgggctctaatctaacatgatgggttatcttttgagagccctgaaagagactacccctccttttttcccaattaattaatttattcaatttacatcccaatcacagttcccctctccttccaggtccccctcacggcccccatgcccccttcatctttgagacgggcgaacccccacttcccgcataccaacccaccctgacacctcaagtcactgtgggactagatacatcctcttccactgagatcagccaacatagctgagctaggggaacaggattcacaggcaggcaccagagtcagggtaagcccccattccagttgttgggggacctgcatatgtgcagcagggctaggtctagccctttgtatgaactttggctggttgttcagtctctgggagcccccaagaagaccttacccttaacagtttatgttaataaactttaagcagattcctttttaatgcatgctgtctactttgtaaaacgttaagaccattttccaaggaggaacactggcttttagatgtgatcatctatcactcaagttggaatgaaatcttggcatccttaacggagtcatatttacaccttcttcagtttccaaatctcagccagtggaaaatattttcatcaggagtttcgatcggaaagccaaaatcaagagtgaaaacctgtctttgaggaggattacatcatatggcacatgaaagcccatctggcttaagtcagggataaatatgtagaagttcagtccagttcagcatcccgcagtggagtgtctgttctgggatagaggcagagcagaaaacccagcgagatggtctcttccatctcaggaccttgcggtcgaggaatcagacttgtgtttaaaaaataaattttcagagaagtgtgacttcacatggcagttaaaggctgccaggatctggctggggtgatgtgaaatgacctaatgacctgtttactttagacaatctcaccgaggaggtcattaggacagtgcatcaaaatgctgtccatgtgcatggtaaaactggggttgagggcagttcttggatttttttaggcagtctgtttttcaggccagctcctttgaacatcactattgaagatgattggaggatgatgtgccctgtacaatggagttcagcccaacttaaatttaaacagagaatagaattctactaaatgcttaggcttgaattggagattttaaaaaccgtgcatctctcataatctttggacactgtcagaactcttccagaaagttaatttgaccagagaaatgaagcctttggccttgtggtgcctacacaattatctatgtaagatgtggctcataaatactaatatttagagttagcttcacattgctaaagcaaaggtgaacttttaagaaagtcctgtattcctttcagtctcatatctagaaacaatcctcgaggagaacagctttgctgctaccatgttcatgtgaggttcacctcacctcaccaacaaacacattggtctagcctggggattctgtggtcagcagcacacttttcgaatctgagggacatgcccaaattaacacacaaacctccctcccattgcaaacttctagatgtaatcagggtgctgagaaggtctgggcaggacaaagtgtgtctgggatgttaagggggtccctattatgtcattattgcaaggtgcatgtgtgcatgcacatgcatgcatgacgtgtgtgtgtgtgtgtgtgtgtgtgtgtgtgtctgtgtgtggttactggcaagtggaggtatgaaatcaggcaaaggtgtggcttactgaaaagaaccttcatgccatgcctccatagggttcagagacaagacagaggaggaggagggattgtgatgtgaaggggaacagaagttacttctctggaaatctccccactgagatgtcaggaatccattttccaaaatctcattttcttttacaatgttacaaggtctctatgtattccctcagaagagaaagatggcacaaagctcccatcaatgcatctctgttctgaaggctgctagtgtcttggattgaatcactgtctgtccttcagtatgcattcttcattactatatcaattaaatctttagacttttcatataaatcctgaattgtatcagagtccaagagaaagcagatggtacactcaaaatatgttaatttttttgtgtgtttgtgataatctatgaacatgtgctctaagtcagtttgttatgttgctagtcctgtggagggacaggaattgttaccagacccaaagccagtgggccattcaacatcagccaccttgagatgtgtagtgattgaagaacacagccctacagggagacggcttaggaagtaaacgtgttgtgcccgacccccctcccccccacttcacttcttcaggtctccttctgggactaagcttaagtgtaagcacatggcacttaaaaaatgcttataaatcccaaacaagctgctatcagaaagcaagagagagggatggagtgatttttttaggtaagggatgggaaattaaatacacctggaaggtgacctgcttatgtccccgggccaatactgcttgctccagctgtagttcatttgtttacatttgaggggtttgttttttgttttgttttgttttttaaacaaaggccaaatttatttgtccatttcccttcccgcagtggatagtatctggtgtcttagcgttttgatgtgcctgggaatattctttgtttgtttgtttgttttttgtttttcgagacagggtttctctgtatagccctggctgtcctggaactcactctctagaccaggctggcctctaactcagaaatcctcctgcctctgcctctcgagtgctgggatcaaaggcgtgagccaccacgcctagccacctgtgaatcttcttgtgtgttttggtgtatgggcacagaatttctctgggaactcttcagtggttagatttgaactcttgagctggggcaaacacgtggacacctccaggtcacactagtttagcatcggttcatctgtttctgaagcatgtgacgtcttcttgagattctgcattctcagacctggactggggtgttcctgtgcgtgaccttctccctggttgttcttgtgctttcacgcgttcttatgcatttagtcagcactgtttcctctgccccgaaaatgccccctccttgtttactatttgtttatctacttatatttatggagatgggggtgtcattgcatacagggtggcccatccttggggatgatcctcctgcctccgtttctctgtagctggggttacagtatgtgccaccttgttggtttatgtgctgcacaggatcgggcccagggtttcctgcacactaggtaggcattctactaactgtggcatatcccaagccccgcctttttttttttactagttatatttggatattaattctgtgttggttgcaactgttccaattctgtggatattagaatacgtgtgtacttaattttagacttagtttttttttttattctaatgtatcttcccaaatcaatctgttctttttatattcaccttcattatccgctcttgggacctgttactttttagcttgtgcttttaaagtggttaaaagatatacagcacagaattgtccattttaagtgtacagttcagtgacagtgtggacattcaattcattgcacgggcatcattgctctccagctccaaactgtttaatatttttcttctttgtagtttattttataattctgtatctttctctttctctctgtgtgtctctctgtttctctccgtctgtttctctgtctctctctgtgcgtgtgtgtgtatgtgtgtgtgtatgtctatgtatgggcatatgtacatgagtccagaaaagggggttgggtctccttgtgctagagtcacaaggctgttgctgtctgtctgatatgggtgctgggaactgaactggagccttctgcaagagaagtacatgctctttattactaaaccctctctccagcctccactgcttttattagtgtctcccccacccctgccccatcttagttagaattttactgctgtgaacagacaccatgaccaaggcaactcctagaaggacaacagttaattggggctggcttacaggttcagaggtttggtccatcatcatcaaggtgggagcagggcagcatctaggcaggcatggagcaggcagagctgagagttctacatcttcatctgaaggctgatagtggaagactcacttccaggcagctaagatgagggtcttaaagcccacgcccacagtgacacacctactccaacaaggccacagctcctaatagtgccactcctaatagtgccctgggtcaagcatacaaaccatcacacccccattttgaatgtggttttgctgtgctgttccaagtggcttccagaccttaggtgtaagccatctcattacattagtctcccaaatagcagagagtacaggtgcctgccaactgtgcctgaaacatcatgcattgtttaaggacttctttgggggcgaaacagtataaagaccatgtctatatttgttctgaaagttttactagtttgtctctcttgagtaggtcttccactagctggagttggtatctgtgggtagtgagagatagagaataaaactgctctcccacagtcagtcatttgtccttgtgtcatttggaactgtccatctttgctccattgacttgagcagtggatttgtcacatgtaggcttatttataggtgtgggactgcttctggattctctgttctgctcagttaacttgaatattcctgttccaatatcacagggttgtaagactgtaacaatcttcccattggtacacgcttcaaaggtacaaagataaaatccttacttttcttactgtcgttgcttcgtagtcacatgcttatccagccttccccagccactcaatctagaatttctaaggctcctccaaacactatgcatactccttctctggttgaattgtttattgcttggcagctatttatattaattcataggttagtttgtttatttcgtttcccattagaccataaagttctagagggtagaggtgtgtggctcttccgtcagaaaacactgcctggcacttagtagggctctctgatgtttccagaataaaagaaaccgtgcttatatctgggaggccatttcttcctccccgtagtacctcttaagggaatgtttcctctcctgctctcttgaccttcactgatggaagccaagggagaaagaacgggatggttgtttctagactttttccatagccaaactctcggaaataggaaatgaagtcaggagggtggagggagcagaaggtggccaagtttttatgggtcagccactctgctggaaagacttcttttcctgtgactccatgtgagcagggctggaagggctgtggtcacagatgctctcttggtaaagatccttagcacatcctccctttaggataacataacccaaactggaaaagaacagggatgcactctgacttaaccaaatatggcgactaaaccctcaactgtgtaatgcaccacacaatagttctggggcaacgacgtcaactacgggtgaatgccagctgggttagacggtctgcagctggtattgtccagcagcggctccgtgcttggtgctcagcaatgattcatggaaattatgctgcaaaaggtgctctgtgctttattctgggataaactgaggagccgagtcattccagaaggaatgcgtatacagttttcagatgagtgctcgaagtttcttaggttagagtcacatttgattcaaaccatctgtttaatgtgaagccgaacccagcatctttccaggactcatcaatctcgtttcataaataattattaaaggctcttggaatccgggagctgtggttacagaagtggcacagtcgtccctgcttgtgactgcttatggtttagcgaaagtaaaattgtgcttgtgtatatatatatttttccctttatgaaatcagtgtccatagtttgctcagtcttttttgccggggccattatattaatccatcattgttgatgagatggatgtatgagagctcactgacagcatctctgagatgtccatatcattgctgggacagggatgtcaaccttccaattgcctctggatacagaaaacaatttatatagtgtgcagtgacctaccctgatactaggaaattacgacgctggcatagctgatagactcagcctattttcttctctgagatcaaatataggtttttagggggatggaaagatggctcaagcagtcctgagcactctctgctcttccagagccctcaggttccaatcccagcccccacctggtgaattacagcagcctgtaactcgtcccagggcatctgatgccctcttctggcctctgtttgtcaatgcatttaacacataaatactcaaaaccacccctaccaatatatatatacaaaaacaaaatagatttttggtatgttgtaaaggcagctattccatggcataataagatttttgtgtggttaaacatattttttctagttctttatgaattagtcataaaatgacattacttatgtcatattttaactttgaaggtaggcgtttaagagattgtattgaaaggtccaaacaccttggggataagaattttcacttccctgggaagcaaaccaagctcctcaaaggaagccactgacaatgggccgttgatcagtgacagccctgacttagggaggataagtctccagctgattccatttctgggacacctggccagaggagataacaaggccgcagccaagctggtctctgaaactcttcatggtttcactaaatataatagaactaatatagcagccaatcagacttgtcctaatggcactgctttgactcctatcaatcacattagaggttaccttacccttctggaaaattcccctagccctgcatcaaagggggcttatgagcccctcaagccgttgacatttggatgaatggttgaccattcatgccatgctgtttgctggcagtttctgcagaataagcacctttgcatgccatttgagtctagggtctctctttagcaattcttggaccctaatagtataaaggggtacatgaagagaaatcaaagtggctgtcaaaaaaaaaaaaaaagcttaaaatcaaatagccagggaattcttaacaagccttaaatcatttgaaactacaaaattggctgactcataggtgcatttttttaaagaagacaatattttttagtggttcatgtttggaaaagtctgtggtagagggttataaacataaaaataaatcgggcacagtggcacgtgccttaaatcctagcactggtgaggcagaagcagctctttgtcagttcaaggtcagccagatctacacgtgccatttcagaccagcctggcttacatagtgagaccttgttttataatcagagtgtggagaaaataatggcaccatatggggatcataaggaatgagggtgggacttcaagggaacgacatatgtggcaacagtgagctcttttattgtgaaatatttgccaattttgcaaggaaaaaatttcattgccgacagtagtaataaacattttcatacttttatgagctaattgttcagttcctgttaacattttctctaataaactcatactctttctgactgaaaaataattctggggacttttttagctgcacaatttaatgttttttttgttgttgttttgttttgttttgttagctgcacaatttaatgtttttttttttttttttgttttgtttgtttttttttgttttttttcgagacagggtttctctgtgtagccctagctgtcctggaactcactcagtagaccaggctggtcttgaacacagaaatccgcctgcctcagcctctcaagtggtgggattataggcgtgcgccaccacgcccagctttatgtttttatatattcagatatttagttttgttttctttttattctttgtgatttcacttaaatttccatggtgtcctcattctaatcacggtatctctccttctgtgcttcagcccccccccccacacacacaaggcagttaatatattttaggagtttctatggatttggtgatgataattgtatataggccacagaggagaagtgagtaccctactgtcatacgaaagaaatcaggccagtgaggttggcagaatggagtcccctgtcaggaatcctttggaagtcaccgttcttttatgtgtaaattggggctaattaactagagtctgttttgtgtggcttgagaataaaaattgacagataaacaggttccgtttcaagggacagccgccgatttagtctatcttaggtgggtactttgaggcttcaaagtactaggatatactatgcatttctaaacccgaccactcccagccccatcccagagcttgtgggtggcttttgtagggggacacgccgcctcgaacacactgtagaccgcagcggccgtccaggctcttaggacgccacctagctggcctcgctgtggtcccggagcgctttttgctaagtcctgcaggttcctccgctccccgaagtctatgctcgctcgcgtgttccctggcgagcatcgcgcggggacgagcaaaccgacgtcattcttacagctcttttctcgtccggaagatgaaggcagcgttgctaacaacgaggagggacagtccttgtgtcgtgggcaaagcggacacggcggctccttcccacctcctggaatgacagaggggaggccacccccggtaaagcgcccgcaagcttccggagcctcagttaccctgactctggctgcagcgcgggaatgtttgccgtttgcactgcagccccaagcccaaaggcgtctccgcgcagagagggcacctggggttctggaaaacaaaaacaaaaaacccaacaaaatctccatcacttgcattcaagatatcttagggcgggtgttgcggctcagcctaagcccagcacttgtgggaggttgaggcaggaggatcgccaccaattccaagttagcctgggcttcggtgcgagacatggtctcaaaagaactcacatccgtcaacaaaacaaaaaacaaaaccagcatcaaaaagtcggtcggcgtgcaaaacgctccagacgcgcactaccttcagtcgctaccgcgccacaccgcggtgggcggggcgccagggggtgggacctctgcgcatcacttccgcttcccgttccaaatgaactctcccgccactgggagagagcggctgtcagcgcgggtgtttctttcagcctggctgctggctggttaaacaatctactgcggctttatttgggacggagagaagccgtggagttggaagcttgtgagctgacctggtgggaccgagtgacaggtggtgtcgggtcggagggaggctccgggtgggatggcggggagggcggcccgggaaggcgctggggccggaagggaagttaaggcacttttgactattctggaaaggctggattccagagttagaagtacgagaagtaagcctctcatctaggtagaatctactttgctttaccttgatttcaggaatttaacacccccctcccctcaaacctcatcttgtcttgggttcgcacatgcctgagggtggcaggcagcaacacttagtgatcactctttggcttacaagggccaccgtctacatataccccagtttgagcccttcccacattcgcccctgttattacagatgtgtatagaaaatctagacaacacagcagggtctaggaataatccctttaaaaaagtctgtgcatccaatattttgtgtttccataaatatttactctattgactcagcctttttccgtcattttaacatatatattgcgttgccacctaagcactatatattgcaatatatactatataacatatatatataatttatataatatataatataaatatatatttatataatttatttcactgctttcaaaaggtggtcaagatgcagttctcaggaaggatccggaagaagctgcgattggcgggtgaccagagaaatgctagttaccctcacagccttcagttttacctgcagccgcctactgaaaacatatcgttgacggagtttgaaaacttggcttttgacagagttaaatgtaagtggcatttaaagtccaatgtttgtgtccttgagaagtgcagttatcacacgatgaataaaggcagttcctctttgttcagcagcccattcaacatccgttggtgatttgctgttgaaggtttgtcattcacttcttcactgtagtatgcacattgagtactctgcttccaggtggcagggactttgtaatgagtaatgcaattaaggtctatgttgaaactgtatttgctatgtggagacagacgtgtagagttaaaatcatacatcagattactttctgctttgatagaagtaaatattaatgcccctggagtgtaaaagtgagaataactagcttagtctacttaaggaaggtttcctagagaagttggaatttggtctggtttctgaagaaatgagcagacagtagggatttcccagcagaagcagtgaagggcttttccaaactgtgataatggtctctacaaaggcttgcggctgtgaaagagagctatgcttccggtgtgagtagttgagggagagtggagacgtgtggacatttgaaggcatattataatgcgcaggaccgaggtgtgagaaggatgcagccactgaactggaggcctcttatcctttgtgtgtgagagaagaaatgaaggagctagctatgaactgagacaaatacaagccctcttagagtttatgttccagaatattcttgctggagtaatcaggagatgggaaaacactgttcatttttcttagagcagcaagataagagctgtcaacgcaggagaaagcacttattactgtccaatgtagtgaaggcaagagggggggaagggcacaggaggcttagcagtgtcacatgtttcctagtggttgaaacccttggcttcgtcgtgtcagatggaaccgcaaggacccctaaacagtggtggtgctagtgaagggcttgagagatgccaagtaggtgtcatgaagagtggttggaggtcaggactgagggagccggtacggcaagaaggcatgggaagtggagatgcatgtggaacatggtcgtgttcttaggtggcagtgcagaagattcatttctggtgttgaagcatcattccttgaagggatttctgtgaggaaggcttgcacctggcattaggaacctttgaatattcgtgacttctattcaggatggctccttctgatgacccggtgcctctcactgctgggtagtcatcaggaaaggaaggctctctctctctctctctctctctctctgcctcctcctcctcctcctcttcctcctcctttttatcttatgatgtactcagtcaaggtagctccagactgcaaaccttgtcttcacactgacaggcaggctttttcacttctcagcatttggtggcttggtacatcaggaaagatcatccaccatttgtcctttcccttcccttcccttcccttcccttccgttcccttcccttcccttcccttcccttgttgagcatctctgggattagaatatcatgcattttctgcacattggtgcagtttatcagtttccaagcacagttcacgtgatgtacctgcggaaacaaagttgttaatactgtcagatgttctaagaaaaaataattagagaattgctttctgtaggtttttatctttgatttatttatcttttgtcttggatttaaacttttcttccttttaatcttttccccctagtgcttaaagcaattgagaacctcggtgtgagctatgtgaaaggaaccgaacaataccagagtaaattggaggccgagattcgaaagctcaagttttcctacagagtaagtaacgggaagtcggcggcgggagagcgctcccttcagtctgtgtgcgtttatattgctgagttatggggagaggcttttataaagataaacattctgctgagctgattgacatgtagttagatgattgacatgtagttagatgattgacatgtagttagatgattgtagtacagcagtttcccaccctcaggcctgctctccgcctggcctgttaattcctcattgcaggactcctgtatattgtgcaggttcttggagagaccttgccttctgcgcatggactgactacagagatcccctatgtatttgtgtcacacagggtgaagcaaactgtttttttctgcgtacttcaggagtgtgtgcagtggctacctggcttgggtgggggtagtttagaagactgaccaggaggaggtcctgaatttctgcaactgctatttatttattgattgattgatcagttgattgattggttgttttagaggggtttgttctgcagtgcaagtgttcctagcacttgtgatatagcccaggctggccctgctctgttccttagtccctggagggctgaagtagctggtacatggtaccacctctggcttggaactacatcgtgacagataccatgacatttttattttgggaggataactgccagcaacaggttgattgggtcatggtggacaggagcgaacaggaacctggaatgatgcgagtctgaatttctgagtgacggggacggtcggggggggatattaatgatgtagactgaaaggattttattggcttatcccaaggcgaaaccagagagaatagtggcagtgtccctatctctgctgaggacagtgtatgagttcattaagtaccgacagaattggagggaggagaggttttacttgtggctttagcagtcaaggcctggcagactttgtaaaggtgggagcgtgcagttggggttcctcacctatggggcagacagcaggcaaaggacacagccacaaccagaagtaggtgtaacagaggtctgcccctgatgacctgctgtagacggtgaggtcccgtgtctccgtagtgatattttagggtgtggcacacaataagagaagctagtcctaggactaagaagctgagttttgttccagacgtggctgggacacatgtgtgacaggatcttgtggacgtctgtatgtgcaaatctgggcttggaaggcgtgtttactgggagaggagcttccaagcttagcatccacaaggcttaagtcctgggaaatactggagacgaaatgggggacggcaggggagactccagtgtctgaggtgggtggatgggaggtgtctggggaggagataagaaggagctctgtgaggataggaagatgatctgggacgccacagaagccaaagagcaagagtggccgtattaatactgacagcaaaacagcaccagatatttgtagtctgcttattctgtggtaaatctggctgtaagaacactacttacggactctaatggaatttgtcttatgagccaggtaccaataactgtcttattttatgaatgagggctctgtttgcttatacttcatgctcataatatggtaagtggtagagccaagattttagccggggcattttattttgtgatggtatttctaatcctaacagtttcagaaactcaaggtagatgacatagatgaattgtacagggtgtagtggatttagcatctggatgacctttgcagacagggcagaaaccagaatagtgggagtggttgggggagagagtggcgaggtagctatgaatactcttgtaagatgtctacacaacattgcaggggagaggcaggacagcatacatatagactcactgttatccgtgacacacatccttgttttttatttgtgtgagtgatggatgtacgtgtgcaggtgtgctcacccttgttggattgtccagtagccagagattgacactaggatgccttccacagtcattttccctccaaggccaccagaggcagcagccaatgagttggaggttttagttattggacagtgaaggagggatgctctgtccatggagatgggaggggaggcaacatgccgtgttgatgcaccgtctcaatgctgttggggaaggcactacaacagaggcctcagggcagctggtgaagactgaagctgctctctaaaaagtgaggagggagatgttcacctatcaatcccagctctgctgctgataggtttaatgctgttgtttgaatctggaatggctcccagtggcttgacagttaaaaagatggtccccagcttggtgtatttgaagggagatggaaatctctaagaggtcaggataaggcccagtgggaggattttggtcactggggcatcctttgaagggcacaggacaccctggtctccctacacccttggctacttcctgctgctcctatgcagtgagtggtcctgcctcagcatgtggcagaataagtgacagtactaaaatcctcaaataggagaggtaagttattggacctttatccttttaaataacttacctctcctattttgtaagagtaaccaaaagctgactgtaacaattatgtatatgtatgcaattatatatttacatgcttatgtatgtattcttgtatattatgtaagcatatatatataatatataatatatatatgtatacacacacacatacatactacattctaaagtcctatctctaagtgctgagaacaaagtcagtttttggttacttgtgtgaatgtgtgtgtgtgtgtatgtatttaaataaataaataaataaataaataaatatattatataaaattatatatacatacatacatatatgtgtatgtatgtatgtatatatgtgtatggttttttgtctatacttagaacagttgaaagaagctgagggttgatttgtagaactggttgagagggtgagcatcctgggtatagggaagttaagagcagtgactgatggaaggcagttgccgcccctgctcaggagctttcactgaggtagtatagttcttagtttcacctggttgagttgataacccagtaatgatcctggagagtgaattaagaaatgtgctgagtcagcgtctctttccgcctcttgtcattccaatatgtccgtttcttcacgcggccttaggagaacctggaggatgagtatgagccacggcgaagggaccacatctcccactttatcctacgcctcgcgtactgccagtcgtgagtatacacctgcgtcctgacgctctgctcggatcttgcgggtcataaacttgtgcttatgaagttggcctgtctctgaaacgttcagaaaaactcagagtaacatcagcggaaccagagtgccatgggctgaatatgattgtgcgttctttgaaataagtttttactggaaaatactgaaaataattggtgatacctaatgagagagagaggctctgcatttgggatttaagtatataagggatttcattaggaaggctacttttgatactctttcaagaaagagtggtaatattactaataagcattcattcaatcatgcacttgaatttggtaaaagttttctaattagagatataagagcttatcacattttagctattttcagtcagtagctggttaattgtgactcaatgctgccacccagaggtacaaggagttaattgcttttttacaatttaacttttttccccttactaaattttggtcagagatatggttgtttctttttattagtggcttatgagttgagtgtcttgagttgtctcctctcaagaacataaatgatagcatttttggtacaaagcttgagaccttgagacttagagttttggctttataagaaaaccatatgcagttcatataactgccacagtcactgaattattggtagtctgtaaaagtcatctcacagaaatgaaactatattttatattcagtagttatagtgtgaatgccactctaatgggttataatgttattttggctttaaaatattgaagtttgctataaagcttacagtgtgagttgacaaagtataaatgtgtttatctgttcagaggtaaaattacttttaagactttggtgtttttaacttgacgtggacaaagccacctcagaaggagtgcctcacttcccaatgtgagtgattctttgaacgtttacatgcaacgagctgttttatgtcatccaatgatttcgcagttttcctcaaaatgctctgccttttctccttttttataacactgttgggcctcccacccagtggcttacagtgctcacatcctgtatcagatgggccgggtgcacagtagtgactgtgcagagagcgtgcctgctcttcactgcccccttggcacctgacttgctttgagtgtcgtctcagaagatctcctgagtcttgtaagcaccccgttacgggctggagagttggctcagcagttaagagcactgactgcccttccagaggacctgagttcaaatcccagcaaccacatggcagctcagaaccatctgtaatgggatctgttgccctcttttggtctacttatatataataatacataaatctttaaaaaaaaaatcacctgattactcattatgttcctatttctgtttgcatttcagggaagatcttagacgatggtttattcaacaagaaatggatctgcttcggtttcgattcagtattttaccaaaggataaagtccagagtttcttgaaggatagtcatttgcattttgaggctgtaagtctctctctatgtgtgtgcgtgtgcgcgtgtgtgtatgtgtttcccactgtcccctccttttgtcttcatttttgtgagactgggtcttcctgtatatccccggctcagacttagggcagtctctgtggctctgtgtcctgagcactggtattacaggcgtgccactgtgcctggcttgtaaagtaccatgtccttttaagtgctgatattgttagtggagtgcaggctctatgtctttttattaggtacccagttcaacgactagctgatagcaagtgatactggaaagcacgtgaagtctggagaaggccgtatgtcactctgaaactcagctgttccttaaatctgcttggatagatttaagaagtagtttttacaggtgaatcagagcaaactacattttgcagtgaaacagaaatgcttgggaaatttagcttggagaattattgtagatagaagaagaaagctgctgtcagagagagattgtttctggcaggttccagcagtcaggtggaagtgggactgtttaggactttggtgtccatgtaaggcccatgttctgtctgcaggcacctccctggcaaggcttcgtccaagaggacagaggtacttgcgttgtctgaactcatttctcccgcttcctgttacacttttttttttttaaagatttatttatttattatatgtaagaacactgtagctgtcttcagacactccagaagagggagtcagatctcattacgggtggttgtgagccaccatgtggttgctgtgatttgaactcgggacctttggaagagcagtcggatgctcttacccactgagccatctctccagctcctacacttctgatcagcttcggttgtatgaggagagtcagctagcagtgtctcctaggggggtgcttttcttctcagcgtgtgcctacataatacccccatgtggggctgcctgggaagtctcgcacacaggatcactggacccaaacccagagcttgagtgtggtgccatgggggctagagcgctggattcctgcaactggagttgcaggcagttgggcgctgtctgacttgggtgctaggaatccaacccaggtcctgtggaagagcagtttgtgtccttaactgccgagtcatctctagctttaatttatcttcttctcagaaatagctttttaaaactaaactattattgaaattattgatgtctattagaaaattgaaaaaagttgttctgttgctttttttttttttttttcttttggtttttcgagacagggtttctctgtgtagccctggctgtcctggaactcactctgtagaccaggctggcctcgaactcagtaatctacctgcctctgcttcctaagtgctgcaattaaaggtgtgtgccatcacgcccagcatggaaattttatgactggttgtctggctatcttctgttctggcatcatatttatcgttgtttattttggaaattgtattaggtgtcttacacattttctccttcttttaaaaaatatttatttattcaatatatgtaagtacacagtagctgtcttcagacactccagaagagggagttacagatggttgtgagccatcatgtggttgctgggattttaactcaggaccttcagaagagcagtcggtgctcttaaccactgagccatctctccatcctgtcttacacattttcaacatactttagcagcatttagctcctttgcctcattcctttatcaaactcatttgaattaaatagtcctttatgatgagtgtttcccacaaatatctgatgatccttggtgtttaagtttgagataccaaaataaggattatggtgacgttattcaatccttaaaactgtttggttgttggatgacccttgccaaggttgccatcccagacaggaagcctccactctcctgcaggtctttgctttcatgtagacattcttttatcagagtcctgggtacattgttcagtttccatgtggtggctttatttaatgctttatgactttggacttcatatgtcacacctgccctgtctgtatttgatgctcctgtgacatttctggtgctctctaggttgagtagcttgtttggtagtacctcctccagggatgccacttcctcttggagtcttgtagtacactctcctctcagttcccaaagcagttggaccttcttctcagtgctgtgcttgcccctggtttatagtctttctatagcttattgctctttgcgtttggctttggagggagtggaactcaatatttatattcagcatggcatggctgccagaagcgtcatgggcttggtcactacaggttctcatgcaggggctgtggagaaacatctggcatgcttattcgagtggtaaacagctcaggctttggtgatgtgctgttgggaaatctctcttgtctttagtacctgtccggattgggaggctcctgtctgggacggtgctcctgccctctggctggggatggcaaagatgcatagctgctctctactccggtgcgtcttacaactgtgcttttaaaaactttccatatatggatgtttttattttattttgagattatagtacaattacattatcacccccttcccatcttgcccttcttgcactttttgttgacttaaaaaaacacttttgtgtgtgtttgtgtgtgtaaaaatgtgttaggtgtacatgccactgaacacgtgaggaggtcagaggacaactgtttcatgagacttggttcttttcttccaccctgtgggtctctgggatcaatctcaggttgtcaggcctggcgagcaaagcttagttccttatttatgactgaaaatgtaatttatctgagtttcttagaagcgtttggatgctttttttttttttaagatttatttatttactatatgtaattatactgtagttgtcttcagacacaccagaagagggcatcagatttcattatggatggttgtgagccaccatgtggttgctgggatttgaactcgggacctttggaagagcagtcagtgctcttaaccgctgagccatctcaccagccctggatgctttttttctacttaacattgtgacattgatttaatctttacatatgtggattttgtttttgttttgtttttgagacaggatttctctgtatagccttgactgtcctggaattcactgtgtagactaggctggcctcaaactcaaaaatctgattttatataatcgttgttttctaggtatttgcaggttggctctgagatcgttgtgtgtttctgagcacttctgattcatgttactacatgtgtttggattgctgactggtatattttacatggctgtatttcttttggcatgcacactaattgtggtcaacttcgtttcttttacttaaaatatggggtactatttgcccaatatatattacatatatttatatatattctccctatataaacctatattaataacctgccaaatgagctcagtttgatacctgctgactggagagctctgttcctttttttttttttttctttttttgaaagtcaagacaaagttttacttttaagtgattacaagcacacgaaatgacatgtgacaagttgagtcctagcatctagtggtttgggttacaagatactaacagcagccggaacaagcagatcgtattcattgtcctaaattagccagggcagagcactctgaggctggctgctgctttacaggtgttaccatgactactgactactcttccatagctgacgcccctgacctgtaagaaaggagaaggaacagtttactccctttctttcttcaaagaattttttctactagactaataaaagaaaagtcaacattgatacccattacttgcatgaagacccaggataacaggtgacatatactccttaaagacatacaagctaagatgaaacttcaggtacacaataagtctgtacaaaaagctagatttgatattctcaaaaagtgaagggtcctacaacagcatagggaaataatttaatgccctccagaacagaagtcgagctctgtggaggtttttggctctgtgggggcagatcccatgccaacccacagagcaggcccttctatccttttatgtggtagttttcatgaatttctggccagatgtcacacacaaaggccaagaggttatccaggactccatccctgttctgctcgaagtggttctggaggacgttcatcttctcctgggtctccttttccacctcactgctacagctgccatgggagcccagtgccgcagcttccttccttgaactccttctccttccatagtgggtactgttcagttccagcctgggcttcttttctttcactttcgggcctcggacaccttctcagccacccacttctcggcctgtagtggctgctggatactcggagactgactcaccagtgctgtgggctgagaggacggcctaagtcaacagtcagacatactcagaagacctcgggtcacctgacccacgcccagcgctctgttccttttatacctttgacacagtgtgcttctgtgagttacaaatctagtgataaaattgagtgaggcaggacgtgcagatgtaggagaagaacaggcaggagaatacatgtctttattttatgtgaatggttgtttgccatgtatgtctgtggactgcatgtattctctctctgcagagaccagagagggctactgatcctgggggacaggagtgacagccagttcttatcccatcctgtgagtgctggcaattgacctggggtcctctggaagagtagtcggtactcctaactgctaggtcatctcgatggccctttaaaatttttagaaattatgtaaattatttaaattttaaatatttgaaacgtgttcatacaatacattttggtcatattccttccccttattcctaccctcccaacttcatatatttctttctcttaaaaaaggaaaaaaaaagtccatacaaaagaaacacacacataaacccctcttttcagacaagacagcaaccaagatccccacaggcgtctgtctgtgttggccaactgctcctgagcacgtggcctaagctgggctgtggtccataactagtgtcactcctttgaagaaaaatgacttttcctctcccagcaggtaacagctagaaaagagcttcttgcttagaggcggagccttgggctcacttccctttacctctgttttggtgtgtacttatatgtacttgtgtgtgcgagagcccttggaggtcaaaggcgatggatacactggggttggagttgtgaatgattgtgagctgcggtgcggtgtgggtgctgggggccaaacctagatcctttctgcatcgatccaactctccgacccccggggctcccttcctaaaagtcagctcagttatactttctcacagtggtttgtaaccctgagcaactgtaaggccatccttatgtgtaccgactgggctggcacagtggcagtgacttgtatttacagaataggagctttcggctagctgtgacctatttatctatgtatgtaattctaaacagtcatggcgagtactcctttgtagtaatagtgcagatttatagaatttgggttttccatatagaattacagatttagattctgttcataaggtagctttaatctagacatttccaaaatatggaatttcaagctgaattaattacccttgaagactaccttgaaaattaacatattcaaacattttcaaatgaacttgtggcaatcacattttttaaagtttttatgtagtttcaaaatataaaatgttgtagccacattgtttgattcttatgcctacaactctgcccttggaaaataggagtttaaatgacccgaagtttcccatgtacaaagtctatcctacatgttataatacaatagataaatgtatgcatagtgttaaatatggattaaaaggtgtggaatactgtccatgctttcagaagctattctgaagtagacgctgaaatgaaatatgtatgttttcacatcgtaatctccgtaaactttccccttttctgcaaatctcctaaacactcaatcctcttgcagtcatgtgccctaggatagtttgaagtctgggtcatattgacttgtctacatcacttgggtaagagtgtgagtgtgagaagagtgcttctgggtgtggtgggacgtgcctagtcaggggcaggaagaggacagcaagtcacaagaccagcctgggtcacaatgcattccaggtctggcagggctgcacagcgagactctcactaatgtcacataaaaagtggaagaaaaaagaaaaagattgtgttttcagtgatctttaaggtagtcttggttacagagcatgaaaaaagtagacatggcagccattgtcatgtaggacctgctgctgcggatttgccattctgccttgcttaccatctgaaggtgtgataacagggcgtctgtgtctctgttttttttttttttctcaattttttattagatattttctttatatacatttcaaaagctatcccgaaagtcctttataccctccccaccctcctcccctacccacccccacttcttggccctggtgttcccctgtactgaggcatataaagtttgcaataccaaggggcctctcttcccagtgatggccgactaggccatcttctgctacatatgcagctagagacacagctctgggggtactggttagctcatatatatagttccacctatagggttgcagatcccttcagctccttgggtactttctcaagctcctccattgggggccctgtgttccatccaatagctgactgtgagcatccacttctgtgtttgctgggccccggcatagtttcacaagagacagctatatctgggtcctttcagcaaaatcttgttagtgtgtgcaatggtgtcagcgtttggaagctgattatgggatggacccccaggtggggcagtctctggatggtccatccctttatctcagctccaaactttgtctctgtaactccttccatgggtgttttgttcccaagtctaagaaggggcgaggtgtccacactttggtgtttgttcttcttgagtttcatgtgttttgcaaattgtatcttaggtattctaagattctgggctaatatccacttatcagtgagtgcatgtcatgtgacttcttttgtgattgggttaccacactcaggatgataccctccagatccatccatttgcctaggaatttcataaattcattgtttttaatagctgactagtactccattgtgtaaatgtaccacattttctgtatccattcttctgttgaggaacatctgggttctttccagcttctggctattataaataaggctgctatgaacatagtggaacatgtgttcttattgccagttggaacatattctggatatatgcccaggagaagtattgctggatcctcaggtagtattatgtccaattttctgaggaaccaccagactgatttccagagtggttgtacaagcttgcaatcccaccaacaatggaggagtgttcctctttctccacatcctcgccagcatctgctgtcacatgaatttttgatattagccattctgactgttgtgaggtggaatctcagggttgttttgattgcatttccctgatgattaaggatgttgaacattttttcaggtgcttctcagccattcgatattcctcagttgagaattctttgtttagctctgtgccccattttttaatgagcttatttggttttctggggtccatcttctttagttctttatatatattggatattagtcccctattttatttaaggttggtaaagatcctttcccaatctgttggtagcctttttgtcttattgacggtgtcttttaccttacagtagctttacaattttatgaggtcccatttgtcaattctcgatcttacagcacaagccattgctgttctgtttaggatttttttccctgtgtccatatcttcgaggctttttcccactttctcctctataagtttcagtggttttatgtatagtctcctctataagtttctctggttttatgtagagttccttgatccacttagacttgaccttattacaaggagataagaattgatattaagagatattaaggaaaagtaattgttgcttcctattatttttgttgttagagttgggattctcttcttgtggctgtcttcttttaggtttgttgaaggattactttcttgctttttctagggcgtagtttccgtctttgtattgtaacggggtgttttcccgttattatcctttgaagagctggattcgtgggaagatattgtgtaaatttggttttgtcatggaatactttgatttctccatctatggtaattgagagttttgctgggtatagtagtctgggctggcatttgtgttctcttagggtctgtatgacacctgcccaggatcttctggctttcatagtctctggtgagaagtctggtgtaattctcataggtctgcctttatatgttacttgactttttttcccttactgcttttaatattctatctttatttagtgcatttgttgttctgattattatgtgttgggaggaatttcttttctggtcctgtctatttggagttctgtaggcttcttgtatgttcatgggcatctctttctttaggtatgggaagttttcttctataactttgttgaagatatttgctggccctttaagttgaaaatcttcattcttatctactcctattttccgtaggtttggtcttctcattgtgtcctggattttctgaatgttttgagttaggatctttttgcattttgcattttctttgatttttgtgtccatgtcccctatggaatcttttgcacctgagattctcttttccatctgttgtattctgttgctgatgctcgcatctatggttcctgatttctttcctagggtttctatccccagagttgtctccctttgggttttctttattgtttctaattccatttttagatcctggatgtttttgttcaattccatcacctgtttggtagtgttttcctgcaactctctaagggatttttgtgtttcctctttaaaagcttctagctgtttacctgtgttttcctgtatttctttcttaaagtcctccatcatcatcatgagaagtgactttagatccatatcttgcttttctggtgtgatggtgtattcaggacttgctacggtgggagagtttggttctcatgatgccaagtaaccttggtttctgttgcttctgttcttatgcttgcctcatgtcatctgattatctcaagtgcttgctgccatcaatatatctaattggagcctgttcttcctataatcccagttgattcaggactcctcagagtccagctttctctgtgatcctttgattgtgggttccggtgaacctgagactctgggtgtgtcagagtttttggcagtcaagcttcctctgagaccctgaaatactggtgtgacccagctcctgttatcctgggatcctgttgtcctaagatcctgggagtgttacagtgcctggaattggtgtctcctttgcggaccatggagctgtctggtctgttcgaaatcaaggtaaaccagaactgatcaaaaggagcctgagcctctggtcaggaagggctccggtgtccttgttcctactctcacaggcctgtctcaattggattggaacagatgttgtgttccactcaccagtcatcctaagatcatgtggagagtcctctggggactgtgggggtgtccgcctactctgcgccctaggtgacccggtgctggtcctcctggaagggacttgttggttctccgtttatctgggtggtaacatggctctcgagactctgtgcccttctcttgttggtcctctgtggcttggctctcttgctgatctctgttaagtctgctgtccggccggggtccctggtttgaggaagagaatcctgtacgctactggaacataacctttcacatacttcaacttctttgggtgattcaaggttaagatcacttcataataataggcaacagaactgcatccaaactttcatggggtcctcatttcctagaaggatgcagatgactgaatagggtctgcatcacctagagatgtatgagaggaagctagttaccaacagctgacatttgctgtgtccaccgagtaccaagaacttagctaagtgttttctgtggcttatgtaatgtcatcctcccaacagttccacaaggactctgaagatcagagcagttaagagcttccccagctttgtatgtggatcagaactcatctttatgtttgtgtgggacacttcctcctcagccccctttacctatttaagaacgtttttggatgtgttagttcaagatcaatggtttactcatgtaatattcaaagatcactgcaaactgagcactaaactttgtgttccagttgggaataattaagtttaatttatcaggcacagaacagttaaggacttgaatagatattcctcttagctgataagaaagagagatattatcaagggaggtttactggttattacacactggggtttttagaaaggcttgttggctagtccgggggttctgagccacagtttccccagtagatcatccagacgtctttgtggtagttttggtgtgtgtgactggcagatacgtcatcatttaggagacaggaagctggagcgcctgtagtgcactaggtaggtctgtgtaacagaactttcccaggtcttccttgatgttttatgtttgtgtgccaacttctcaaccatgccttttccagttactgaattgagcagcaaacattgctttataagtcagcatgaggtgcttagctctgtgttttgctttgggattgtagctagctttgtgatgtatttcaagtgttaatgcatttaaagaagcgcagctttgattctgacagacctgaggcccaccctggccttgcaggtctccagtgactctcagtcgcgctgtctaactgaataggactgaaggagccagcattccggatgtgttgttttatgccctaagttctagagggaggctcttctatctcttgtgaaacacaatcttaagtttaactcccagggtcacattcttatgagcatgggacacattagaccaagaggcaggagcggcacggcaggaggatgcttttgtgctctcctcgataggcagacgaagcgcatttgctgtgctgaatgcctcgcggctcagagttcctgtgctgtaggagagccagcttcctggagagaaagtatcaagccggctgtgtgttctcaggtcctttgaaggacagtccttctcttcccttggagacctcttctcacttcacgtaacgaagatgcctttctcctgggcttatgccgcccatagagaggcttctagtctcctggccacttctttatggtttttttatttttttatttttgagttatagggtccctagttatattccctgtgatggtttgtatattcttggaccagggaatggcaccatttggaggtgtggccttgttggaataggtgtgacctggttggagtaggtgtgtcactgtgggtgtgggcttaagactctcaccccagttgcctggaagtcagtcttccactagcagcctttgggtgaagctgtagaactctcagctctgcctgcaccatgcctgcctggaggctgccatgctcccaccttgatgataatggactgaacctctgaacctgtaagccagccccaattaaatgttgtgttttataagacttgccttggtcatggtgtctgttcacagcagtaaaaccctaactaagacattccctatgtagccaggaatcatgttcagcttctgcttctcccaagtgctgggattataggcatatacccgcatgttcagttttacacagtgctggagatttgcccctgagctttatgaatgctggggcaaacacttgagcaaccgaactgtctccccagattgtaaatattcttaaaattgcctatttatggttctgacataaacgaggcagtcttgaagaatagtaatcataaaaagaatttcagatgcttttggccagtgaaatgggtcagtggatcgaggcacttgccgaagtctgatgctctgagcttggtatctgggacttatatgctggaaggagagagctgcagatagtcttctcatctccctgtgtgcaccatggtgtgtcccaccctgcaacagataaccacatcaatgtcagttatgtcttaggaagctgttttttctttttatcttcatttcagttgttgatgatgatgatggtggtggtggtggtggtggtggtggtggtggtggtggtggtgacgacattgatagtgagccctggaaggtctccaattataaaccattgaggacattgtgtttggagtagagctccacagacctgcgctgtctgcaggcaggtctgaagatgaacccgaggcaggtctacagatcctcagggttctctctgcttctgagtgcccgctggcctctgaggctggctcctttccctccatttctcatcaacagggctggctttcccgtagtgtcgtgtgcacagttccatagcttacttcagagtctttacctctctggtaaatactggagatctagatgtcacatactttatataatgttgtttagatgctacactctttttcagttacaggaaatactttatatgtcccagtgttaatcttggttctggcaaaagtcttatgacaagggaacctgtcatgagcttggggagagagaagggcaggagggcattattgaaggtttctggggaggagtgtgacacagatctctgatgcagacggccacagctgcctaggttgagacttgagggtgcaaagtgtcagagcacccatgagtcatttccaagggcgttagcagtgtctgtgtttgttgagtgaagaacagagggcttgaagctgttagtcttgtggaagcagcctgaagattggatggctgttagatatgaagtgaggcctgtgccagatctcggtacagaggtaagggtagtatgatgttggcgatagtgggtgtcttcattagggtttccattgctgcaaagagacactgtgaccatggaaactcttaagaaccgcatttaactggggctggcttacaagttcaggggtttagtccataatcgtcatggtggggaggaccgtggcagcgtgcaggcagaagtggtgttggaggaactgtgactgcttcctcttgatcagaacgcaggcaggaggaggctttgattccacacttggcagagctcgagcctaggaaacctcaacaaggccacacctcccaatggtgccactccttggggccaagcattcaaacacatgagggtatgggggccaaacctactgaaaccaccgcagtggggaatatgagaagggagtatagtttggaatagtgtatttgcttgtggaatgtttccagtggagatgggtggaggcagttcagaatgttaggctgagatttggaggttaaaggtgtaatggtggagccaaagtaccacacacagctgctctgagactgtgtgtgcaaaggaaggctgctgggagagagaggggggggagggggagggggagggagggagagagggagcgagcgagtgctgggaaaattaattcacgatcacgactaagttactttaatgcctcgtttttcttttactgtgatactgaatgagagcacacgggacatacttatttatcaagcacttggattattctatggaaacggaactgattctaagacttctgactctggatattgtattaaatgtctaaagtgccaggtgtggcggtctagcatttaattgtagcacttggtgggcannnnnnnnnnnnnnnnnnnnctttatttcaaacttctaaccttcagggataggaaagaataaatgtctactgtttcaagccaccctgtttggatagtttgtaaccagccttaggaaactagtttgtgtagagagatcacttcatgctaaagggggaggggagggagagaggggagcgagcgagtgctgggaaaattaattcacgatcacgactaagttactttaatgcctcgtttttcttttactgtgatactgaatgagagcacacgggacatacttatttatcaagcacttggattattctatggaaacggaactgattctaagacttctgactctggatattgtattaaatgtctaaagtgccaggtgtggcggtctagcatttaattgtagcacttggtgggcagatccgggtagatctgagctcaaggccagcctggtctatgtagtgagttttaggccatctggggatacatacagatcctctgtctcaaacataacaaagcaaagatacagctagacaaggggccttattgtagtgatacttttattcattcagttagacttttaagtttctgattattggataattctaatcttaacactaatttgtttgataaatatgtgttttagttttgggcattttttaacatgtctttcattttaaatattctacttagaatatagaagaatgggtttcataacactgctttcttacatgcttgttgctgtaccttagtcatatttaacctccctcagagccctccctccccagcctcccctccttccttctgactaaacctcattaccctcccttagagttctcctttccatctatgtgtgtgtgtgtgtgtgtgtgtgtgtgtgtgtgtgtgtttgagtgtgcgtgtatgttaatgtagttaattctaaatctaggatgctatcttcgggaaagcatgcagtagtttctcttcttccggctgcctgcctctgggttttcaagcctgctgcagactttgactcagaggttctaacttcattgttctctctgtttcttacaaatcccctcaacttttgggactcagaggaaagttcttggttgaaatgaaatgttcttatttggtgaggcagagaggggtgaatgagaggtaatgatgctaaaattgaagatattctgacagtttttttttccctaagaagatgggcttccaggaacccatttgctttggcatgcatttctttcttggttggcaggactatcgtgctctagaagtgtcatttgggggagccagagtaccacagttaccagtggcccattcagtataggagagaatagtgaaaggaagcccatgctgtgcagggtgtgtgtgtgtgtgtgtgtgtgtgtgtgtgtctgtctgtgtgtgctctttctataggaaatggttagaaggttattaagtagtaaatgcattatacgaaacactcagtaaatgtgtaacttgacttaacgtttcacacttgcatcttggttgttctgttgacatcttaagcgcttagagacttcagtgttttcagatgagtagagtagatgtcctatcacaccggagccgtcgtcgctccaagtccaatggattccatgtctcattgaggcttggcttaattactaaaaatctcaggagtccttagaggaagttcctcagagctattgtcaagacctgggtttaggaagtagagcattcctgtttagctcccttgccctggctttccattagttgctgggtattatttaaaataggttaccttttttttcctcctcgtttcctctcgtctcgtctcttttcttttttagtatgtccttgaaaggattacacttcttttatttttgccacttcttttgtagcacacgcatgtgtatgcacacaggggtctccattcttttttaaattttaaaaaaaatttaaaatttctatttattttctttctttctttccttccttccttccttcctttttttgttttgtttgtttgttttttgagacagggtttttctgtgtagttctggctgtcctggaattcactctgtagaccaggctggccttgaactcagaaatccacctgcctctgcctcccaagtgctgggattaaagacgtgcgccaccactgcttggcttcgcttctttctttcgttcgttcgttctttctttctttctttctttctttctttctttctttctttctttctttctttctttctctctgtgtgagtacactgtagctgacttcagacacaccagaagagggcttcagatcctgttacagatggttgtgagccaccatgtggttattgggaattgaactcaggacttctggaggagcagccagtgctctaactcctgagccatctctctagcccagggggtctccattcttgcccagggggtggtattttatagcatgttaacagcatgatttattttagtttctcacaggctgttgtctgtcattcaaaaattggtttttgaatttccttgttcccgtctttggacagatgctggattctaggctagaagttctccgttgaaggcatgaccctgtctttactggaaatgtagcttaatgtgggttagaaatgaagtggacttctccactgccctaaactcttactcttttcacccgcttctgtttatccactcagtgctacttactctgcccattaagaagggatttctggccaggctgtgagaagaagtacatatttcttaaaaaatgagtctgtgaggaacaagctgttcctgtgagagagctgccattcagctgggtgtgtatggaagcttggctcctgtttgtcttcttccctgtgcagtggggatagacaaatagcttagtacagggactgcctcctgtgagccatgatcctgccttggctgtgtgggcagagctcctccttatctctccctctgccttttctccctcccccctgccctttctcttttcctccccccttcccttcctccttccctcccccctgccttttttgtttttctccaagaatgctaattgcttttattttggctgtagttgactctggagagttgatttaagagaaaaaaaaaaaaaaaccttaatcttttttttttttctttagagttttctattaatttgtccagatggacaggactagggtaaattttgtaaaatgctagcttttaagaggtggagattaaatttaaattatgtttctttgtttttactgtatatgctataaaattagataattaatacagcctaaagaagataattaatcaaaatttagaggacttttaactgatgaattctgattcaccttttaaaactaagaagcgtttgcctaaattatgtaaaatgctaagtaaagggcttaatttgttaatcatctcagttttgattagaggcagatgctgattatctaagtggacttttcagagatgactttcatcatttaaaagcaacttgtctaattaagacactaactcaagtattagcacatagcagtagttactgtgtactagttatgagggtagggcctggcagggtgagtcacaagtactctgcaccaaaggtttggagggtaaaatgccatgaaaatttcactggcctcaggccaggcatggagatgcttgcctaggtacctggagcccagggttctgtctcaagcacctcagcaactggttgttgttgctcctgcctctgtaatccaataaggacagaaaggagatgggagggtcagaagttcaaggccagtctgtgctacataatccatttgaggccaggtgggatacatataagaccatgtcgaaactggagcagaaggaagtgtcaagaaaaaaagacttcaactcaactctcctcccctcccctccgctcccctctttcattacattttctgatctttgttagttctgtgggactctgattttgttttttctggttttccttctgttataaggcagagcagcacacggaagcagaggtaatcttatgggtgtatgttgaaagtgtgcacagcaagggggagtgcagcacacgtgtgttccaggccgtcttcactggtagccagatcttccttttacacagctaaggggcggcaggaactgagttcatgaatgagacacagaatgcataacgaatacatgatgttaacttgtcaggtcaaaggcatacagtttgcaaagcatttagtgtctgatacacaggaagcacacagtaagctattatccattaactattgtttttactgtgtggctttcacataagatttgtgaaagattgtgcatgtgtaagtgtaaaatgtgtgtgcctgtgtgtccgtgtgcatgtgtgtgcacatatgtgtgcatagaacattgtatggaattcagtgcgagcttatcactcgtgctatatctccatgacaaggtataagaacttcaggggtgttgctaatagaatttgaaatccttcaggcttacagtgagagagtgtaggttttatttcagctcttgcttctttgcatgttctgtgaggggggttaaggatacgtatagactctagagaatgccgactaatacaaaacccaacccgctttcttatgtctacggaagcagagcaagtggcccttctgtactggcaggcgctgcggcagatcttgtggcagtttgtttaagggcaggagagtcatggtgaatgtagatgcttacaggccatttgagtctcctgctcagctttctggattccttgagctgtatcttttgggttttagtgatctttgtggaggtgcaaaacaaaacaaacggcatgtagcattaattctgttttagtcctattcctttgggagactgaggcaggagctgcaagttcagggttagcctgcactatgtagggaggtcagtggtagcctggactacataataggaccctgtctcaaaaaacaaaaaaagtttttttcttcaaggtgctattatttctacaaagtacaaatagtaattcctacttttcatttgtaaatcaaaactagcatttatagcctgggaagagtaacttaagggagcaagtgactgatagtattagaaggagcccagtgccagtgtaacagtgtggtcatggacctggagggctgtagtttagtactgctctttgattctgtggatttgggacatggcatgactccacgttaggtcagtaggacaggacttagagggggaaggcatcgtctcgaggtgtcagtaaaataatgttgataggttataggaatgttagctgatctgggagagcacaatagtatcgtgcagctgtacactgcagactcaaggctgatgtttcctgatgtgaggagcaggagggcagaggactgatgtggacagggcagtttctcctgccaccttctgcaattagagggcttgggacagaagctgtattgtttctgagtggctttgtatttaaatctgtcctacaaatgtcagtaaagcactcgagtgttgagtgactgtcgctggggatgtagctgtagctcaggacagggtgtagccaaggggaggagggtgctggtggactgcgaagtgtaagtgtgtgtgagtgaggcaggtaaggttaagaaggccaagttctggctggagagatggcttggatccgaattctgtctccagttcccatgttgggaggcttgctagctcacaactgcctgtatataattctcgttctgggtgagtctggggtacacctctgacctctgggggtttccacacacaggaacagacatgcatacatagttaagaagaatagaagaaattaaaagaagaatgttaatttcatggtaggtctccattgtgaacacccttagaggttttaaatggacaggagctgttaggttgggctagttggctgttcggcagccatcagacccttcccttctggcgggctgctttgagagttgttggcaattatcctggctggtttgaacaaacacagtggctctgaggggcttccttctcactgcaaggacactgcagccacggccagtgcagagtcctcatctgaagccttgctgcagccatgaccacttcagatacttgcaccagctttgagagaccccactctgtgcaagacaggctcagtgaggtccaggctctctcagaaaggaaaggaagcaccgtcagtgactcagcacaatcctgtgatggatggcgctggaagtgtttgcctgtgtcgctgtggacatgggcccgggcttgccatgtccctttcctgccacacgtgctcctcttctgactatataagtaagctattttatattagatatgagtcctgcagtgtgagtctaggagatggtgtgtgttacagaaaatccatactaacatgcatatatagaatgggagactggaaatactatttttaggaaacaggataaagtaatttggtgctagcacgtcagatctggtctgtgagttatgaaagaagaaaaggtgtttctgtgtgctgggttaatctggagtttagcatggctctggcagaaaggaggcaggattctgatggactgcgtgccatccatcaccttcaaatgttggataattgggtgaggcgttagagtgttgaattcggtcagcagacagacagacaccattgtcgggacagtagaactggtttctaatgttctcagtgccggaatacacatgccgacgtctcttagagcaaatactctcttccctttgcccaggttcaaggcaactcgagtgttctgtccatttaagcttgaagacagtggaaatgtacatttcataattcctcacttactgaaatgagctgacggatttgatttattgtagttgggaagagtaaacgatggcagactggtttatttttcctgatcttattttctggagctctttatttcattttctattttctgaaatcagtgtggctgcagcagtgatctccattgacagcacttcccacctctctctcccttgatacttggagtgacagtctttactctccgactgctggtggcttcgggtgacttcagatatcatggttttcattaatcagagtgtggctgtctcttgtccaagaaacttgaagatgaccaagctgctcagtagtgtaaagatacagaatcaagtaaagttgaacagctgtctactgggctgtgttgtaaaaatggggaaagaaattactttctcttgtttttttgggaaaacatttgccagttggagcctcaaagaagattgagtttggaaggtttttaattgtgcaccaaaaggttattgcagaagataacataagggagcgccataaagaagaaaattagaaactcagtaacagaaaactgtgtagagacacaggcatcctgccaggcggctgagagctcagaataaatagcttggaattaaagacacagttacagatttcaaagacttgattcacttagtttactagtgaatcagtgggaatcaacttcccacagaatcaacttgtaaagcatgctatccttcattcaagttttgtcttaaaatagtcactgattattaagttgaatgatgtaagatcagagggtttgttaatagttcatattaaactattaaaataaaaataggataaaatgaattataatatgcagtttaggctctcaactcctgattattgtagttaaataagtattttccaaacaggataaagtatgggtgtgggtgcaggcaggggatcgacaaagaatgtgaatgggttcctgagaggtggtccagtggttaagggcacttgttgctctttcacaagacccagacttgattccccgcaccccaacatggcacgtacaaccatctgtaattacagttccaggagatcaggtgccctcttgtggcctatacataaagcaggtgaaacactcatacacatcaagtaatataacagataaactcttatcctttgatctactcatgtgttgaagagcccgggtggctatgtaaacaactcattagtacgcaaaagctcgtgctttcccatcgtggaaaagtaacagggaaatgcaagtgcttgtcgttccacagatgtccagtccaggcattcttaagctttgtagtgtgaaggatagctttaggctttagtactgtgccttgtttggtttagtatggggagcggggtggatgaaatggcctttttcagaaaccatggaaacagagggtactatattggaggaggtcctgtgcagagagtgctgtatggacatactgctgtcttcgtcctccacgtctgctctcaggaagtgggctgtctttttttattgaatgtctgtgggtattttccctgcatgtctgtcagtgccacctgagtgcctggtgcctgtgggagccacaaaaggacttgtggagctggagtcacagagagttgtaagcctccatgggggcgctgggaatcagacctgggtcttgtggaagaacagccagctcttaagtgtggagccatctccctagccccactctgttaaagctccttgtaggacttgtttgcttcaaacaccctcgggtttaggagaattctctcttagatgattctgcttcggttttactaggcttctttagtgatgtagctggtgtcttgtggagagcttggctaggtgtctgtcggccatcattgggttagacccccggtctttccggtctttcgcttgcctggggtgccaatgtgttaccgatcttcttagtttcttacctcgttctccggcttttattttcttctttgttctcgctagcagcggttctctgaattgcagatggtttcttatgagctgtcatcttttattttgacacttccctagtctgttttgtttatcctgctttcaatgagattttaattttgattgttgcgatccatagaagttttgttttgtatttgggaggcgggtgggtggtgtggttgggaattagacctaagatctcgatcgcggtacatactgggtataccctctaccactgagcaatatgtgaaccgcctctagggtttacttttaaatttatttttatttattatccaaaatgtttattggggttatttcttacacacccaagtcagctgcctccaagtgctcttgctggctaagttttgtcaacttgacatgaatctaataagacgacccttatttgcgagaaggcatccattaggttggcaagggtgtgagagcttaagggtgggagagcctgtgtcattgtggatgtgccaccctgggcaaatgatcctggcctgtatagaaagcaggctgtgcagccatgataagcaaggcagtaagcctcgtcctctgggctccctgcctccacttctgcctctttgtgcccgagcttcttccttggcttcctttgatagtggattatgagctgtagaccgaataaaccctttgctccccaacttgcttttgcagaatgttttatagagcaacagtcggcaaactcgacaaactcgtgggcgcaagagcttgctcccagtctcctctgtcacagggacccagcccactgtttactccctgctccccaacacatggggtccagcctctatcaggagccattactgggcagagaaagaacgctgttaagatttgaaacaagttaaagcgaataccttcttgaaatggtattataaggttaatggaagttatattgctttaattatctcacagcccacgtgtccattaggagaacttgtgaaggaatacttccatttaaatgtgctcctatttatttttacattgacccagtcatggcttcagaatatttaacttatatcatgggtatctttcctaattgctcatcttttgtctgcatttctatcaattcagctttatttttttatgagtcgctgtgctctcggtcacctctgatttactttccagtcaggacagctgaatagtttatatctctgagttttcacttctttttgcatgaattaatgtttttttcccccaccctgaattaatggttttatgttttgatgaattgtatgctgttcataatctcccactgatgatttttggtcttttggtatttcattacctagcatccctctcttctctcttgttctatatttttctgaatttcttagattcaattctgtcgtctgaagtagtttatgtgttttagtcaggaaacattttgtcatgtattgtaataaaaactaagaatatagcaaatagaatacacttaggttcatgttttagtcaaaattcacgagtgtgagtttctatactgtagtataaagatattgcaatactctgtgctgaggcatatggctaaatagaggcatagactaagcgaatactgcctgaggatctgtggggaagtttgctgagatactatgtcagacgtatacaactcttccggtagaaacacactgtgtggaacggggtttcagaaatagtctatgtaaagtcacagaggggagagcggtgctgtgccggaggaagttccgggaagctgattaacagagggtgcaataaagaaaagtcaaaccagggaggattccaaggcagcttgtgccaccgtggggcgcgtggggagggtccgctgtaagagcagaaagcgggttgggaagatgtccgttagcgtggccgtgggaggcttacctgtgctggcgaagtggagtgcgcatgtgtcaggatgtcttcctagtcatcatgtgacatcagtcattctgagcagtggcggggaggtgtatggcacggtgttgacaaggtttggatttgcatggagcctgcccaggggaggggaggcagaaggcttgctgccttcaaggccttagatgttgtggagccgtgatccaaagaggatcctgacttggtagaggggctatgtaggttagtgtgtgctcgggcagtgtctttgagcgatgaagaagaggagcatttagaaaagagggctggctgtgtgatcggggctggtcggtggaggacagatggaaatcggtgttccggagtgaggtcagtgagagagtgaggtggacaggtgaaagcagagcgggttaaatgggaataactataggagcagggggagagcggagaggcactgaggcaagggtaatatagtagaagattcaatgggaactttactgtataaccccagtctccatacttagcttcctggctggcatagaacggcttaaatattgtattctagtccattttcttataggattaaatccttttatactcaactcccccttttcttttgtaatatacttttaattttcattttaggaatgagtaaattttattttatatatttttttaaattttctatttatttatttgtttgtttgttttttgagacagggtttctctgtatagccctggctgtcctggaactcactttgtagaccaggctggcctcgaactcagaaatccacctgcctctgcctcctgagtgctgggattaaaggcgtgagccaccacgcccggaatgagtgaattttaaatgattaaattttttttacagctttaaaaaattttatttatttatttatttatttatttatttagagtgtgtgtgtgtgtgtgtgtgtgtgtgtgtatgtatgctctaactggtgtaaacgtcagaggacaactttcagggtcacttgtctctttttaccatgtgggtcctagggattgaactctggtcaccaggcttggtggcagatgcctttacctgctgagtcatcttgctggcccttgagtcagctaaggtttctgcatcctgctatctagaagagtctagatagcccctttgttgcacactgccttgttattcatgtattatccttcatgtatttctgtatccatggcatatttgtaggccgaagagcgattcagacatgatttggagagaggtggagacagttacaaatacattagctgcttagaggcggcttctaaatttgatgccccacatgggcttgctaggctccgaggccctcaggatgggttgggtaaagcatacccttctctaggcagtgtgttgctgcctgggtcctttgcacggtggcggtctgtgattccccgcagagctgttgtgatttaagtgatttaaatataggtggtgccttagtgtgttctgctcagtgtgtctgtgtactgcatgcgtgcagtagtctgcagaggacggagggcagagtcccctggagctagaggtgagctgctgtgggagttctgggaactcagtatgggtcctgtaagatcagcaagtgctcataacccctgggccctctccattgtgactgtttaaagtctttacctggatggtttctgaactgaagtggaataggttcctggggagaagtcacctcatgccgcgtgtgctcccctattccgttcccacccagcctacgtggctttctcattgccttgggaccctgtccccgctgctcaggaatctatatacttctctcccgttctctacagagctggagggaagcccccagcctagcagagcttttgttcctcctgtgagtgctggcggccatcccttttcctctcacagatgactactgctttcagagttccgtgctagtggagtccactctcctttgcctttgctaatgttaaagtacaatcagtttaggaagccttcctttgcttctgtgtttctgtgagcgctgagcctcagtcccgggaactgctggaggaatgctgcggggcgggcggagaggaacgtgtccctcacagatctagtcaggctgggagggctgacttgtgtctggttctgctcttactttggcatgcttaggaaacttaagatttctagtataagttaatccttgctatgtagcgctggctgccctgagatttctatgtagcccaggggttcttgaattcatggacttcttcctcagctctggggccatcattgcctcactgttattattgttacataactattattacattatatgtaattgttacctaataatatcattgcataactattacacataataattatgatatataataatagcataatagtcattattttttaaagaagtttgtttttgtatagaagaggaaatttgtgctttaataaaaaattaatatttttaattgtaaattttggaacagtccatattctgctaagaaggaaaacagagtaataatgtaacagtaacaatgtaacagtaacaatgtaattgatctttacattgaccagcttggctgtattgcagatccatcagcatacttactacaaatgttaaattatcacccaccttctaattttaatgttttaaataattataaatgacaacctgtgagggatgcgctacaacatcctacaaactagagttagcacaagaacttagtgataattatttcctttcttactttatgattttgtgtgtttgtgattttctaattaaaatatcccaaatatatgactgtcttttgtacatttaaatgaaaacataattcaactgaaaatagaagtgcttaatatttactttagcttgatgagtactggtaatagttgctatattgaagctgcaaaaacaaaacaaagcaactcataacaataaaaaaacaaaatctacccccccccaaccctcaaaatagcaaaacaaaaccaaaaacttgagaaccaaaaacataagcttaaaataatacccattttgtttatctccgtttggaagtttaggttgcttggggttatttatttatttatttattattcactttacatcctgttctctgcctccatctgcttcttatgatccttttattccccttgtaagtgagattcaagcttctttgcttgtgccttccttcttgtttaacttctttgagtgtgtagcatgggtgtgtagcatgggtatcctgtattttatgactgatacgcacttattggtgagtatataccatgcatgcccttttgggtctgggttacctcactcaggataatattctcaagttccatccatttgcctgcaaagttcatgatgtcttggtttttaatagccgaatagcattccattgtgtagacataccatattttctttatccattcttcagttgagggacatctaggttgtttctagtttggctcttacacatatagctgctatgaacatagttgagcaagtgtctttgtgagatggtggagcatctattgggtagtggtgtagctgggccttgaggtagaactagtcctagttctctgagagtcatcccacaggggctcaggccttgtgtgctccgttctcacattgcaccacactgcctctgttctttctgcttcaggcatcccagctgatgtctctgtaggagatgcttttgccttggggtttgtgacagtgacttatcattcaagtgtctgcttggcattgctccagagcaacttcagttgctcacctgaaaggcctctttctcaggaatggaaggcccggtcctcaggaccctaagagcccggttctctctcagtacccaaagttttcagaccttgtcattttgtttccatcttggactgttactgggtggcgtcttagttgtacttctcacaagcaggttttgttgtttcccactgggtctatctcttgtggggtgacttagtgttagggacagagtagatcttctgttttaaaaggaatgggtgacttctgaaaaaagaaaatgccagatgagatgatattttcaggaattcataagttgctttttaggtaagaggactcctgggatatgatttttagactagtgatgtgtagaacaaaaaatcgcttttggagaaatgctgaagaaaattcacatcaggtttaaagggctgtgtagtacccgggatggtaaagtgctccactgtgctccagatcctcatcgctgtatccacagataaatgtaggtctcaccccgtatccgagaagcttccttttgcagcaggagattgttacagaagccacactagtcaaatggagagaacaactcactgtgaggtgctcagctccaaatgacactgtacaataccgttggctggcctgcttctaccccgactctccagaccttgcaccctgggctggcctggaaggaacgaagcttagccaagccagtgggttgcacaggaactcagtcagagtgagtgcaggagaaacagccttctttggagacttcagcgaaacagctctctttcattggggctaacaagggctgtataaatctgtaagaaagattaaataacttcctttttcttgggagtatagcttttagagaaaggaagtcgtattacattctttaatcacttaaagttcttgagttcatttttaattgcatctgggttttgtttctaaggcacccgtctgtttggacaagtaaagtctcttgtaatcaaagccttgattcttgaggcctcagaacagtgatgtgcacttcccttgattctcttaagtgattacaacctgatgctttgctcacatactaacattcgaaattaggaaatagaagctactgtactacagtgggagaactcttagtggctgatgtgtttagaagtactgatgtgttaagacaagagccttcatgtgtgtgtgtgtgtgtgtgtgtgtgtgtgtgtgtgtgtatgtttagtgatactaacaccagtttctttgctactgtaacaagacactgtaaaaagcaggttgatgctcttgcctgtaactttagtttggcaaattattttggtgtaaaacagtacatctaagcaattgctactattaatggtagggaacgtcaacatgcatgttaaaatttcaataaatctgagaaattcggatttaaattggctattcactcttggtcaaggcctgtagtaccaagtatgagttccctcctatgtagtaggccttaaatccaggcagaaagcctgtggtgacctctttaacaattatgccacagttgcaccatggatgtatttttcttagtctgatctttactgtagctcctgggatttgcagtgaatggatggaactggaacaaattatacagagtgagataacccagatacacagagacacgtcttttagatttgtaggtttaactttgggtatttgtagaaaccaggcaagaggaaaggagccattgcagaggggcagaggagagaaaactccaggaaatttgttataggacacaggatgtgaataggagtggacacgatagggaggggaagggagagtgcaagacagacggtggccatgagtggagagaactaacaagaaggactgtttctaacagctgagtaagattctgttaacatttcatatttccatcatccatgtggttgatgggcatccacagtttctgtctctgttacgagcagagcaggaatgggcgtgtgtctctggtaggatatggagtccctcaggcatatgatctgggagtgtcatagctggatcacattacagttccatttctacctttctgagccacctctgttagtttgtaatcctgccagcagtgagtaaggttcccacatccaagtcactgccactgtctgttataactccagcactgagtgagaccggcctgggtcacccagcaggccccactagcaaacaaaccaaatcagtttcaagaccggtggccgctagcaccttcctgtttgaggtgtgagccactgtctgtgctttcagaggacagtggtgaggatttcatatgattgatgtccatcatttctgtaccttatgtttttaggtattttgcctgcatgtgtgtctgtgcaccatgtgtatatagtgcccgtggaggccggactaggatgtcagatcttctggaactggagatatggaaaattgtcagcccccatatgggtgttaggaaatgaacccaggtcccttggaggagccaccagtgtgcttaactgctaaaccatctctccagccccatcttcttttttgtataggagtttagaatgtttatccattcagggctgccagtcttctcctgaggacataatcactgcaagataataaaatgttagttgttccttgaaaaagtaatgttaagtttcaagtattgtatgcgactgaaaacctgagaaataagctaagcgtccttgactttagtagagactttagtaaattagcataactctttatttggctagtgctcacatttagtctttagagacttgattttttttttttttttaaagttaggatctctctgtgtagctcaggttggccttgaactcatatgaagcttctcagcctccgaaattctgagtaataggccttactgtacctggctttccctgaggtgataggtctcactgtgcctggctttactctgaggtgataggcctcactgtgcctggctttccctgaggtgataggcttcactgtgcctggctttaccctgaggtgataggcctcactgtgcctggctttccctgaggtgataggcctcactgtgcctggctctaccctgagatgataggcctcactgtgcctggctctaccctgaggtgataggcctcactgtgcctggctttccctgaggtgataggcctcactgtgcctggctctaccctgagatgataggcctcactgtgcctggctctaccctgaggtgataggcctcactgtgcctggctctaccctgaggtgataggcctcactgtgcctggctctaccctgaggtgataggcctcactgtgcctggctctaccctgaggtgataggcctcactgtgcctggctctaccctgaggtgataggcctcactgtgcctggctttaccctgaggtgataggcctcactgtgcctggctttccctctgttgcacttcccttgtcctttacttttattttcaagactgtttcatgtagcccaagctgatcttaaattcattctattgacaatagtgaccttaaacttctgatcctcctgcctccacctcccgtgtgctggcatataagtatgcctccatgccccatgtagtgctaggaactgaatgctgtcacactaactagtaagttggtagtaagcaatctaccaaatgagctacctctacgggtcctttgctactgtttctttttgttttgttttgaacaaatatcttcaaatattgtcagaaaaaacccttaaagaatattaaagtttctttcacattttgccttccttagggttaggaatgatttaacaatcactggaaatgatgggataatcaatgtattagtgtgtttttataaacaggtggaatgttctctacagtgggtaaatgcttcattgaaaccgaagacattgaatttccatgtaaactgtgttctgctgtagatcagtgacgaggagaagacccttcgggaacaggatatcatggcgtcctctccaagcctaagtgggatcaagttggagtcagagtcagtttataaggtatgtatcaccacagctgcttcctggtgtgaacacatctgttgtcacaccaagtgctgggccgtgcttcacactgatattctcctcactgtgatgggcttctgatctgtcccagttcatcctgttgaagaaaagcctggcattgctgaagctcctggatatgatgcggggccgcaccagaaacttccttggctgttcataggcccttacccatgccttggctcatggctttgtgtggtctctttgcatatgtgctctgacaccataagcctgcgtgctttcctgtgggaaggcattcctgaaccttagtatatggggctggtgtttgggttacaccgcacatttcccattgctggacatcacagcatctgtttccactgcttgggcatttttgtttgcactgtggccaccacagtaaactagaggcctggacgtgggaggttcattagctcctgtgttccttcccttcccaggtttgcagattgggcctctgaggttcagaggaatttatctcactcactaaatcataagctggtagcagactagaacaggtcgtggacttgggctgtagcttgcttccaaatgctgttctgctcctgcctgcattgtgccgacccttcttcctcatgcctctgctgtgccttgtgagcagctacctgttggacgctgtagctctcatggctccctgggcagctgttggatgttccacaggtgttttgttctgttctgtccttaaatacattctggaccctttggggatatcagctatgctgtacactgtagtctacagtcatgggcagcatgcggttgtcaaagctttctagttaaggacctgtgatctcaggctggagacaagcctcacgttatgagctcatgttgtcctaccagaggatcctggttcggtttccagaaatcagttgcctgtaagtccagctccaggggctctaagccagggtcctaacatgtgctccgacccccacacagacacacacatagagacgtaatgtaaaaggacaacaaaacagaaagcatttaaatagcccccggcccgtgtgaggtgctgtcagctacaccaaaccgcaggcatgtgcatttcaccgctgcctgagacacttaagggaagtgttcaccttaagttcttgcttcattttaaaaataatgaaaaaagaattttccagaaggatgatttttacagccaaggccacattatgtttatggtgggagaattcatagtacttaatctttgtttcattttataacagatccttacatgctcacaacagagtttaacagcaaaactgaagggtcgttgtttccagttctcagcgctgagggcagctattcatgggtgcttctccaggggaggagcagaagcttagagaaacagatttacaagtagctttgattataagtaactttgacttatggatactcttttgaaaataaaaattaggacaacactatttgacatacagttctcaatctgtcaggaggtaaaatagcatgcccaaagagtttgaagtagaagtttgaaattttggtgcttacaattcagaaatatgtaggttacaactaaaaagaaaacattctgtcttggctctctattactgttactgacttttggagcatgggctctagtacatctatttttatgttgttaatttttcctaatgctagtcctttggttgtaaggaataaatttctctctttttttggagctgctgggactaatgggttttgttagaagatgtagggtctcctaacaacagttactgacctatttccctgttttacttgggtcccaggtcccctttgctgatgctctggacctgttcagaggaaggaaagtctacttggaagatggctttgcttatgtgccacttaaggacatcgtggccattatcttgaacgagtttagagccacgctgtctaaggctttggcagtaagtgctttctcttatttcctcatttgatatcattataaatccctggtgattttgttttgtgctcttttacacagtaagtgaatattttcatagtgacattttagatcgcctctggtgttatgttaattgcagaatccctagcattttatatgttagtctccacacttggttttgttatggcttcttctagtagcatgaatggttaactaatggttaactaatggctagctggctgattatgtcagtggcctctctgggttactcagcaaatgggttttgcttggagatggacattgtatgtggcccttaaaacctttgtggcctttggtggatgcgacccctagatttctgttgtgaattgctgttttttatcagcagagggcattgtagaagcaagttttggttttcttattttgcagtgttgggagttgaaacctagggccttgtgcttgctagggagccgtctatgactgagctgtgcccccagtcccaggagaaagagtttatatttcggtatcataaacagcgattggctgctgctgagaaaatgacccagtgctagtgacattcgggggagccgtgttgaacaaatgagggtggactcagtttgttgagatcttactccagagtgatgccagttggcttttaatctaggtcggttttttatcttttatttatgtattttttttttgtacttgataaagaggagtacttcagagtcaaaggacaatcatgtcgctgtaatgacaatcatataagcatgtggcaagcttttcttttgagttaaaattgtagtgttttctggtataaattattgactctgtggtcattgaagcatgcataattcaggtatgttagcatttggtagggctaaaatattgactgtttctgtttaggtgaggcagtttatggaaacaccatatcaacatttaacctttttttcatgaaaatatgcgtgtgtgggtgtatgatattaatgatagaatctagggccttgtgtatgtgctaacacatggtctactgctgagttaaaccctcagccctgattaggtatttagctgctaatattcatctctaattccatgatatattaaaaagctgttttttaaagatagttgatgccttaaaatgtttctttgtttctctgtcccagaatgtctttatagataagaatagtgaggtcactgctgtgggccagtctgtctattggttggctctctttcttctgtggttcttgtttttcagttcattactctactgatgctttgaaaagcattcgtttgtgtgaaagaggtacattcttcccaggacattacatatcagtaaatgccgtctaataaatcctagcagtggctcctattctccacagtcacccaaaccatcaccatgtatttccagaagcttctagaatgttggtgctgattttgaggccagagaggctcctccctccctcctgtttctaatggcagagagcatcctgatagtgcccttcttcagagattcttggacacaccagttttttacaccagttgcaagtcatagaaacaagtctgctatcttaaccagtaatggagtgtgttagtccataaactcaagcagtccagtggttgagtgagtgacgctagtgtccacagcagtgttccagatgtttgtctgcattgtctttacccgtatgcatgtgcaagtgctttgtccttggtttggtttttctcacagtagcagaagtgggtcagacactgtatctctaacatggcatccacacaagcttctttttcttgtgcttgaatttcattctctgtcttcatatttgttatgcttgaaatggcttaaggcacatgtattactcgctgctccatcaaagtaccacaaactggggccatagaagaagcattcattgtctcctgaccgtggagagtagatatttggaattcaggtacaggcaggtctgtgaccctctgaactgttggagaaaggcctttcgggtttctctctgagttattggtattgtgacaatgtaactgtagttttcacatggaattatctatatgtgttccaaatgtctactctgtattgggttaaggccccttgctctagtgtgtctgcagtagtcatatttccaaatgcattcacattgtgagggagtaccaggtacagctttgacatatcaaatttgggggtattattcaaactgtattgtatacctagccagttagttaccatggccaaaaggattgcttacgctaaggctgtgattctgccgctttgttttctgattcatgggatcaggagactccacaggctcctacattataatctcctcaggagaaatgcctggtggattgttaggagcacgtggaggggagggtacagcagaggcagccagagaaacccttagcgcctcagagctcattccgacgggtgttttaccaagcttgaaaacactctagtgttcttttcttgtttctattataagtttgccttgcagacaacttttgtggggaagaaaggaactttcttttctacattgtttactgctcacactctttgttatttaccatctctctgacagtcactacaagcttctgagccagacggattgtaatccacttacacagatgagaaaaacacagctaggcacacactgttagagctgtggctggatctcagggtttgtgtttgtaaaactgttaggaatggtgggtgataactgtgctggtgtagggggctgtacagtgaggggattcagatctttgaactctgggaaatatacacgttgcagagcaggtgaaatgtgtaggattggagctgtggtatagtagatgactaggggttagaggacgatgggagaaggctacttcttgtctcactcagcagtctgagaagctgtgatttttttccccccataatgatttgtcttgtaataactgtttacttgttaagccatacattattttatataccacagatcttctacttagatagacagaagttattcaattataaagcttgtattctagtggcagataaataattactaaacaactacacagacacacagacacacagacacacagacacacacacacacaaacacgcacgcacacacgtgtaagggggaagaaatgtgtgttgtaggtctcagggagggaatgcttgtgttctcttggttgaaaggccagtgctgtggaagcatggtgagctagaagcaagtgagcttacatcgagagggctggatgcagatgtgagtgagccaggccaataagttgtggttttgccttattgtagggtaagtactggtactttttgataagggctgatgtggcctgctcctgtctgacataggttactgtggctgctgcttaaaaactactctagagggtgcggggcaactgaagcaggaggctggactggaaatgtctcattaattcaaataggtttattagtttatgtgaaccaaccttgcctttctgggatgacgccaacttggtcataatgtataatttttctcaatgtgttgttgaattctgcttgcaagtattttgttattctcttgctgtgaagagacaccatgaccaaggcaactcttataaaataaagtatctaactgccaggttgtttacagtttcaggggctcagtccattgtcatctcggtgtgaagcacggcagcaggcttggcaggcagggtgctggagaagttgctgagagctacatcctgatccataggcagaaaaaggaagagtggggctggcatggtctcaaagtcctcccccagtgacacacttcctccagtaaggctataccccgtagtccttctaatcctagcgaacaaggccacttcctggcattcagtatatgagcatatatgggccattcttttttaaaccaccacaccatctgtgtttatcaaagacattggtctatagttgttttttttaaatagtgtcttgacctagtcttggtatcaagatgatactggcttcacagaatgaatttggtggtgttcctttactttatacttaataaagctaagaagaattgtcatgaggtcttcagcaggcgcatcaaacatcactagacaatacaaagaaagcatctgccaccaccactcatgacctgccaccaagagaatcaaagttacagcgcctgtgagatgctgagaaaggacttagagtattagtgtttgaaagaaaaagccaccacatagaagacccagatagatgcttaagttaagaaaacctccccatgaccttgacaagatagtctccaaactgaacatatcacttaataaattggaggtgaaagttcaaatatggaggggaaaattagcaaggagactgaacccttgaaggagattcctaaaatccacaagagacattatctttagcagacaagatcatgcagaagaatgacagagctgggaaaataatacatcagtcatatatgagggaaaaaattaaagcactcgaacgatatttccaaggagtgtgggacacattcaggaggccagactccagcactgatcgtgttggggaaggagcagagataagctgaaggagtatacagtctggtgagcttgcaggagaagacttgggaatcctacagaaatgggcttttaaacatagggcgtttatagacctccaggtagacatgagcagagagaaaatcttccatgacatattatagccaggatgttaaaaatacaaagaaacaatccaacttacatacgaaggcattaatatcagaactgcccccggcttttcatctgcaagcataaaagccagaatgaatgagatttcaggctcccaaagtaagcaactgtgaaccaaaaaatgttaaatactgcaaagccatttttccaaactgatagagaaatgaagggatttcaaagcaaacacaagtcaaagcaattcatgccaaccatgactgcactgcagagttcttatgggaagcgttatagggagaagactgcataactccagataaacacgcttgacctggggaagaaatagtcatgtagacacagcaactcaacagacctcaaaactaatacgggagcaggaaaagaaagaattcatcgagagagtatgtcacctgttttaattagcgcgcctctattgctgtgataaaacacttcgactaaaagcaacttgggcagagggtttattttgcttacatttccacaccacagtccatcactgaaaggagtcagggcaggagtgccaggcatgaacctcgagggaggaactggagtcaaggtcacagaggactgctgattagtggcttgctcctcatggcttgctcagcctgctttcttagagaacctgggaccacacttgctcaggggaagtaccactcagagtgaacttggccctcccgtattgatcattagtcaaggaactgcaccacaggcttactggacaatctggtggagtattttctcaattgacgttcccttctccaaaatgactagcttctataaagttgttataaaactagcctacatacataattcagtttcttttcttttcttttttttcccttttggttttcgagacagggtttctctgtatagccctggctgtcctggaactcactttgtagaccaggttggcctcgaactcagaaattcgcctgcctctgcctcccaagtactgggcctaaaggcgtgcgccaccatgcccagtaattcaatttctttaaagtatcatttaaaagctcctttcaaaatttagtttctctaaaatatccaaagtttctccaaagtttccaaagtctgtctaaaatattcatgctctttagaataaccaaaccagttccaaggtttctataaaatttcaaagtctcttgtctgtgggatcctttttttgttgttgttttaaagttactttattactccaagagggaagaaccagggcacagttagttacattcaaatcaaagcaaagccaaagttgaacagtataaagctcagagtcagatccctgaggctcaatgttggtttttctccagctttgccaccccacagcacagctctgagcactcagcgcctcttccagcccatcattccaaatgccttccacagtcttccctaactcaacctgaggacgctcacagcaaccccatctccttgtacctgttcttcagggtctctggtactgtgataaaacaccatgagcacaacaactttgggaggaaaggctctccccgttttgtacgtattttgcatatattttgcatatatttccatataacagtccatcattgaaggacactagggcaggagctccaggaaagaaccgtctgcacacaggcgctgaagcagaaacggtggggaatgctccttattggcttactatcatggcttgctgagctggcctttgtggcaggattttccctgtccaattacattaaaatattagtgcagcaggaggcctgtgattggacagggaaaagggaggcggagctgagagttggagagacagagagactgaggagggagggaggaagcaagatggagggcgacggatgattcagaaccagcatggttttaaataaccgtaggtagatatgatatcttatagggataaaataattggggtaacttgtctaatctaggtgggcagcttataccattatcaattggccttgaatttattgtgtgggtatcttgtgaattgagaatttattgatacataaatctgactgattaattataagcttctagagttttgtttcgaccgggttgctgggtgttttggcgattgactgaggggtgggcagtcgttgcatggggctggcatggcagtgacccaccaagggaacttagtgactcgggtgtggacatttctgtggctccatactagagagaccactgagttgagaacaccctgctggagcaatgcaacccgatggtgcctagcatagtactggatataaatattcttttttttttttttttttttttttttatttcatgcaacaggctttcttacagcacccaggaccaccagaccaggggtggcaccactcctagtgaactggggcctcttacattacttgtcagtcaagagaatgcactataggcttgcccacggtccagtctggtcaggcattttcttaatcaagatactcacttctaaaatgagtctagtttgtgtcaggcagacttaaagctagctaacacaataaaacaaatgtgtagaaaataacaaccttctttctataataaccttaagtgtaaatgtcctcagcccatcactaaaaagatacagaataagggactggatggcaaaccaagaaccaagaaggacatgcaaacacttagtatcaaaggatagagaagaacttactaagcaaccagaaaatgtgagtaagatggcctgtctgttcttatagaagacaaagtaaacccaacccagaaccaagtaggaaagataaaaggagcaatgcatattaataaaagaaacagccaattatgaacacttatataccaatgattgaagcccttaattttataaaataaaaatgaaaagacataaaatactacatacgtcctgacacaatactaatcggaacttggatactccactctcaagttggataggtcttccaaattaaaaacaaagaaatttcagagctaaaatgtattatggatgaaccggtcttaacagataaatacagaatattccacccatcagatgaggaatatatatttttctcagcagcacgtggaaccttctctaaaactgatcttatcatagggcacaagtcaaatctcaaaaaaaaaaaaaaatcaacattttccatgtctcttatcagaccatgttgcaatacaactagaaatgaatgttaagagaaacaacagaaaccacaaaatacttggagacctttgaattaatactaggtcatctaagaaatgagagaggaaattaaaaattctcagaggcaaatgatagtgaaaacacatcctattagaacctctagcagcagccaaggtcctgagaggaaagctcatgctgatcctgctaaaagtctgagggacacagatcacctaatgatgcacctcaggctccccagaaacaagcagaggaccctaaatacagcagatggcgagattagataaagattagagaagagggctggcgggatggctcagcgggtaagagcactgactgctcttccgaaggtcctgagttcatatctcagcaaccacatggtggctcacaaccatccgtaatgagatctgacgtcctcttctggtctgtctgaagacagcgacagtgtacttatatataataaaaaataaagatctttaaagaaaaaagattagagaagaaattaaagacatttagattgaaagagaactcaccaaatcagacaaagatagacaaactcttagctaatctgacaagaaggaaaaaaaaaagaaaagaaaagaaaaggaggagatacaagttaatcaaattagagatcaaaaaagtaccattactactgacttgaataaatttcagaacaccattagaaattactatgaaagttaatattctgaaaaactggataatccagagtagaagaattttccaaagaacataatctacccaaaataagccctgacgataaaaataacttaaataggcccacttattgtaagcagtgaggttgacgctgttaccaaagacttccctcaacggaaagctggatttactgctgagtcctgtcacttgcaaggaagatccatactgaatgtgtttgatcgttatcttccatctgaagtatatttgctactgtacagtggtagccattataagatgggaatttaaaacgaatgtggaaatgacaggaggagatgctagtccttctttcaccattccagtaaggcctctcgcacatgcacaggccttctctggagccatgacggaaactgttgcagtcattgttgggaagcagttctatagtatggatgtgaaagggagcgatttgggggagaaaatgattttatattgggagcgttgagcttatgtaacgaccagtgcattgtgataaaatttaggttggaatatgtatatacacatgtattttatgtaaatattagatgtaaaatgtatatatcctgtaaatgttaatttagacaaccttttattgacaccattgaacaataaaaaaaattagtgaaacaattaacaattagaaatcatatttctaggttcctgattgattaagtgaattcaatggaaaaccctagtaaatacatctggaagtgctttggaaatgtcaaagtgtgctgtgtattagatgttcacttaaaggggtaaagtctgaaaaataatattctaggagcttttgctttttttctttgatttttcttctacagtgctttgcacagtttgtattttgtcatggaaattgatgagggaactttgattcatcatttcaggctttctttggtttctagttgtcaggaactactattagtggtgttcacaggaagaaaacagtacacactcttgtatctttttatgtaggcaataagcctatgtaatgcaaatggagcattgtttgtcttattttgtatggtcgggcttagcacatgtcatcttaaaaatgatgacacttttattaattctgagaattctatacattcacacagcatattttggtcatgtttattcctctctttcatgctttcctatataggaagctctgtataaaacgaccagcttggcttcttaattttgtttaaatggcctccataggcctataggaagtggcactattaagaggtgtggctttgttggagcaggtgtgaccattttggagtaggtgtggctttgttggaggtggactatgactagggtatgggctttgagctctcagaagttcaagccaatctcctgctgcttgctgatcaagttttagaactcttacctccttctctagtaccatgtctgcctacatgctaccatgtgttcaccatgacagtaatggactggactctgaagctgtaagctggacaccaattcagtgttttcctaaataagcattgctgtgatcgtagtgtctcttcacagcgatagaaaccctaagacagcttccagactaatggatggagtcagttagtgaaggacagaggtcttttaccatgtctcactaacatcttgaattcaggctttttaacagtctgttgcctgtcctaggtccacctgatcttctcctctctgctgctttctgggatcaccctcaggcagtgtttccatgaacatttcaaatgcgccagtggctgtagcgtaaagattatgctggagtcattttaattacttattttcagtgctcaatgccaagtcttgtgaaggttagctacctagctctgatgaattgtgatagctggatatttggatttgtgggttttttgtttgtttgtttgtttttttgttgttgaaaagcaaatgtggggtgaatgcacttcatatgtttacaaactgtaaacaaagcttgtgatagcatttgccaagtaccatctatgcaaacatttctgaactcttgatgacaggtattctgagttcagaaatcatccttttgtgttcttgtttctccgtctccctcatgtgtagtgaaggttagctagtcccgcactcttttgtaagtcctcctcttcctcaggttatttatcatatcaggaatcacagtcccccgaaagcggctatgcttagaaagtagtgactaacttcactctgtcttggttttttaactgactgtggagacttgtgagtatgctcctcctcctcctcactaggacctcacagcctcctccttctcactgggacctcacagcctcctcctcctcactgggacctcacaggctcctcctccttctcactgggacctcacagcctcctcctcctcctcctcactgggacctcacagcctcctcctcctcactgggacctcacagcctcctccttctcactgggacctcacaggctcctcctcctcactaggacctcacagcctcctcctcctcactaggacctcacaggctcctcctcctcctcctaactaggacctcacagcctcctcctcactgggacctcacaggctcctcctcctctgtgggaagccacatgtgccgttgctgagtggcactgactactgctggccaccacgcataagattggacaaacaaccaatgtgtacatatgcagtaaagttttttgcaaagacactgcctggcccaggcatgataatgaggttctgtaaggtactgagagtataaccaatcagatgtgagacatgcaaatgaggtatgataatgaggttctgtaaggtactgagagagagtagccaatcagatgaggaacatgcaaatgaggcttagtgcataaccaatcaaggtgtgagacacgccccctcctaggcctataaaagcagcaccagttctgggctcgaggtcttttcgcctctacaatcaagctctcccaagcgcgcgcaagactcctcctcactaggacctcacaggctcctcctcctcttcactgggacctcacaggctcctcctcctcctcctcactaggacctcacagcctcctccttctcactgggacctcacagtctcctcctcactggaacctcacagtctcctcctcctcacccactgggacctcacagcctcctcctcactggaacctcacagcctgttgcatacttgtgaggagaaaatggtagcaaatccagttgctaggaaacagctgacgactaaaatggtgttgtgagggtcttgtacatccggttctttgacagttctgctctcagagaacaaaaatttactcagccactacagagagagccctatcacctgtcggtttttcagttggaaagtttttgcacagggggagctagtaatatgaagtgttacaggagtaattaagcattagggtataatttttaacagtgactggacattgaaaaatgattatgtacctgtatggctttgagtttcagttttctgactcatcctttatgagagagaggaggagctagaagccagcacatttggcgcattagaattagcatagagagaaaccctgttatttaaaccaacttggttttacagaggtaggtcagccagtgtagtagattcttccatggatttcattgcctaatctgtgccagagaaaaaatactgaaaagcactatttggctttcttttgtaactgtttgttgtttatttttgtcataactgtaattttatgtttttgaacccaacgtcctgtgcatacaaggaaaatgccctgcttttggctttcccctagctcctagcaaaaagatggtcatttagtatcaaggcagtacccactggtaagcatgcaccgagtcaggcgaacggctactgcggagacaagtatgactagatatcccaacagggcagttggggagcgaggtgggcagcggcatgttgtggtcagtgtaaaaagaggggtttgggaagtacagagacagcagacagtgatgagcttggttttccaactaagtgcttcaaagatgtcacctttggcttgagtttggcaaggctctttctgagatgctaggagcatcttgaccttgtctcctttggagggcaggggagtggaggataaaatggctgctgcttccccttctaacttctctccgggtccctaccctgggctggttagtcctcctgctccattcatcagctgagcactgttcacgcccaggactgtaattctgcgtgttcagcttcactgcttgtccgcttaattgcatgcatgaatgtagggggtacagaatctagcttctgaattatacaagttgaaggtttgtgtctcagaaataaaattccttggaagctttttcccttatttaaataaccctgtgaggttaggttggccgttttaaaagttatagtggttcagaaaatatttcttctaatgtatcccagtaatttgtaaattcaaagtaacagtcaaaacaaaaggaaagttatgagcagttgctactatagcatcctggggaggtgggactgagggcacagtacagcttgacttcccttaaaactcacagcgtcagagtttttgtttcctttctacgttttatttttatttatttatttgagtgattaaaatgtttgaatgaatgggcattttgactgcatgtgtgtctgtgtatctcgtggctgaggaggccagaagagggttttggatcccctggtagtgaggtgccatttgggttctagaaactggatctcagttccttgcaagggcagaaagtgttcttaaccacaggagccatctctatgggctcacagggctataaaatatggccccgtgtctgtattttaaaatgggagcttacctgtattacattgaattgcctcattttccctctgctctttccccctccagccaccccaaggtgacagcccccttttctttgcttattattttattattggggtgtgtgtgtgtattgtttgtagagctatgatttcaaggctgatcactctgcattggacagtcagtaagagggcttgtcccaggagaggctgattctccatctgtggcagtcatctgttgtctgtagttctttgtctcagggtgggacatttcccctctttcatattaacgtgtcccttgacttggcccttgtttgaggcttgtttgtacagcagtttctagaggagactatttcacaggcacttcctggtaatatagctcttacagtcttccactccttcttccatgatgtttcttgagccatagatgcaggagctgtgatgtagatcttatgttggcctgggctccccacaatctgttgaactctgcattgtccctgtttgctataaagagagatttctctgatgaggggtggtagctacacttacctggaaatgtagcttatgtgcaagagaatttgcgggctgtgggtggggagctaagtctgtgggtctgattattcctgttcttaatggtaggactgggatctatttggtctttcagtattaattatggtgttagctacctgtttttcaagatcttttttcctcagaattaagaaaactgctatttctagtttctgagttgccttgggtggcgggttatgtatgcatattgaattttgtctttggtatttgtttacttattgaaatgacaatgtggttaaacaaaatttcatttattaatgtactgattagactgatttaaaagtattaaaccaatttcgcattcatggcataaatttaccctgtcaaacttgttgctaaatgttttattcatttgccacaaaggatattggtttagagttttgttgtactataatatccgcctgatgttgatgcccagttagtgccatcctcacgaaatgatttgatagttttcctctctattcattttatatgacattgtagtaaaaaaaaatacagtttaattattttaagaatgaaattatttaagttgtcaacttttcttcttttctctacaaaatagatcttaaccagtattgtattataaactgactttataccgtataattaaaataaatatttttaatattgaggtattttttggagaaactgattaaaatgttttatactgattttaagattgtaaaccaccccgcggaaaaaaatttaagtatcagaatatctttagatagatttatgtagtttataatgttgattatatggcatgtaacatttagaacatttattcaaagatgttttcttaaaatatcagagtattttctttcttgcctttctccctccctccctccctctccctccccctctcccttcnnnnnnnnnnnnnnnnnnnncccctctcccttcctccctccctccctccctccctccctccctcctttgggacaggatcttactatgtgacacaggctgtactcaccctgtcaccctctgcgtttctcacaggtatgcataaccccacccaactcagtagcattaaatgactattatctatcatcaagttttattttttttaagtatttttatgtgtatgagtgtttttactgcatgtatgtgcatgcaccatgtgccaaaagagggtagtgtcccctggaactggaatggcaagtggttgtgaggtgctgtagatgttgggaaccaaacctggttctccttagccactacgtcctctgtgcagaccctaccatgtacatttgatcacttctttatccacctcagtggcattgaaattaattatttccagtatttttgcagtcacatgcaatgttgtgtgcacttcttttgtaaaccttggtttttatttttgatctgttcatgtaagtttagaaattattttgtgagaaagcctgcttttttgtttgtgtatgtgcatgttcccgcatgtgcaggccagtgtacatgtgttgagtcggaggctgatgttgagtgtcttcctccatggctctccacctgaacccagtgttcacctacatggctagccttgctggccagcaagccccaggattcttttcccgccttttctagtgctgggattacaggcgcttgaaactccagtccccatgcttgaatggctgaagcttaccagctgagtgtccccagcccaagttaagtgtgcttgatagcttagggaactgcctttttaatgtggtacatcagcctgtacttacgagaatgtctggttctatgttattcaatatatgggattttagagttatagagaacttggctgctgtgttaggctaaagtagaatcttagtactttttcttttgatagtaggaaatatttaagaagtcatatagagatctttagaatcgtgtgagaagttatgcaacagaagtgctttgaggaaataagtttctagaggcagacaaaacagtaactacattaggctatagaacttgcaagggaaggaagtcttcatatgtttaaatgactttttatttctcttggaaatgagtggaatgttatggattgcaggagccatgggtctcacgttctgatttcttcaaaataccccagttcttctttaaccaaagaaacctcaatagctcagtgcttggtctttatgactcatatccttgatgggagttttgggaaaatagaagcttgttatcagaaaataggtaggtgtctggaacagttgaggtgaaccacattcctcacagctgtgatactgatagactcaaaagcagtcatttggaagaagtaaaagaaaattgcagtgaaactcaaactgtttgaaaattttgacatattttggcttgtaaagtaaatttgatgggcaatacaggttacagatgtgagggctggcaaaaagtcagcagacaagaaaacaagtgagggaagagtctttaataagtctgttttggtgaataaaaaaagtataaactgttaagaggagattttgttatgcctttttttgtggttcgttgtcttagggtttctattgctgtgatggaagaccatgaccaaaagtggcttggggaagaaagggtttatagatttggaatcacagttccctgagggaagccaaggctcgaactcagaccaagtgggaacctggaggcaggagctgatgcagaggccatggaggggtgctgtgtactggcttgctccccatgacttgctcagcctgctttcttatagaacccaggtaccacccacaaaaagctgggtccccttcagtcactaattaagaaaatgtcctccaaggctccttgtctccagcccagttttatggaggcagtttttaaagttgaggttcactttccttagatggctttagcttgtgtcaagacgacattagcactagcaaggggtcctgtgtattagtcattactattgttgcagtggcagaataccagacagaagggacttgaggggagagaggcttatctggggtcttgaggggaaggcaggttaggccacattggtgcagtggggtggtaagttactcatgctttggtggagtagcaagcggagaacacctggactgggcccacaggtaaacactgatgtctcctcgtcaccgccccagtgacccagttctagctaggcatgtgagcctgtgggaacatttgcgttgaaacttaagaatggctacattcatctatagtctgtacatttctgtaaaactttccagacaggttataacaaaatacatcgaaatagtaaaggaagtagaaaatgagaactcatgagcaaaccctagatcctgcctgttggcggtttgtactggtctttcttcctgggaggaaaggtaacaaggaccccagtcactgacacagaaaggagaggctttgccagtttataaaatgtaacttaaaaaaaaaaagatttatttatttactttatgtatataagtacattgtagctgtcttcaaacaaaccagaagagggcatcagatcccactacagatggtggtgagccatcatgtggttgctgagaattgaactcaggacctctgaaagagcagccagctctttttaaggaatgtaatgtaactttttaaggactatgttctgctagctaattaaaaagttttactgataggaactgcgcaagtaaatatagaaaccaatgctttattagagtcttctgtctggagatcttgatgaatgctggagtagacaaacatgatttcaatttatgtctcgaggttcttaatggcttaactatggaggagttagaggaaggacagaatgaggaaactggaaaaggaggaaggggactcagggtgtcatctttgagaagactaggacattattgattttcattgagccacttgtcaggcctatcacatgctgtagaggaatattgagaagacagagcaaaggctgctgtgtccttgtgactgtggacagccgtggagaaggaacaaaccttctctcagtagataatgtcctttatcttaatgtccttaccagcagagatgaagtgcagggtctgttcaggttccacgggtgtatttggaacgtaagccttgaagtctggaacccgaggcacagccctttctgtctcccgtgattatcgtcagattggtgttatttttgtctgtttggataacgccacgggtgtttccgattcttttgttttaatgagctgacagctctctagtgtggaagactgggtgaatgctttgctctacagttttagtgttcattaggcattattatgtaagcagtaagcaaacgctagtgagtctgatggtttgtgacatctgtttttgttgttgatgtgactgttctttgtgagaatggttattggtaatagtctgactgtcacatcttagccagactgttgaataatagacatttccattctgtcgttcctcccttctggcctcgccgttcttatgtactctgacttcattattgccaaaggaaaagcttgactattgacggctagatcccctgccactcaggatttcattttcctgcacttttgaagtgctgtcttttacattttcattttctctatttagggagccttccctttgcaggcaagatgctgatagaatttatctgctgaaaatgaaggtctgtgctcttggatttctggcttcaaaataatcatgtagagcagccatgagatgggagagatgaaagattcagagatgccagtcttaatttacaagagtttcttatcaacaagactggatcatgacttgtagcagtcttcaaaatgtatctagcactgtaatctgagctgtgatatttcatcaaacacacagcctaaacctacagaactctggtttccttgtttaatttgtatagtcagtagaagatagtgaaatctaaaagtatttcttgtgaaagcttcacatgtgggctggggagatggttttgttagtaaagagcttgttgtgtaaacaggactggggtttagagccccagggctatatggaggtgggcagattcatcggcttcactagccagacagcctggctctaggctcagtgagaaaccttggtacaaaaagaagcaggtgagccattgaggaaaacacctgaggttggcctgtgtcttgcaggcgcgtgcatgcacgtacacacagccactcatgtctgcacacagatgcacacagatgccttacatttcccagttattgttgggcaatgcttaaagatgagttccagtttatcttcagttgtgaaagatcttactattactacatttcatgaaagccttaattaaaaatacatagctggtcatctcatttagaatttgcttccttgtaaattattcttttaaatcactgttccatcttttggctaaggtcaaatgtaattattctgctaatggaagttccaccttttaggtagcttttattgtgattgtttgagttacattccttgctgtgataaaatgccttgataatgaactttaagggaagaaaggtactttggggcccacagagggcatcagtccacgtaatgggcaacacatggtagcaggcagggaaggcctggtgtcgggaccaggaggcatgctgcactcaggaagagagacagaccatgaacggagctgtaaagtgacccactacctcccaccagggtccacatcctcctaaaggttatataagcctcccaaacagtaccattagctggggaccatgcattcagatacaggagctgcagggtcattcacagtcaaagtacaaagtgccaaagtcccaggcagcatcagcgtctacagtaaaggatgaatgctgaagcccagccaggtcagctcctgtcttgtcagatgcccggggacaaatggatgctgtcaagagtttggcattcctagcctgatctccattttactttaataatttaacagaggtgtttatgaaatgataaaattaatattctttttttctctttagtagctgctaaaatttagaatttactttagagatcaagtttctattaaaaaagaccttaaagtagttttgttctgtccaagtttcagcagtgatagtaatgtttacatttttcttgatgaatcttttttcatgttgcgtggctggtatacaaatggcacactgttatgctaagtaacttctttcccagtgcagcagagctgtttagactgtgaccttttagaataaattggcaagtacgtcaggtttgctaagagctagagtggagaaatacattttgcaggaagatccttgggatgccccatttacttgaaattttaaacagtgagataaaaggctttatgttgaagcatgaatgtttcaaaatgatgattaatgaggaacttgtcacttggaattcacttcaggtcctgtgtttccagtgtcagctcagcgtccctctttgtaacacaatggatgatgttataatagcacacacaaggttagtatgctatggtaatagtgtagcaaagccgtgaaaactcagtgtccttttcactttgaaattgacttgctaacccatccaaagcccattttcatattttcattaatattttacttttgtatttttctgataacctatagcccttaaaaaatctgggaacttctggcttaggagcatattttaataaaattctctgtactttcctatagtgcctgctattttctgttatttttcaagtaaacctgcatataataaatttttttttaagcattgaccttgatagttgaagcaaccgcagtggataaggttgaagctgggaagtgtgagaagcccattcagtatttagggcataaggtgaggtcatcagtactcctgaggtgactgttgggaagtggcaacctgacctgtgatgtgtaaaccgaggcaggcttcgtattgattgcctcaggaaccattcctcactcatttaactttgagggacctggggctgcctggttgcttcagccctgagaacagtaagcactatgattgccctgattaaggctaactgatcgtcatgggggtggtaaatcattgcaggtcaggagtcttaaaggttcctctggtgagttgagtaagaacgctcacccccctcaacagctccccctccgtccccgccctataggctcatatatttgaatgcttaattgctagggagcagagctgtttgaagggattagaaggattagaggtgtggtgaggccttgttagagtaggtatggctttgttggagcaagtgtgtcactgggttgggtgggctttgaggtttcaaaagctcacacaagatccaatatgtctctctacttgttgcctgtggatcaggatgttacactcagctgctgctcagacatcatgcatgctgccatactcctaccatgctccccaccatgatgataatggactaaggctttgaagtgtaagcaagcccccagtcgaatgctttatttctttttataagagttgccttggtcatggtgcttcttcacagcaatagaaaccctaagacagttcttaactaaaggcagaagcataatttgattctatatagtgtccctcctctgtatgtgtgtgtgtgtgcacgcgcacgcgcgcgtgtttgcatgtgtgtgtgcatgtgtgcacgagtatgctatggcacacatgtagagtcagaggacagcttctgggagttggttctctccttctgttaagctaaggtcatcagattgtaggatgaatgcttgtattttctgcacaatctcaccgaccccattccagttttcattgtgaacttaaactatatttttcttttcttttttgtaacgggagtctatgtagcttgggctgtccttgaattcagtagctgagggcgagctggaacttctgaccccttgcttctccttcctcagtaccggggtctgggatttcagggtacatccataagatttttggtatttgagttggattgtaagcactttatttatttatttttaagcacagaatatttcttgcaatgtagtctaatgcataaaaacattgggtgtttgaaatgttagtcaaagatctgaaattttcaagcatataaaacatttggtcaacacaagtctttttgaagcatggatagatagttctgaaaaatccaagatttcttagcagtctgagaaatgaggaggcagctgtcagatacagtgggcccagggatctgagggacaggttggcagatatgtcagagttgtcctgtctccttgaagccatgcatgtttctagtagcacatctctttctcagtggtcattgctactgttgtaaaataggtgaaaaatcataatggcttgcttgtgtacgggtcctggacagatttagtttggaattatgaaggtgttttaaaacttaaatatatgtagacagctagtagttcagccttcattttcatataaggaatgtaatgtataattccatataaggaattataatggttaaaatgtgtaaagtaactcatacaaatatttatagatgtatactttatatataccaaactccaaaaaatttaaacatataaatctttaatttatgagaagaaatacacctatgtaactatgatttaaaacaaaatgcaaacattcctgcttctatcagtaacttgtgttctctgcttgaggcagccagggagtgatttttggtattatagattagttttacttggtttttttttttttttttttttttttttttttttgttgtttcagagttttgtaagcagaaatttgcttggccagctgtctatatagtttgataattggtgtgtctgagtcatttctatatctgaattgtattccattgtatgaatagccccaaatgaagaaagtatttaagcagatatgtcagagaggaagatatattgattatcttaaaactgtaaagaagattcttagcatgttttgtcttcaaggaaatgctttcaagcccaagttagatacagaaatctatcagggagagctgaagttaacaaatcctaccaattctaagggctgacaaccgcattgtactctcttaggttaccaatggggctaatattgatgctctgtgactgtcagttatttcaagcttcccaacttagccaggcttcttcttcacaggtaggagcccaactgagacttgggatatggcctccgaaggatcggtgtttgcctctcttcagcattgtgattgctcttgagagcatccgccataatggacaccagtctggtgccatggaaagatggcaggacaccttctgttgttaaacatgcctttaccacatgatgcaacattcctactcctagatatttactcaaaagaaatgagagcatgtgttcatagcaactttgttctcaataaatagctccaaactggaaacagtgtagtattcaccaacagggaatagataaaaacattcagataggttttagaatttagttcatttttaaaatattactattatttgtgtgcaaccttgagtgtgcgtgtgtatgtgtgtgcatgtgtgtcagtgcgggtgcacgtgtgccacggtttgtgtgggaggttagatgacaagcttctggagttagtccttgactttacccatgtttgagataggatctctgctactgtgtagaccaggctaactgctggagcacctcctgtaggcactctggcggtgcacatcctcgtgctactgtgtttgggggtctagactcgggtcatcagcgggtttgcctggcaaaccatcttcctagcctggttttatgttttgttaatttttatatttcttgtacatgagatttgttcatggctaatgcagaaatgactacgttttttagaaataccaatgtggaaagattagtatcagtacccagttgtatgctgtgacagaaaccatactatactcctacttgttttattcagtagatactaaaaaaaatagcaaacttcagtgtggtgtttgtgatgcagagtaagctggaggaagccaggtgcagtgtactgaggccctgccctcctttctgaagacgtctactttctgaacgttgtagattagaatagactcttccatgaaatagggcttcagtgtcagcctggcacaaattagcatacaccaatagctgcttgcttccctcttcctggagtcttttgccctcagttttgtgtgctaagttttcttttaaaaattctgtgtggcatgtcagtgtgagagtgtgtaggtcagaggacagctcagggggtgaggtttttttcttctgtcacgtgggtgtggtctcaggcaagggccccttcctgcccatggagccatcttgccagccctatgctatgctctaaggctcctcgactttacatatttcataaatacttgatcgcattttttattaggtattttcctcatttacatttccaatgctatcccaaaagtccccatacccacccccccaatcccctacccacccactccccctttttggccctggcgttcccctgtactggggcatataaagtttgcaaatccaatgggcctctctttccagtgatggccgactaggccattttttgacttgatcgcatttttgagaatggatatatcaagattacattttcctggaaccgtattataattattttacttaagtctctatctcatcaaatagtgagaatttatatcagtattgtttgtgttgcagtgtttctcttttggatggggatgggggtgtttgtagttcatcttgtgccttgtatggcatgctaagggggcagttccgttgcacacagggctttcctgcaatggtgttgctgaagccaggtttcttgagctcctcatgcctcacaccgtgtgtattgtaatgttactttgtcttgaattaagagtattttaatttggatttacaaatgaaatttgggagattaacgaaagtttcaagctgtttcaagttaatttaaattttgatgaggaactcagatagtgataatttcctaaggggacggcagggatcctgtggctgcttcaggccggagaaagcctagattaaaagtaactcatgggggtggtagttatagagggcctgtggcttaatttcaggcatttataattgattttttctttaataattcaaagtttatttataccctgaaagtagttaaggtttctttaatgaacaaaaagtgttaatccttttattatcttacggatgaaataaaacttttggggcaacttcataagaaaccgagtatgaatcaacaggacggtgaaagctcctcttgtccctcctccatccaaggccttttttctgaagtcaaacccaggaagaataaaattaactgcagacaaacagcgttgttgtatctgaaccattgccactgctaggtgaagagacatggggaaagaggcagtggggctattgatgatctgtgcctaaagcattaagtttcaattactttctctgtatttactcagactttcttttcctgggaaagcacacctacaagtttggtggtgggtgaggggcaacctaatgtaatttttaatttagggttggagggagggaactgtgcctggcagtgtagcctctgattggttcatcaagcttccctgtagagtctgtgactttccctaaacgtctctgtcaagccttggccctaatttttatttggaagtgattgtagagtaacagatggtggggaactggtacaggacattcctacagaccacttagcgctcctcagtcctctcctagatagcgttagtcctgttaacggtaagctttgttcatatctgaccagttttgaggtgtcttctccttcccttgggaatcaaagtctgtgttttaccctcacagtgggttctagctagaccctgtccccatggaaccatgctattgttagagaaggacagacatttgctagtgactcttgaggtagactgtgttccaagggccactatgtttgtcattcagctctggatctaacaaggacaaatggagatttgtatccaaacatcagggtggagctcagtgtatagattattactgagagaaaccatcaaggttagcagggctcttcctagaccaacttcaccggattcttgttaaagacaggcattagtggtggagtattgagagcagaagagttttagtaaacagactctgcaggattctaaagactggacaaagttgtgtcaatgacagagttagatggtggggaccagtggaggagcccttagaggagccctgttcagactgtgtcaaggagaggactttgttcctggtatgactgaactgtgacacgacccttccccaacacatgaatgttgacagcctaatatctttctgcttgcccgccctccttccctccttccctccttccctccttccctccctccctccctcccttttttctttgttttcaccctcaccacagatacagatgtccctctttcctccttgttcttccccaacctctcttctgcccctccccctccccttctgtttctcctcagaaaggggcagaaaggcctaatatctcatacctaaggatatggcagcaatgaggaaagggcctcaaaggggctcagtaggttaaagtgaagctctgtgagggggtcacagtctaatgtgtctgatgtgtcttaggcaggagacacagagagacctacagctgcaaatgcaaaggaaaggccctgtgaggtcccagtgaggaggaggctgtgaggttccagtgaggaggaggaggctgtgaggtcccagtgaggaggaggaggctgtgaggtcccagtgaggaggaggaggctgtgaggtcccagtgggtgaggaggaggaggagactgtgaggttccagtgaggaggagactgtgaggtcccagtgaggaggaggctgtgaggttccagtgaggaggagactgtgaggttccagtgaggaggaggctgtgaggtcccagtgaggaggaggctgtgaggttccagtgaggaggaggctgtgaggtcccagtgaggaggaggaggctgtgaggtcccagtgggtgaggaggaggagactgtgaggtcccagtgagaaggaggaggctgtgaggtcctagtgaggaggaggaggaggagcctgtgaggtcccagtgaggaggaggaggagcctgtgaggtcctagtgaggaggagtcttgcgcgcgctcgactggccaggaagaacgtcgctgcaacaggatccttctgcacacgtttattgggagagcttgattgtagaggcgaaaagacctcgagcccagaactggtgctgcttttataggcctaggagggggcgtgtctcacaccttgattggttatgcactaagcctcatttgcatgttcctcatctgattggctactctctctcagtaccttacagaacctcattatcatacctcatttgcatgtctcacatctgattggttatactctcagtaccttacagaacctcattatcatgcctgggccaggcagtgtctttgcaaaaaactttactgcatatgtacacattggttgtttgtccaatcttatgcgtggtggccagcagtagtcagtgccactcagcaacggcacatgtggcttcccacagaggaggaggagcctgtgaggtcccagtgannnnnnnnnnnnnnnnnnnnnnnnnnnnnnnnnnnnnnnnnnnnnnnnnnnnnnnnnnnnnnnnnnnnnnnnnnnnnnnnnnnnnnnnnnnnnnnnnnnnnnnnnnnnnnnnnnnnnnnnnnnnnnnnnnnnnnnnnnnnnnnnnnnnnnnnnnnnnnnnnnnnnnnnnnnnnnnnnnnnnnnnnnnnnnnnnnnnnnnnnnnnnnnnnnnnnnnnnnnnnnnnnnnnnnnnnnnnnnnnnnnnnnnnnnnnnnnnnnnnnnnnnnnnnnnnnnnnnnnnnnnnnnnnnnnnnnnnnnnnnnnnnnnnnnnnnnnnnnnnnnnnnnnnnnnnnnnnnnnnnnnnnnnnnnnnnnnnnnnnnnnnnnnnnnnnnnnnnnnnnnnnnnnnnnnnnnnnnnnnnnnnnnnnnnnnnnnnnnnnnnnnnnnnnnnnnncctgtgaggtcccagtgaggaggaggaggagcctgtgaggtcccagcgaggaggaggaggagcctgtgaggtcccagtgaggaggaggctgtgaggtcccagtgagaaggaggaggagcctgtgaggtcctagttaggaggaggaggaggagcctgtgaggtccccgtgaggaggaggctgtgaggtcctagtgaggaggaggaggagcctgtgaggtcccagtgaggaggagcctgtgaggtcccagtgagaaggaggaggctgtgaggtcctagtgaggaggaggaggaggctgtgaggtcccagtgaggaggaggctgtgaggtcctagtgaggaggaggaggaggaggctgtgaggtcccagtgaggaggaggctgtgaggtcccagtgagaaggaggaggagcctgtgaggtcccagtgaggaggaggaggaggaggctgtgaggttccagtgaggaggaggctgtatacgtggccatgcaggtgtgtgtgtgggagtgcagttgtttgcagaagcctggtgaaggtttcatgtcccctagaactggagttagaagccgccagattcaaatgctaggaacataattactgttctcactgaaaagcatacacactctcaaccctacagccagctctccagtcccttgaacaacattttgctgtatagatgaactgtgtggatgtgtgcaatcatgtgtgtgtactcacttgtcaagggacatagctacttgttagtttttgtgcatagatttgccatgccacagacattcagcttttttaggtaggaatatgtttgtctagcacaatacctgaaataagattgttgagttacgtggtatctggagtggtgaagtgtttgtgttcttcctggtaatgtgtgtgagttttggtcctccctcccccccccctggacataatattcatatatatttaaacagtttttatcatagggacctttacaggctaatctaattgtgctggtgtctggtcatggctctgggcagtgtaccatggctttcatttgactttccttaatggtcagctttttgagcagccttcatttgcctgtcttccatctctgcctccttgctggtgaagtcattgtgtcttactgtgctttgcatttagagctttgaaggcctggatcccagccaagacattgagattggggatggaataaaagtcgtttgtccttgggagaatgggaacattaggggctggaaaattattagttcagccacaaatagccctttgaattgagttctgcaattggggtctgtctttggtggcgtggtttttagtaagaaaagctagggcttgagcgaggcatgcatttttgccaggctgttaaaatactcgagtgtttctcagggagagtgagatgagagccattgtctgtcccatatacatcctctcatagtatattctggcttagggagcagggagctaacgagaacccaaacctagaagacaggcaaagcaggaaacagtctctgttagtgtttttatgtgttgggaacaggggctcatgggagactattatgttttagaggttgtcttgaaattctttatgcagctgcgctgactacttttatgccaactggacagaaactgtggagttattagaaaagagaaccccaactgagaaaatacccccatcagattggcttgtgccaaagcctatggtacgtttacttgagtgatgtgagggggaccagctcactgagggcagtgccacccttggactagtagtcctggatactgtaagaaagtaggctgagcaagctacagggagcaagcaagcctgtaaggtaagcagcactcctccatggcttctgtttaagttcctgcttccaggtttctgagctgacttccttggatcatgaaccacacatctgattataagatgaaggaagcccttttctccccaggtggcttctggtcatagtttcatcatagaatagagacacgacctatcgtagacgttggtaccaggcagagggggaattgctatatagctctgagaagactttagaactttggttggagaagccattgagttttcagagcttaatctgtgggaacttggaagttgagaatgttgagagtaatgttacaatggaggcctggcctgtgaagcctcacagggaagctgagagtctgttgtaaatatctattagatcctttgatttatgacatcatttaactgtttattttctgtctagatgacctttgtatggcaagagcattgccatatattgaagtaaaaaaacggatattgaagcgcccactctcactttgtgagcctgggtgattttgtgattgttgcagatgtacagacttccaatcttctcttggtgggtttttccttgagcatggagtgtccttccctatcttttctgatcagttttggtaatttggtttgaagcctattttgtcagatagtaacatggctgcacctgcttgcttcttgagtccgtttgtttggaatacccttttttatcctgtatcctgaggaaatgcctgttcttcatgtcgagctgtgtttcttggatgcagcagaatgatggatcatacctttttaatccaggctgttggtctgtgttttttaaattgggaaattgagacaactaatattgagagttatcaatgaacagtgtttactggttatcattactgtgttgtatggtgtgggtttttcattcccttcttttgatttactattctggggttatttattccttgtgtcctcttggtgtgcaattaatctcttcactaaagttttccttctagaactttctgcagaggtggactagtagataaaaatagcttaaatttggttttatcatggaagttgttccccctcctctctggattttgattgatagttttgctgggtattggttggatctgtcatttgtggtctctcagagtatttggtatgcccagtcccttctggccttccagatcttgagaagtcaggcgctattctaatggccttccttcctttctatgtgacttcatcttcttcccttggagcttagagatgctttgtttatacttttcatttagttttttgattattatgtgtcttgaggaatttttttttttttttttttttttgggcctggtctatttggagttctatatgctgtttttaccttgacagacagctccttctttaggtcggggaatttttttcttctgattttcttaaaaatattttctgtgggcatttgagaaatggctcagcatttaaaagcactgtctgttgaggtcctgagttcaatccctagcaaccacttggtggctcacagccatctgtaatgagatctggtgccctcttctggcatgcaggaacacatgcagatagagcactcatacataaataaatcttaaattatttattaatatatacacacatacatatgtatatatatattttcttttttttttcccttctgttcctttgacctggatctctccttctgtccctattattcatggacttggtattctcatggtctcatggatttcctacatgttttgtgcctggatttttttattttttaaaagatttaacattttatgactgaggcatccatttttttgtacaccatcttcagtttctgagattctctttttcatgttttataatctgtttgtgaagcttgcctctgaggtttttgtttgacatcctaaatttttgattttcaatcttatttccatttgggctttccttagtgatactatttctttataagttctaatttttatgtcttgaaatgtcttcattattttattaaactcttagtgttttcatgagcttccttgagcatattcataattgctattttgaagtctttgtcttgtgcttctgctacattccattctcagggcctactccagcacagttgatggctttcggaagaggcacaccgttctggcagttcatgtttgtggttttgtgctgggaaccaggcatctggagttaggatgtataaggtgtttttggtgtagatgtctggccttgtctctgttgggtggatgtttcattctttggttgctgttgctcaccttggatcctaggcaagttggtggctgtggtgtcccagttgaagggtgcttctgtgggagtggatatggcctagaagagaagactgtgtcccagcccctggggagccctggctacaatgttcctattgattgttggctgacacaaggaatggcgatggtttgaggctagcccagtgtagggcttctgggtagaaagtatttctaggggatcaggggctgacagaaaggaatggaggaagaaagaaggctaagaaggttggtggggaagagctaggctgagccccctgggaacggaggttctttgagaggaagggctcctgcaagtaggctgttaaaggtcttagagtgagtctactttgcatgtttaaaaatagtatgtcctagctggtacttttttacactcactcataggcacctgtgggcttatagatgacactttaaaggagaatcttaaaaagcaaacatacatatagaacaagttcaaacattcatattccaccccttgccctgtgtgtgtgtctttctgtctgtctctttctctctctttccctgtgtttgtgtctgtttccatctctatttgtctctttctcccccaactccccatccccttcagtctcatttaagtgaggaaacccagagcttacttagcccgaggtaagcaagtgccctccctgagctagtccctagccttttgtttacactttgcaagcatccatgcagaagcctgcaagttcaagtcactgttcttagggcctcccaatctgcctgtggtgagagcacactcagagaagcatctccttctctctggggctgcatgaggaaaccatttcccacctggtgtaagaactgcttctaaacactaagtagtaacacatggctgcttcagtgttcagtgttcagactgcagcatgaccttaaagaaagtttaattcacttgtgggatgatctaggccatccttagagatgcactcgatgatctgtcttagaagtgatgcttgcgtggtggaccagttgctgtgatggagacttcctgtcttatccctcctctttcttccgagccagcattctttctgctaagactttctaacccatcttttttctcttcctctgtcctaggacccagggccttgagcgtgctcagcaactttgtaaccactgagttataccccaccccttcttttttatattttattcaatttgtttcagactctataggaggttactttgttcttgttctataatacaaaaatcagtttaaattttatttaatgcttggctgagttcactgtatgttatcccaggagaggcttggtgttggctcccgccttttctacttaatattgtgtgtggattagtcacacttctcaaggccatggctttctgagctggaagaataagcctggattcatagtattgtgggcttgatccatgcccatagaagttagtgaagtttaccatggcatatattgttaccagtgcagctttcttatataatgttactgaaggtactcaaaccaagggcaactcttctgtattttgaaagctctttacttggatgaagtctcaagaaaactcatgagactttcttccccagtctagttctttctgtggcagtgaccaacggtgcaggtaatgagctatgcagtcaaggaggctgctttcctgagcccatctagtgcagtcagttataattgttgagtaaaagtaatcaaagcaggtgtttcttttaagttttcccttccattgtacctttctaactgttctctttgaccagccttgctttctgaaaacatggtgtggttttcattggaacagatttcagggtcctccattctgtgtaaaaagtcacctgtgggccttaggggaggttaagcacactggcatatgagaatcatcatatttgacatttcccatattttgctggttactcttactgtggccaggtagcggagggcacagaaactcttgatggcaaatagatttctgtcagaggcagcagaggaagacaggaggagctggaagttcctgcctcctcctttgctgtcctttgcctgggacactagtcttttgcttggattaccccattccttctaaccccccttttaaaccttatttatgtagactagccatgctggaaacagcctgatggggctctgggcttgatcctcagcaccaaaatagagacagagaacaaaacagcttgataaaccacaaggaactttgaaaaccaaagaagaaagcaactaaggaaggcactgtgagaagcgcccctccattgtggttctgctcctgagactctgaagaagcgagtcactcatgtcttcccaacagctgagggagggaacagctggcttggctgaactttgcctcccatctttgatttgaagactctttctcctattgtggaatgaaagctgtcttctatcaggactgaacacagtcagatactagctaaagtggaggaggcttccatattcagtagctagtgacagcagggcagaggctggctctattttgacacatgtcaataagtgacaaaacactttttgttataaaatgcttactcatcattttaaacttagaaatcttttatacttctaatagattctcctatggcgcaattagaaaaccagattttgggaaaattcaaccatcgtttttcattaataaagtcatcccacctctgccttttgtctgtccccttttcttcttgctgtctccctcatgggttttgttcttttccctcatgctctaaaattcaagaacttgccgagtctgttggcagctgtattgactgggttgtaatttttaaagaccatggaacaacattattttggttgaagggcatttaaatgaatggagggcgaacaggccacatcatattataaatccttataaggactttaagtttcttctggaacataatgtgatttgtcagttgtcaccctgtgtgaattacagatatcatcaatcatgagagagaaaaattcctatttaaatgtttgatcatttgtcttaagaaaatgtgattccccccgccccacccccccatttcttttagagtcagagcctgataagcaataatgagttggattcccactggcagcaccgaccactggggagtgttcatgagtgaaatccaggttgacttgtcttagattagatgctgctcacacagcccttggggttcttgagctccaaagctgtggtgttgatgggcagagggcctgtaatgaaatgcatctctgtttgttgcatttcctgtgaagtttccctccttctgttttcatatgtatatcttttcttgttcttgatgagaacctaagtgaaaaagaaaactgggtgttccttctatgggttcttcaatgtaataaaattgcattatcccagttagatctgtccacatatgtatctttaagaaaaaatattattttgtgaattacctttgaattactttaagattgtttcttgttatgtggtgttcctaggaaatagattcctaataatggacagcttttataaatttacccgctgagagagagatagatgttagcttgtaatatcgttgtcactctttgtctttgattacatttctcacttggctgttggtttttgctcaagttttctccttggagcctatttgaagagcgtttatatggaatgacagaaatgcagtggtgcaaaaatgagggtttgggtaggacttgaactttatgagattcaagtgattaaagatgatttctttattagcagctaactataaacagtcttactacgcttctttttgcttttcatttagatagctcttctgctttttctctttctccatgcctccctcccttccttccttccttccttccttccttccttccttccttccttccttccttccttccttccttcttccctctctccctccctccctcccttcctttttattttttcagtgttgagatggaatattaggaagaatttttaagttgattttttttcccctggttccacttcacatttaagtgatatccttggctactaaaagaggaagtagatatttcctcatagcatcattagttggcaaaatgttgattctcaggtgcagtgcgtcttttgtgtgaaggttttagaagacgctgagagcaaggaaaacatttaagaagaggagtttccttggcttaggatcccattcccttttgcttccctcaagagtggttgcttactgatgtcctctgaaacacgcgcacccgtgtatttgtttgtctgctctcgagttcagtttccccgggtttcaggatttcccatggtctgactaatgcaggccccatgaagtctcttgacatggaggagtactgctgaattctgactggcagcatttgaatcactctgccaactaccaaagttttgccacaactctgtttgttcaccaaatcaattggcatcccagcaaccttatgtatttgttcactttatgttcatcttttctgtatgggaagtcctggggggaaattttgagctaaggcctttctgttttcttttactgtaaaacccagtaatattcctgcggaggtttggctgggaaagactactgtaggctcatagagttgaatactgatctccatttggtggaaatgctttggaagaattaggtatggccttgttggaagagggctatcactggcagtcgggtgggctttgaggcttgaaaagctcatgccatttcagagagggcacccccatcttctgtcttggcctctgcctctctgccttgtgcttgtgggttggatgtaagttctcagctacagtgcctagcctgcctccctgccaccatgctccccaccatgatgatcatggactagaaccccctggaactggagctctaaactaaatgcttgcttttataatttgtcttggtcatgatgctttttcactataggcagacacatggggttggtgggaggcagaagcaggggaaggagaaagaaaaattgtgtgtgtgtgtgtgtgtgtgtgtgtgtgtgtgtttacatgtgcagtggaatcttgagttcaggctggtaatctctgtgttctagtccagccacttacagttgtttataatgccttctctggcacattttccacactttatgtgtgagaacagactcacacatttatcctcaatagattttcctgtttgcttaatgaaagggaatttgccttgaaagacctcccagtcatgatgctttctccgctgctcgatggccctgaagctgcccacgcctgcccctgttgccatggctctgcacagacctaacagcttcctgtcttcatccatgccagccattaggcgccaactcatccatgctgaggacagagagagacgggatgagaagaaacgacagagtagaattattcaataatcacagagactcctctcagccccattacattttcttgaaaaataactacttttatggcagggtctctcttgttacaagcccaggctgttgttaaactcagtgtggctgaggatgaccataacctttgatctgcctgcttccacctcccacatgctagggttacaggcatgtgtcagtttatttaatctagctttattttctttcatattcatccccccagccccccccccccccaagtccctataggtcttgctctgttgcccaggttgaccttgaccttgtgatcttcctgcctttgcctacaaactgctggggctacaggcatgtactatacacatgtgtagtgttttaaaataaagctcacccacgcatgtctgtaggagcttgtaggagcttgagactcacaagcagctcactcatcctggagttggtcctggttactgttttcacagaagagaatcacagaggtcagattcctttcccaaagaggtcgtgttctagtagcctgctgtggtccctgctttttagagagcttggtgtggttctccagctttagaaagagtgtcatgtatgtatgtgctgcccttgctggcccagcattgatttgtaacactgaggtgagtctgttgtttggcttctttactgtaatttctttagcatgctcaggcatacaaagtcttttcttgatactcagtttttagcatcagggtcttggtcaagaacatttcacagctttaagtgttttgtaaaactgaagtatcctgacctctgaggatagaatccgtttattctttgtttcttttttctttaaaatgcattcactccctccactttttaaatatatcccgttcctcttcccattcagttcccttcagtaacagcagggcccccagggataccaacaagaagcaataagaccaggcacaaatcctcattgcaaggcaaccctgtaggaggtaaaggtttccaagagctggtgaacaagccagggacatcccattcccactgttaggagcccttcaaaaccccaagctaaacaaccacagcttattgttcagtctctgtgagccccatgagccctgcttagtgacagtggtgctccacacctttaattccagtacttgggaggcagtggcaagtagatctctgagtttgagaccagcctggtctacagagtgagttttaggacttccagggttacccagagaaactctgcctcaaaaaatagacagcagcagcagcagcagcaacaaaaccaagcaagcaagcaagcagaattcatttctttacaaggtacagactcacggtgttacccagggtgacctcagactcagcagtcttaccaccgtgtctcctgtgcttataggcatgcactagtgtgcttagctctgagcccttctgggtttcagatgtctgctcttaagcttttgcctgccccaggttggtgaataaccttttgtttatgttctaggtagtggaaaacttgccttagaatagtttaagcaagaacacttttgagtgaggcaggttatgctccaggctatcctaagctacagtgtaagagtcttggagacaaaaaggcttaaggacagagaattttgaggtgactacagtgtgatgggcaaggggcaggagctcaaagtaatgtcctgggctctaccagtgctcgggttgggattttgtgaaaagttattttaaactatcctgaagtcaaattgaactttatgacttcattctgaccagcagggattaatttacaacgtaaccagtgacggactggtgcatatgtacatttctaccctggagatgattatttagctcaaggggctgagtttatgtcaaagaattatgatcaaataatttctcattaaattggtaagcatttgctcggaagtgtccttaaacagttctcttgaacaattaaaataactttattgctctttttatgtctgccactaaacttgagaaactaaatcttacagaaaggaggagatgacaaaatggcaggtcagattgtacaattatgtaaatacaagcccatttccctcaagaagaacgacataccttttaaatgagatcagtcaacatgtctcttacaattgccttcattgggatcatgaatatatattttttatttttgaaatagtgcagttttattccccttactaacagccctgtctgtgagtgaataaatcactagctgctgctaattctaagtgctcgtaatcactaaacaaagggtactcgagatcacacatgctgtaaaccacacgtggaagcaatgccttttatcatccacaactttaatggaaagaaaacgttaatttagggtaatgaaatagacctctaagtatgattggtgaatagaccattaggttaattaaaatgagggtatgcatcattgctatggtggagcgaccagcatgcaggagacagattcatttagtgcttgaatagaacaattcagagctagtcttcctccccactatgccatccccccgcccccccccccccaaaaaaaaaggaattgcttgggcagtggtagcgcatacctttgatcccagcactcgggaggcaaaggcaggcagatttctgagttggaggccagcctggtctacagagtgagttccaggacagccagggctacacagagaaaccctgtctcagggcagggggtggagtggggnnnnnnnnnnnnnnnnnnnnaataggcagagtagtctccctgagccaagatttactacagacagggcaagagcgatgacaaggctttttgttttttgtctcatttgcctttacctgtcattgtagagagcttgccacataaaggtgagagtttgtagagcctttggaaaaaaaaatcaattatatataaattcctctgcacatcatagcagatgaacgaactacaaaacaagactaagctattgtgacgtgctcagattttgtatcgaaagactcaaaaggtcagatatttaaaagttttttcggtttgatagattaatgcatgtctcagcctgcagcagacaagttgtacaatggatggcagttagtacaaaacctcataactggtggaaatgcagagaattagggtctgtggaatgcttaaccacagccagggctcagggaaagttagtgagaaccagaactcagggcatactggaccaaatgctgtcttctagacatgagggagccattacactcatgaacccacagcagctgtagtcgtctgtagaagaccacacaagctcaagctagtcagcactccagtgtggagggcggacagccttaaagtccccttcctttagactgttggttgttgacagcttcaggggtgtgtgtgtgtgtgtgtgtgtgtgtgtgtgtgtgtagggggagaatcagttttctttcctatacatatacttagatgtacacgaggtatctgaatagttgaaattatacttggtgtatttaaaaaaagagaggatacaaaattgggaggggatatggggtaggtggtagatctggagaaaaggggtgaatatgataaaatctattgtatcaatgtatgaaatccttcaagaattaatataaaagtattatattaaatatttattgctttctaaaattgcaatggggatgttgtacaatttcttagcctcaaactgaccatcagtgttaacaccctgcccccttcctcagccagggctcagggaaattagtttttttctgtgcctaacactcaagactaactagatggtgtgttagctaggtgaccaatttgctgattgaatttactgaagaacccagtacttcactatagtatatatttgctctttggattttctttatttggtgttagctttttattttttggtctttgattcgttattctcaaatgtcttagtgcagtgctgaatggaagcagctattcagtgagtacttctgcttcccttaggaaggcttggatgtgtttaaacaggtactgcggtcagtatggtctttagttatcatctgcctccccaggatatgcctaacttaatgtgttaatttctacttaggtcttttatccaggaatagatcatgttgtccaatggtcatccagtctgcccttccccatttgctttttgtttgccatctgaggatggctgagtaaatgttccatcagggtgcctgaccttgtaaggttgctgtgtgatgttgtctacaaagcatggtgggccacattcatagctatcctaggacttgtgcagccctcaggttggatatacgtatgagtggtcgtaaagcaaatgatgataaacctaatgaatgacttgtatggtcagttaaacaagaactggttctgagcccagtatttcacgggcactttctgcctgttaggctttcttgggaaggctatagagattaataacggaaccagctcctctgactctgtaaatcagaatttatggagccgagattcacttttcttcttccaggtacttagttttgagaaagtcttctgtcttgtttttgctgttctagtctgtccgttttcctgtaaatgacgtcggaggcatttaatgagtttacaaaaacatatatatttaatagtttcatgatatataatattaacttagcagagcttgatccagtaaaaatttaatgcgtatattagaagtgaatgcttactctgtaaatgaattcacgttaggatttttataagtcattgacttagacatttagcaggtctcatttctgtctctttttttttcccagtaaggctcatttaaagtgtttagcaaaaatgaaggagttggaaaattttgttgaaccttagctgggtcaaaacacacatacacacacacacaaacacacactatgaaggcattataatctctcttgttttcaggattatactttcttggtatgtttctttttacatgtgatctttcttcctaagtcttcatcttttacttcctcaaggcttccctttacctgagatttaattttggcacatcagaaataggctcaggctcagtctcaacactgtcactgttgttagctagctcttttgcattcccaaggaaatgcatcgggttgatttgtgaatcagttacagtaatgttgagtaatgttgaaacagcagcaacaaagggcccaaactttcccattcatcccccatgtttgtcttgggtttgttgggaactgtattctgtgttgtctttactctaggcctcaggctgcagccatcaactgaaacaaatcttagacacaaagtgtcgaattctgacttatgcaccttcaatttagaaagagtagatcactttatctcacttttcatggtcaatgaggatacccgatgaatgaaagattgatggtatcaagaaatccacgccttccatatttggcgggcagcactttcaactactaatatacttagcttctccatttaacctcacttcagagcccattctttcctctggaccacacacctgtcttgtcataggagataggaagtctggcaggagggattgtctccacactcaggtgaaatctgtagcttctgatatgtgcagtgtgctttccctacaaggcaaggctgagccatgtgacctgatcagctcctggaatgtagataggcctgaagtatgccagcctggaatagactctttgaatggagttggtgggctatgggttgaattcttgcatttttgtcctccgccaagcacacaaaatgtcctaggtagagactcctcccttactgtgaatgtggtatggacatctattgtgccacaccactgtgagcccagagatgtgactaacaacaggagctgacttgatatagcagcaggattggaattagccagcctaggcgtgggtgtcagctctgctaagtttgcaatttggggtaaacttatttaagttttttgaggctgtgtttcttgtgaagtgaagataataaagtctctgacagttctgacatgaagattaagttggacggctttaacagagagcttaggatagctctcagtatacagaagaattcactgcacgtcactttcttttcctttaattgcctccttaacatatgttatttaaacacatggtttggaaattcccttagtaagcattaattgtgagattagaattgggtaaaatggtcttcattatagtccagttgtaagaatttctttctcatgctgctcaaaatgtgctaataactgttcttttcttcaaatgagagaatagtgatgattagttttatatttggcaagattacaacatacctctgaccctttaaccattttaagaggaactgctctgcttcttgagtagttaggtttaatggagaggcctactgctagcatgacccagtctcctccatgctggttggcctactgctctgccatgaagacaacatgtaggcacacatacatgcatgcacccccccccccccacacacacacacatgaaaagaagagattagggtggagagagaacaggcatgcagagagagaggggactgagggtttgaggacatggaggtttgtgaggcctgtgtgatttgggatattgtcaaaagtgaaatccgtaggccatctggaaatggagacatggctatcttaagcctagactttgttgggaaggctcccttgctggtacagagtgtcacattacagtgctcacgcttgcttctgctcttacccttcagcttgttggatgagtcatccacaccttagcgctttcagagcagcacttaagtcagtgtttaactgagtgaccagctgacgtaatcagtcatctaacagtgaatgtgatgatttatccccaaatcttacctgtttcttttttttaaagtctaagaatatttaatgtttttggaccatttcatatacagtgtatctaccctaagttctcctactctatctggaccctcctccaaaatgttctcgttacctttattcatccttcccaactttaaaacagcccactgagtccaattagtgccctccctgtgcatgtgggcattgggccatccatggaacacaggcaaacactaccatcaacctcactcctgagggaaaataacttctctccattcagcagctcctcagctagggtggctaataaattcctatctattgccacacactccagtcgagtcagtttgacaagctgagaggcttaaaagctactcacaaggcaaaagagtttcacagaaactcactcctggtgtctggcattctctctaacccatacattaatattccatttccgagttagtctagtgtatggatctacgtgctttcttttagtattatcctattataagtgccttttaagattgaattctgacataggtaaagccagtgttccaacagtcttagaacgtccttgagcaagaccatgggcttgaaattcagtaagaatgttgctattcagtgacatttagaatagcctctggtactacactatcacttaaaataaaagccaagtcgctcccatatacaggaatttacaatggtttaggaagtagattgggctgtggttttagagtattgcattattcatgagatggttagctagaacggaactccctagttagaaccatgacttgggtgtgaaagcccttgccccggagtgtaaagacctcacacctggcttctaagactatagctgaccttagatagggctgactctgtctcagttattttattgcccagttcctgccagtctttgtgttttcattcctcttttctgtgtaagagtcattaagcatccggttacctcatttgtaccttgcgggtatgtcacccaacttccttattgtcttctctataaaaagtctgatgctcgatttgacaaaatacattcagattctacagaacctctcctgtgtgcatctgtctgtcaattcatccgacgctttgcccacccacgactagagacccgttccacgcagacaaagtggcccagagggtctgctgcaatctattatgaagttaattccttcatccgtttggagtgtttgttggccatggttctgtgcaggtaatgtcatcctccgcctcctcccttgttgcctcctcttcggtgatgctctgtgagttcgaggagattgatggcgatttcccaattagtgcggaccacgtgcaacagtaacttattctcagccatttgaccagttgtgagcctgaagtaattgctgtccttggccaaaagaagcttgtcagaccacggctgagaccgcaccaatctgtctgtgtcctaagtgtagtttctactgttccctctagtgtttccccgtgttttggtcatattattaagatctgcagctgtgggagctgcttattgtacagggggagatcaggagctggctttcagttgtctgtgtgatgcacctttcccagaaccatttgttgaaaactccatgatggctgtgctgtgtggccttaacttaaaaccaggcatggtgatgtgcctagcagcgtgaaagcgttgtttttgctcgggagtgctttgcctagctaaatgcatttatgcttccatatgaatttcaagattgctttcctttgtctgtgacaagtgtagattggtattgtagtggatcttgagattgcttttggtaggatggccataatcgcaatactcattcttctaatttcctgagcatggggaatcttccatatgctagtattttcccaaaattttcttcagtgttttaaagtttttattatggagttttgtcatatccttatgtaggttcattataatatggatggatggatggatggatggatggatggattgagacctttggaaatgggattgtttctcagtctggttgtcattggtatacaggaaggttattgatttctgtatgctaatattttatcctgctgctttgttgaaagtgctatcagttataagaattttctagtggagtccttctggtctcatattcagactcacaccagcaaacagaggtaccttgacatcttgttttcctattttttatctcttttttcttctcctgtcttattgctctagttaagacttccagtactatattgatactagtagagaaagcatcttgttcctgattttagtgggagtgttagctataggcttgctgaatgtaatctttattgttgagatatattccttctatttcaagtttcttcaggatgttgggttttgttaaaagccttttctgagtctattgagataactgtgtgatttctgttctagagttaaatttatagcctatattaattcattgagtcacccctgcatctctggaataaagccatcttaatcatagggagtgatctttgtgaagtgttctagtgtggtttatgtcatctgtttatgtcatatgtttatggtgtctatatgcagtactactttggggttgtgacactttgggaatgtcatgcttagttgatggatatgagccactcatcttaggggttacagcttcactgtggctttggcctcagttctcccttctctggtgtgccacggtgtgagcaaggcacaagtttccattgcagtgggtcaggctggaacagcatgccttcttcaccatggtaggctttgttacttgaagcagagagcccaaagtaaccctctccagcctagagtagcttttctcagtactttgtcatagtgcaagtggctaatgcagatggcgcggctgccttgttacccatagttccagtatagctgttttctcaggcctgaaggagaaacttcagaatgacaagtagtttgttagataccaggataatggggatagaaacgaaacagtagatagtctactgttgactggcaggtaccagcagaaaagacaaggacatgtgtttagtgtttaaagtgttgacagttggtgagcccttctaagagctttgatgggttttcaggaacatccctgcatctcagtcagctcctcctttgagagctgaaggctctgcagactctcagatggcaagacttctgaaactactgagtggataatcctttcatgctccctgtcttctgtaacaggttgaatatgctactgactgggcttcacatctccctttttaaaggatgccttttaagaatctgctaattcagatctttagctaggccaggcttatggcccacaggctgattttccttaaagaacaaatgaacaagcaaacgattacctttagattgagctttgcagttgacttgtaggtgtgacttctgaagtctctgtagtttgatttatgaccaaagtgatagcattaattttacaagtgcttttaagctatgtgttctttgctcttaggacttccctatgaaaaatgaagaatgactctttagccaggttttattgggataaagatcaattttatgaagcctgacgacttcatattctgaattttacctgagcaatgttccagcttaactgaatggtgtatcgtattgattgactctctcatcagctacctttattgattaatgacacagataagaaagatgtaccttgttgtatggggattagacaggaaactacaagcccttcatatctcagacagctaatataagtctgtatttatgaatggcatgatgcatgaaagagaaggaaagcccagggtttagttacgactggggagaagtagggcaaagggagagaaagccttgtggtgatctagctttgaaaggaggggcagctacctgggtggccagcaagcctttgatgctggccagcgagtgagtgtgctgaccgatggctttattgatcacagtcaactctggacaggtttgaggatgtgcacttttcctaagactacaggcaattcttgttccttcaagcacctccaaacagagtctgtgtataaaatactgcggagcttcagaggccgtcagtgctggctggtgccttccactgcactgagttagttagctgcttctggaatgctgtataaaccaaagctatcacagtcagtccacaaagcatactggctaggaagtaagaggagactcttggagaattcatgtttaaggattaaaaaatgctgctcatagcaaaagatagcatggtcagaacttggcttcagggacatgtgtgtctgagtgttggatactcttgctaggcaggctctgcaaactgctgtctcttctgcttactagggacagtgacaggcatggttgagtgaggtagtgagaataaagctcgacacatggctgttccatgtccattatcttcaggatggtgacagatatgacgacttccaattgtcaagctaaatcaaaacatttcagagtggtggatggtttctgaccagtttgaaagaataagaggtaaatgattaatacaaaacctatgcaagtgtaaaagtcttaatgtagcagaaatcttcctgaaaattaagagtacgaagaaagctgttcggtagtctttgagaataatttatctgtcaacatttccagtactgtccatttggatctaaggttttgacttttgctttgtcctaaaacctttgaatcaatgctgtcttttctcactactgttttatcctccttgataaaaggctgttgatcttcagaacaccagaaacaagaaaaataatactaactcctttcttaccaggttcctgaactctgaataaccacaagggagcccggtgtgccaagcactgctttgccctatctctgtgcacagcacctttaaaccatcacaactccagtttttgagtaattagtgtattccttgtacattattaagtactgttttgtgttgattaatttaatttttaatagaatccttgaaggtgcatatatattagcactaggtttcttggtccttgatgctattatgccagtggaaactccgagaatggaactgagccaaacaggggaagattatcgagtggaattcatgattgcattttcccaagttcccagaaaacaaaggttgttggctaacttggggtcttaatttgctcagggagagagactcctgtggaagggatgtaaggacaggtcacaggcaaagcgtattctgcttgttggttcaggagctgcctgttattccattcagactgggtgttaccactaggtcatggtgggttggagtctgatgcctgtgtagaagggcctgtgccctgcatgtttattttctgactgcagttgaatcagccagccaatcccaggactgtggccagtgcttttactgttagcatcctgttgagcccatgtttattagttaggtggccccagcttgttgagggaagacagtgaagcaggtgtcctgacgacagttggatgacgtgaccctaggcttgtcctctgtcacttcaggaactgttaagcttgtttttcatgtgaggaagttgaggttagtaactttactgctgtttgtacccatgcaccctgtgtgccccatcactgagacggctctacagttgggaacgttatagggaaagaccaaaagcgtgtgagcatttgttgtttagagctgtgcagcccgttgttaactgctttgtgccagcacactagcaatgggaccatgttttttgggatttttacctcttattttggttactgtgaatctaagtgcctaggaaaaatcttgtactgtagagtctgctcagaagcagtgacctcgagggtgaatagcaggaaataagtagtagtatgcgtcctgggggcattgggacatttaggtgagttaattcagaactgggttttgttggaagtgtcctgattttttttttaccattccttttgaatatcttgtaagtacattttctttttcttttttatagcaagtattttcttgtgatacttgtcacaactcagaactcagaaccccaaataagacacatagggcacattggctaaaaactgtgtatggcatagttgggaatatagctcagtgggaaatcctttgcctagcaatcatacctcctgggtttgagctctagctttgcaaaacaagcattacaatagaattacggggttgcttttgtgaaaaggatttttttcctcaagtacattcaaagtaaaagctcctggtctgaaacagcacttagtcttctcccagggttacttgcttcattctgaacttcagggtttcacgctaggtttatcacagtatttgtaagccctgaagcagaggtggggtagttttgaggcaagtgcctcatggagagacactggctagtcaggcagtgatttcagtatcagcagttttgtgattattatggtgtgtgtttattgctggcagttcgtactttttacaaagagcctgtttaactgcttctcctcccaagtgaagagccactagcccgagtttccctctggaagcggtttctgcagagcactgtacttctggcacattcctttccagccttccaaagtggagactttgaaatgagaagtgtcatgcaaggtgaactattggtattttcacagcaggcacattttaccatcttctttgtaaaaacactattgaatcacatttatggttttgtcacttttacaatgagaacagatagtgacatttaagcctaggaaaatccagtctctgatatcgactgttaatgtggatatcttgaagaagcaggtagaacattgtgaccttatgatgtgaattctttaattagagcatacagatcagtcaaatatttgacttattgatttttggagaaccaaactgttttgtatgcaaggtatgaacattagtaggggatgctgcccttgattcagaataaacagttagtcaaggtcttgtccagagtaaataatatacatttctactattttagtgtacactaacagatataatcggttacctcatttatagccatccatttaaagtgatggttggtgtttctagcaccagttgtctaagatagcattagctggtaactatgtacgtttaaaaatacagcatatccggggcctagcaaacacagaagtggatgctcacagtcagctattggatggatcacagggcccccaatggaggagctagagaaagtacccaaggaactaaagggatctgcaaccctataggtggaacaacattatgaactaaccagtaccccggagctcttgactctagctgcatatgtatcaaaagatggcctagtcggccatcactggaaagagaggcccactggacttgcaaactttatatgcccagtacagaggaatgccagggccaaaaagtgggagtgggtggaaggggatggggggnnnnnnnnnnnnnnnnnnnnnnnnnnnnnnnnnnnnnnnnnnnnnnnnnnnnnnnnnnnnnnnnnnnnnnnnnnnnnnnnnnnnnnnnnnnnnnnnnnnnnnnnnnnnnnnnnnnnnnnnnnnnnnnnnnnnnnnnnnnnnnnnnnnnnnnnnnnnnnnnnnnnnnnnnnnnnnnnnnnnnnnnnnnnnnnnnnnnnnnnnnnnnnnnnnnnnnnnnnnnnnnnnnnnnnnnnnnnnnnnnnnnnnnnnnnnnnnnnnnnnnnnnnnnnnnnnnnnnnnnnnnnnnnnnnnnnnnnnnnnnnnnnnnnnnnnnnnnnnnnnnnnnnnnnnnnnnnnnnnnnnnnnnnnnnnnnnnnnnnnnnnnnnnnnnnnnnnnnnnnnnnnnnnnnnnnnnnnnnnnnnnnnnnnnnnnnnnnnnnnnnnnnnnnnnnnnnnnnnnnnnnnnnnnnnnnnnnnnnnnnnnnnnnnnnncaagagacagcgacatctgggtcctttcaataaaatcttgcaagtgtatgcaatggtgtcagcgtttggatgctgattatggggtggatccctggatatggcagtctctacatggtccatcctttcatctcagctccaaactttgtctctgtaactccttccattggtgttttgttcccaaatctaaggaggggcatagtgtccacacttcagtcttcattcttcttgagtttcatgtgtttagcaaattatatcttatatcttgggtatcctaggtttggggctaatatccacttatcagtgagtacatattgtgtgagtttctttgtgaatgcgttacctcactcaggatgatgccctccaggtccatccatttggctaggaatttcataaattcattctttttaatagctgagtagtactccattgtgtagatgtaccacattttctgtatccattcctctgttgaggggcatctaggttctttccagcttctggctattataaataaggctgctatgaacatagtggagcatgtgtccttcttaccagttggggcatcttctggatatatgcccaggagaggtattgctgaatcctccggtagtactatgtccacagaaacactttctatggggaactcactgcgataggttgcaggtaggtgattttcattctgcttcctggcctccattccagtctccagaattcctcctagtctttgggtaacctacttacaggagctccctcccaccttactgcctacttacttactgccattccagtgtccccctagctcttctggctgcccttctcagcctttcctccaatccatttatgttcctttgtgtcacatgtcaacccttagaagcagactctagcagacatcacggccataacgcttgcctgtgatccagcatgagcaacagcagcctgagaatggagcacccacagatcagatcagatcagatcaggtagctacaacaaaaaccccttaactcttataactccagatgcctcggtccagcacaaaaccacaaacacacacagccaaggtagtattcctcctctagaaaccagtgaccctattgcaataggtttgagaagcagtttagctgatgcagaagacaagctgaagtacaatagcaattatgaatatgttgaagatccttaaagaggatgttcaatgtgaataaatgtatcaatgaaggctgtgaaaacattgttgaatgaaatactgaaaacatctttatgacatgaaaatagagatcgaatctctacagaaaactcaaactgaaggaaaaccagaaatgaaaaacttaggaagttgaacaaaaacctcagaggtaagccttgccaacagatggaagacatggaagagggaatctaccttgttgaacacaaggtagaaaaaaatagatagctcagtcagagaatgtggttagatgtgagaaaatctaggcacaaaacaaccagggagtttgggagatgatgaaaataccaagcctacaaataatacagtgactttcaacccgtgggtcgcagggcgtggcccagcagcaaagcagaactatgatcaggctggcctcatcctggagatgcaggggtgactgcgcatccttgataagtagtcttaatgcaatccaccatgtaaactgactgaaaggcaaagcccatgattatctcagtagatgcagggaagccgtgacaaaactgaacatcctatcgtaataaaaatctggagagacagaggggacattccagaacacaataaaggcagtttacagcaagcccagagacagcatcaacagaaacagaggaacttagtgaatatctactaaaatgaggaacaagacaaggttgtctactctccatatttattcaataaaatatttgaagtcttagctagagcaataagacagctgaaggacaccgagggaatacatataggaagggagaagttaaattatctttatttgcatatagtatggttttatacacaaaagacccttatacctctaccagaaaactttacaggtaataatattttcagccgctgggtatgttagtatacaactttaatcttaacacttgggagactggtgtgtggtgtgcaaatgggtacagctactgtgtatgtatgttgtaagtatgtatgtatgtatgtatgtatgttgtatgtatgtgatggttcctcacaatgcttggagtaaatctgtctcatgaggtgtattatagtacagctataccactcttgagcatacacccgaatgacttcatcgccttctgcagagaacatgctcatccatgttcactgctgctatattcataagagccagaaactggagacagcctgattatagagtagtcaacctggtgcctcactggatgctacacccatactgactagtattcatgatattgtaaggtactgtacatgctaccagaaggaaaggtagtaccaactctgtgacctagaacagtgacttgtgtgttagatatcctggtgcagtaatggcataaatgttgaggagtgtctacccacttcttataattggatttatggcccactctatgagatggaatccttatttatcactgttaaagtgctctagaatctgagaccagatagcccatgaacctggggaaaacctaatactgttattctgctaaaggaaaattgcaatacaattactgttaatgacaaactgatatacctgtagatcaataccttactcaaaccacatcagacaaggctcttcttccagtagatggctgttaacacagagacaggcaactggacagtgtagaaagtgagagactgatgccctacatgggatatcttcatcaaacccctcccctctaggctcaaggatttatgagaaaggggaaacagactgattgtaacagccagaggtgatggttgactccaagtattttctagacacaactgaactgctcacatatgaatgtcaagactgtagtacattcatttcctcctatctagtattttggatgctaaaatagattgagctaccgagatacattaaaagaacctttccattttatcttaagctcaccttaagaagtggtgcacacttttaatcccagcacttggatggcagaggcaggcggatttctgagttcaaggccagcctggtctagaaagtgagtttcaggacagccagggctacacagagaaaccctgtctcgaacccccccccccccccccaaaaaaaaaaagaaatagagattgcctttaatctgtttaataaattctactctgtaaaacaataatgaaggttgatttgtacttgagtgttaagacatttcatcagaattaacttcattttcttgatctcccagccacaccctctaaacatttgaagatactctttctaactctgggtaacctctttgtccttgtgggttgtcttctagccatttctctccttcacaccttggtctgtgtagttggctctgcatttagattccatcacgcattagttgtcttccatttttagctttctcattgttttagtaaaacattcagataagggtgaggggatgagggtggagctctggagtgttggctcagtggttgagagagcttgctgcatttccagaggactggagttcagttcccagcacccacatggtggcttataactgaatgtaactccagttccaggggatccagtcccatctctggtctctgcttgcagtgtatgcatgtgatgtccagacatatatgcaggcaaacagtcctacatataaaatacacattttactgtttttggcaaaggacagtcttcaggcgacttcccccaagcttgaactgtgctcttttctgctttggttgaaccttgtgtggagaattaataggagccgccatgtttcagaatgactgggggaagcccgaaatcccagaattttgacgtagttgctaaatatggctgagatttaataccgaaaaaaggtaattaataaataatttatgtagccatttgctaccagatgttactaaccaatttgttagaactaatgtgtataatatacagtatataaagttttaaaaggttccttggtttcagttaacagtctgttacctcaggtttccattttacggttcagagatggataatttagatattagggatattaatttttttttcttctatccagtctctaatttttttagccccttggagttttaaattccaccttttttccctcctagggagcatctgctttgggaaaggtaatgcacaagggcttgtgggaacgagacaggacagagaagtaaactcactaaagtggtggctcaggctgagggcagagcaagagagtgatgtgtgcagaaggtaaggaaggcagcttgtgggagagagggaagtaaggcagactgacggagagtggatatagcgtggttctctgttgtgtggaaaaccagtggcacaatagagataaaggagagtcacagttggaagagacgaggagggccagtgtgggagaaggctagaaagacaaggaaggaggaagacagatttgccttctacccagtgctctactctgcacacctcttgagatgggcacggcggtctgcctatgttgagagtgaaaagccagcagtgcagggcataccaagtagctggttaatggccacagcatcaagagctaaccaggtcaacaccagctcaagtatagttgagtcaggttatctcattttcctctgaaaaaagccagtcacacactttggtcaggcaatttgtgtgttagtcatggtttactgcacacacgaaaagttggatttcacatactttattcaagatatgaaagaaagcacagctctaaccaagagctgaaagtcactggaaaatgaactttggtagcatccattgtagctggggttgtgatatgctgcttttttatttttcagagggctgccgctgttgagcactttacctggaaacagtctaaaccttctggttctctggcgtcggctgctgttagattgctttggtgtgggtcagagggagagccgaccacaatttggagctattggtttgcaccttgccacagtggacagacagagccacccagccacaggcttgtgtgcaaaacagcaaaatctgtcaagggctggtctttccttctgagtgacagtgtggcccagagtcctgcttaccctcctgtatagtcactaccattcagtggttcctgtatagttactgtatagtcactatcattcagtggtttctgtatagttactgtatagtcactaccattcagtggttcctgtatagttactgtatagtcactatcattcagtggttcctgtatagctcctgtatagtcactatcattcagtggttcctgtatagctcctgtatagtcactaccattcagtggttcctgtatagttactgtatagtcactaccattcagtggttcctgtatagttactgtatagtcactaccattcagtggttcctgtatagttactgtatagtcactaccattcagtggttcctgtatagttactgtatagtcactatcattcagtggttcctgtatagttactgtatagtcactatcattcagtggttcctgtatagttactgtatagtcactatcattcagtggttcctgtatagctcctgtatagtcactaccattcagtggttcctgtatagttactgtatagtcactaccattcagtggttcctgtatagttactgtatagtcactatcattcagtggttcctgtatagttactgtatagtcactatcattcagtggttcctgtatagttactgtatagtcactatcattcagtggttcctgtatagttactgtatagtcactatcattcagtggttcctgtatagctcctgtatagtcactatcattcagtggttcctgtatagctcctgtatagtcactaccattcagtggttcctgtatagctactgtatagtcactaccattcagtggttcctgtatagttactgtatagtcactatcattcagtggttcctgtatagctcctgtatagtcactaccattcagtggttcctgtatagctcctgtatagtcactatcattcagtggttcctgtatagttactgtatagtcactatcattcagtggttcctgtatagttactgtatagtcactatcattcagtggttcctgtatagttactgtatagtcactaccattcagtggttcctgtatagttactgtatagtcactatcnnnnnnnnnnnnnnnnnnnnnnnnnnnnnnnnnnnnnnnnnnnnnnnnnnnnnnnnnnnnnnnnnnnnnnnnnnnnnnnnnnnnnnnnnnnnnnnnnnnnnnnnnnnnnnnnnnnnnnnnnnnnnnnnnnnnnnnnnnnnnnnnnnnnnnnnnnnnnnnnnnnnnnnnnnnnnnnnnnnnnnnnnnnnnnnnnnnnnnnnnnnnnnnnnnnnnnnnnnnnnnnnnnnnnnnnnnnnnnnnnnnnnnnnnnnnnnnnnnnnnnnnnnnnnnnnnnnnnnnnnnnnnnnnnnnnnnnnnnnnnnnnnnnnnnnnnnnnnnnnnnnnnnnnnnnnnnnnnnnnnnnnnnnnnnnnnnnnnnnnnnnnnnnnnnnnnnnnnnnnnnnnnnnnnnnnnnnnnnnnnnnnnnnnnnnnnnnnnnnnnnnnnnnnnnnnnnnnnnnnnnnnnnnnnnnnnnnnnnnnnnnnnnnnnnnnnnnnnnnnnnnnnnnnnnnnnnnnnnnnnnnnnnnnnnnnnnnnnnnnnnnnnnnnnnnnnnnnnnnnnnnnnnnnnnnnnnnnnnnnnnnnnnnnnnnnnnnnnnnnnnnnnnnnnnnnnnnnnnnnnnnnnnnnnnnnnnnnnnnnnnnnnnnnnnnnnnnnnnnnnnnnnnnnnnnnnnnnnnnnnnnnnnnnnnnnnnnnnnnnnnnnnnnnnnnnnnnnnnnnnnnnnnnnnnnnnnnnnnnnnnnnnnnnnnnnnnnnnnnnnnnnnnnnnnnnnnnnnnnnnnnnnnnnnnnnnnnnnnnnnnnnnnnnnnnnnnnnnnnnnnnnnnnnnnnnnnnnnnnnnnnnnnnnnnnnnnnnnnnnnnnnnnnnnnnnnnnnnnnnnnnnnnnnnnnnnnnnnnnnnnnnnnnnnnnnnnnnnnnnnnnnnnnnnnnnnnnnnnnnnnnnnnnnnnnnnnnnnnnnnnnnnnnnnnnnnnnnnnnnnnnnnnnnnnnnnnnnnnnnnnnnnnnnnnnnnnnnnnnnnnnnnnnnnnnnnnnnnnnnnnnnnnnnnnnnnnnnnnnnnnnnnnnnnnnnnnnnnnnnnnnnnnnnnnnnnnnnnnnnnnnnnnnnnnnnnnnnnnnnnnnnnnnnnnnnnnnnnnnnnnnnnnnnnnnnnnnnnnnnnnnnnnnnnnnnnnnnnnnnnnnnnnnnnnnnnnnnnnnnnnnnnnnnnnnnnnnnnnnnnnnnnnnnnnnnnnnnnnnnnnnnnnnnnnnnnnnnnnnnnnnnnnnnnnnnnnnnnnnnnnnnnnnnnnnnnnnnnnnnnnnnnnnnnnnnnnnnnnnnnnnnnnnnnnnnnnnnnnnnnnnnnnnnnnnnnnnnnnnnnnnnnnnnnnnnnnnnnnnnnnnnnnnnnnnnnnnnnnnnnnnnnnnnnnnnnnnnnnnnnnnnnnnnnnnnnnnnnnnngtgtgggtcagagggagagccgaccacaatttggagctattggtttgcaccttgccacagtggacagacagagccacccagccacaggcttgtgtgcaaaacagcaaaatctgtcaagggctggtctttccttgtgagtgacagtgtggcccagagtcctgcttaccctcctgtatagtcactaccattcagtggttcctgtatagttactgtatagtcactatcattcagtggtttctgtatagttactgtatagtcactaccattcagtggttcctgtatagttactgtatagtcactaccattcagtggttcctgtatagctcctgtatagtcactaccattcagtggttcctgtatagctcctgtatagtcactatcattcagtggttcctgtatagttactgtatagtcactaccattcagtggttcctgtatagttactgtatagtcactatcattcagtggttcctgtatagctcctgtatagtcactaccattcagtggttcctgtatagttactgtatagtcactatcattcagtggttcctgtatagttactgtatagtcactaccattcagtggttcctgtatagctcctgtatagtcactaccattcagtggttcctgtatagttactgtatagtcactaccattcagtggttcctgtatagttactgtatagtcactatcattcagtggttcctgtatagttactgtatagtcactatcattcagtggttcctgtatagctcctgtatagtcactaccattcagtggttcctgtatagttactgtatagtcactaccattcagtggttcctgtatagttactgtatagtcactaccattcagtggttcctgtatagttactgtatagtcactatcattcagtggttcctgtatagctcctgtatagtcactatcattcagtggttcctgtatagctactgtatagtcactatcattcagtggttcctgtatagctcctgtatagtcactaccattcagtggttcctgtatagttactgtatagtcactaccattcagtggttcctgtatagctcctgtatagtcactaccattcagtggttcctgtatagttactgtatagtcactaccattcagtggttcctgtatagctcctgtatagtcactaccattcagtggttcctgtatagttactgtatagtcactatcattcagtggttcctgtatagctcctgtatagtcactaccattcagtggctcctggcaggatgctctcaggcttgtagaatccccagcgatgcgcctttgggttcaccttgatttgtagttttatgttggaacaattttatctaatgtatcgttcagttcacggagcagaagaaattaatcaatgcgaaatcttagagagcacaaatctccgagtaactaattaatcagacaataagcaaatgtgaaagtttggccttattttttctattagattgaatataagggagtgggagggaggggcagccaaagaaaaattactttgcttaaattagagcatactttaaaaagttttctttggagagcagaaagtaattgtgttgtaagtatgtgtaattatttgcgtccctttccaacctccttgggatcaaattggttttctccaggaaaggcaattgcaagcacggcgccttccacttttgttgaattactgtgtgttgcatggagtgtaccccacaaacctgaaatcagatgtactgctatgatttataatagccattaattacagctttgtattaaagccttttagttttctgcatcagcaagcctaagttctcctttgaagaagagtcacttacattaggtctcatgctaactagtgaatcccttccgtagcagctgatcaaaggcactgatgcacttctcagttagcctgaaatgtgctttcctgaagctcttaaatgttgtgtgatgttgaaatagctgggaagatcctgttctgctgatgagaatccggcccaggtcggggctcagagtattgataaaaaccacgcagttaccacatctatcaacctcactgcacagtcccctttcttactccccctagcgtgcagtcttcaggtcccagctccagctccttagctccccctgtgggcttacaaaaggctcaggttctactcctggagaaggcagtactaagtctaggggtttgtaaagggctccttgtgaaatcaggtgcagagcagagattgaaaacacaagtcccttagtgaattttcatttgaaaaaccaggtttccctgcctatctgaggtaaagagtatctgtaagccagtcaagtgtgcagagccaggtcactgtgtcttttgggcatctttgataggctccttctctatttgggggccagcgattcccttacgtttgcagcatgcccctttctcagtctgatgtatatcagctatgagttctttgctgacctccaccgttttatgactttgttaaaagcttcttgcttctttttattgccttcctgtgaataaagccacattttgattgagaaaagtctaagattagggtaacatttaatcacatacttcttagaaattactcattgaacttattttcttcagatttcatatgcccaagaagcaacttttatcttttttctttctttctcttctcctctacctctttggctccctctatctcctctttttcttttttaaagacagtgttttgataggtagtataggctggccttgaactcgaaattcccctgcccatacttacttagttcctcgtactcattgtttaagaagtatactaggcacagtttaatcttgccattggacttaatgtgtagtactcacttctgttactttgctgtgcttcatctgaatatatttgggaataattattttcacaagtgctcctaaatagtcttgaaggcagagtaatatgctcttgtggtttgaatgtactgtgtctaagttcagatgctgttatcatggtagtgttcaggagtagggcctttcagagttggttagggcacacgggcttttcccatgctggtgaggctaggtgcctcataagtaactccatgttgtatgctactgttcccagggagatggaaacaaatgcctgccgatcccacacaggcacccagcaacaggtcagaggaaggataccacggtgtccagcttggtgaaccagttgtttattggggttactaggaggaatatgtgtggaaggtcatttgcaggaactgaaatgacccagagacagcttcattaccaaagtccaccccaacacgtattgagagctggagacccagggcacatgcacagtctgcaggcggcttggcagggtggagggtgtcctttcgaggcacctcagttggtctagcctcttctaggcaatccagctggtctttccttttcccagatagcccggtttatctgagactatatctcagtagtcttaccattatatatgtttggggagggaggagaactagtgtacctgttcggtttcagggacttctggaagccattgaattgtttacttcctgaacttaacagtgttccttgaaggacagggtgtttgacctccctgtaaagtcttgtgtcttacagagcttcccccttaaaacatcctgcatacagactatcctggacccagttttacaggagaataaaacggaggctggtgggtggaaaggcctggcatcgtagttaccagagctgtggtttcccccacttctgctcattgttgctgagccacactcgtgtgtggaacgacagctagtgcccttccttccagagctgctcctggcctggcccttcagtctgcctcagcatctggcacccagcggctgtgggggagtgggcagtgcatgcgggatgcaggtgcactttgcagctgggggtaagagagaggcaagaggtcctgcagaggttagtaagtgttttcttccacaggggagagtgcagaccaagtggtgatcatatctatttcttctgttctctttcttgttttgctcccagatttgagagagaattcacatgccatgtaatttaaagtttaccattgtgattcttggactcacagagctgtacaggtagcagctctgtcagattcggaacattttcaggaccaaagggtaaaatgtctcagtctggcaaatgcttgcctggaacttcatcccctcctcctcccccagaatagctgccagcagttcctatctgaaactgtagaggcagaactaagaccaaaagaaaaaaaaaaaaaagatccactgacctccaccttgatactcctatccccacttccaagtcctacagaacctgaagcccccagtgccacagcgcagtttcctcctcttgagagcctgcagccttcagctgttctgatgaaaagagtgactctgcttctagaggcgcctgtcttctagctttagtgtgcacacggcccccatcaatcccggtctcatgctgaccctctatgggagcaagcactgatcaatgtcaccattgccttggctttgtcccaccccacatctgggcaagtatcagtcagctgcttctgtataaactcccctctggggacatttccacccacatgggaccatataagtgtgtggttttctgaggttctcttcatgtagcatgctttcaaggttcatacatgactgcattaatatgccattttgttataatgctcagtgacattcccttgcattatatacaagggtggtatctgtggtattatggcttcagtctctctcttcccaaccccttttcagctattgtaactgagtacaattctcctattaacaccacagaccagcctagaacagagaattgtataaagttgagcccctatccacaggtggatggtactgtttactgacttacttcccttcctccctcatttttatggagtttttttttttttttttttttttttggttttctgagacaggttttctctgtgtagccctgactgtcctggaactcactttgtagaccaggctggccttaaactcagaaatccacctgcctctacctccaagtagagtgctgggattaaaggcgtgcaccaccactgccactgtccggcttttattgaattcttgatgtataaaaaaaaccaccattacactttatgatgtaatagctcgaaggacatgacctgtttgttttcttgcagagcatatagtcacgttgaggcaatgaggtaatctgtgtgtcttcaggtatgttacatgcaaagtcaggtttagaggaagagagcagttgctgcttgtgatttctggcagtcagtattccaggttcccaggtcagtggctgtgtgtgtgtgtgtgtgtccctgcacctattcttacctctgttggcctgggtaagatttgtagtatattcaacagagtcctttttgccacttctctcacatattaatttaaacattataatagccattttttgaagttttctagtttaaaactaataagtaatggtttattttattttattagatattttctttatttactttcaaatgttatcccccttcctggtctccctctgaaatctccctccccttatcctttcctctcttcccctcctcaccaacccacccactcccacttcctggccctggcatttccccatgctagagcatagagacttcacagaaccaaggacctctcctcccattgatgacccactaggccatcctctgctgcatatgtagctagagccatgagtcccaccatgtgtatggttggtggtttagtccttgggagctctaggcttactggttagttcatattgttgttcctcctatggggctgcaaatcccttcaactacttgggtcctttttctagatccttctttggagactctgtgcttagtccaatggaggtcggtgagcatctccttctgtatttgtcaggcactgtcagagcctttcaggagacagttatatcaggctcttgtcagcaaggtcttgttggcatctgcaatagtgtctgggtttggtggttgtatatgggggatggatccccaggtgggacagtctctggatggcctttcctttattctctgctccacactttgtctctgtaactccttctatggtattttgttccacctcctaagaaggactgaagtatccacactttggtcttccttcttcttgagtttcatgtgttttgcgaattgtatcttggatattccaagcttttgggctaatatgcacttatcagtgagtgcatatcatgtgagttcttttgtgattgggctacctcactcaagatgatatcctccaaatacatccatttgcctaagaatttcaaaaattcattgtttttaatagctgagtagtactctattgtgtgaatgtaccacattttctggatccatttgtctgctgagagacatctgggttgtttccagcttctggctattataaataaggctgctaagaacataggggagtatgtgtccttattacctgttggagcatcttctgggtatatgcccaggagtggtattgctgggtcctcgggtaatattatgtccatttttctgaggaactgccaaactgattttcagagtggttgtatcagcttccaatcccaccagcaatggaggagtgttcctttttctccacatccttgccaacatttgctatgacctgaatttttgatcttagccattctgactggtatggggtggaatcttagggttcttttgatttgcatttccctgatgacataaggatgtcaaacatttctttaggtgcatctcagtcattcggcattcattcctctgttgagagttctttgtttagctctttactccatttttaatagggttatttgtttctctggagtctaacttcttgagttctttgtatatattggatattagccctctatcagatttaggattggtaaagatcttttcccaattggtcgattgccttttggtcttattgacagtgtcctttgctttatagaagatttgcaattttatgatctcccacttgttgattcttgatcttacagcacaagccattggtgttctgttcaggaattttccccctgtgcccatatccttcagactcttccccactttctcctgtataagtttcagtgtttctggttttatgtggaggtcgatgagccatttggacttgagctttgtacaaggggataagaatggattgattcgcattcttctacatgataactgccatttgagccagcaccatttgttgaaaatgctgtcttttttttccactggatggttttagctcctttgtcaaagatcaagtgaccataggtgtgtgggttcacttctgggtctttaattctatttctttgagctagctgcctttcactgtatcaataccatgcagtttttatcacaattgctctgtagtacagcttgaggttaggaatggtgattccaccagaggttcttttatccttgagaagagtttttgctatcctaggttttttgttattccagatgaatttgcaaattgctctttctaagtctgaagaattgttttggaattttgaaggagattgcattgaatctgtagattgcttttggcaagatagccatttttactatattaatcctgccaatccatgagcatgggagatctttccattttctgagatcttctttgatttctttcttcagagacttgaagttcttatcataccgatctttcacttgcttagttagagtcacactcaggtatttttttattatttgtgactattgtgttgggtgttgttcctttaatttctttctcagcctgtttatcctttgtgtagaggaaggccactgatttgtttgagttaattttatatccaggtaatttgctgaagttgtttatcaggtttaggagatctctggtggaattttttcggtcacttaagtatactatcatatcatctgcaaaaagtgatattttgacttcatcttttccaatttgtatccccttgatctcctttgttgtctaattgctctggctaggacttcaagtactatattgaataggtagggagagagggggcagccttgtctagtctctgattttagtgggattgctttcagtttctcaccatttagtttgatgttggctactggtttgctgtatattgcttttattatgtttaggtatgggctttgaattcctgatctttccaagacttttatcatgaaggagtgttggattttataggatgctttctcagcatctaatgagatgatcatatggtttttttctttgagtttgtttatatagtggattacgttgatgaatttttgaatattaaaccatccttgcatccctgggcagaagcctacttgatcatgatggatgattgttttgatgtgttcttggattcggtttgcctggattttattgagtatttttgcatcaatattcataagggaaattggtctaaagttctctttctttgttggtttttgtgtcgtttaggtatcagagtgattatggcttcatagaatgaattgggtagagtaccttctgtttctattttgtggaatagtttgaggagttttggtattaggtcttctttgaaggtctggtagaactcttcactaaacccatctggttgtgggatttttttttttttttgttagggagactgttaatgactgtttctatttctttagggaatatgggactgtttagatcgttaatctggtcctgatttaactttggtacctggtatctgtctagaaaattgtccatttcatccaggttttccagttttgttgagtatagccttttgtagtaggatctgatgatgctttggatttcctcaggttctcttgttatgcctctcttttcatttctgattttgttaattaggatgctgtccctgtgccctcccgttagtctggatcagggtttattttatctattttgttgattttctcaaaagtccagcttctggtctcattgattctttgaatagttcttcttgtttccacttgattgatttcagccctgtgtttgattatttcctgctctctctactcctcttgggtgaattttcttctttctgttctagagcttttaggcaagcagttaagctgccactgtatgctctctccagtttctctttggaggcactcagagctatgagttttcctcttaggactgctttcattgtgtcccataagtttgggtatgttgtggcttcattttcattaaactctaaaaagtctttaatttctttctttatttcttccttgaccaaagtatcattgaatagagtgttgttcagcttccacgtgtgtggactttctgttatttatgttgtttctgttatttatgttgctattgaagatcagccttagtccgtggtgatctgacaggatgcatggaattatttcagtcttcttgtatctgttcaggcctgttttgtgaccaattatttggtcaattttggagaaggtaccatgaggtactgagaagaacatatatatccttttgttttaggataaaatcttctataggcatctgttaaatccatttaaacttctgttagtttcactgtgtctctgtttccatgatctgtccaatgatgagagtggggtgttgaagtctcccatgattattgtgtgtggtgcaatgtgtgctttgagctttagtaaggttccttttatgaatgtggatgaccttgcatttggaacatagatgttcagaattgagagttcatcttggtggtttttacctttgataagtatgaagtatctctccttttttgataactttaagttgaaagttaattttattcgatattgtaatggctactccagcttgtttcttgggaccatctgcttgaaaaattgttttccagccttttactctgaggtagtgtctgtctttatccctgaggtgctttcctgtatccagcaaaatgttgggtcctgtttttgtttccagtctgttattccatgtctttttattgggtaattgagtgtattgatattaagagatattatggacaagtaattgttgcttcctgttatttttgttgttagagttggattctgttcatgtgggtatcttcttttaggtttgttgaaagattactctcttgcttttgcctagggtgtcatttccctccttgtgttgtagttttccctttattatgctttgaagggctggatttgtcgaaagatattgtgtaaatttggttttgtcatggaataccttgttttttccatctatggtaattgagagttttgctgcgtatagtagactgggctggcaattgtgttctcctatggtctgtatgacatttgtctaagaccttctgggtttcatcatctctggtgagaagtctggtgtaattttcatatgtctgcctttatatgtttcttgacttttttcccttactgcttttaatattctttctttgtttagtgcatttggtgttttgattattatatgatggtaggaatttcttttctggtccaaactatttggagtttcgtaggcttcttgtatgttaatgggcatgtctttctttaggtttgggaaattttcttctataattttgttgaagatgcttagtgcctctttaagtgggaaatcttcactgtcttctatacctattatccttaggtttgatcttctcattgtgtcctggatttcctggatatttttggttagactgttttttttcattttctttgattgccgtgtcaatgttttctatggtatcttctgcacttgagattctctcctctatctcttttattctgttggtgatgcttgcatttatgactcctgatcgctttcctaggttttctatctccatagttgtctccctttgtgatttctttattgtttctacttccatttttagattctggatggttttgttcaattccttcacctgtttggttgtgttttactgtaattctttaaaggaattatgtgtttcctctttaagggtttcaacctgtgttcttctgtacttctttaagtgagttatttatgtccttaaagtcttcaatcatcatcatgagaagtgactttagatccatatctggattttctggtgagatggtgtaactgggatttgctatggtgggagaattgggttttaaagatgccaagtaaccttggtttctgttgcttctgttcttacgctggcctccggctatctaatctctagtgcttcctgccctcgatattatctgattggagtctttccttcctgtaatcccagttgagtcataactgctcagagtctgggtttctccgtgattctgtgattctgtgatcctgagattctaggtgtgtcagagttcctgggaatcaaggtgcttctgagaccctggtgtgaccaagatcctgggattctggaatcctggaatcctaagatccttggcatgttagagttctctggagtggaggctcctctcctctgggcaccttgtgactgtctgccgagattgtgcccaagtttgtgcggtggggacaggaaggaacctgagccagtggttgggcggtgttcctgtgtccatggaacctgttggtcccagttactcccggtgtgttggagcagatgttgtgttctactcactggtgttcctaagatcctgggtgagttagagtgcctgggagtagagactcctcttgtccggggactgtgggactgtcagctgagattgtgccggaggtagaggggtgctgactggaaagaacctgagggccaaggtttattgtagcctttgaaggttgtgggttatgatgggtttaaaaatttagtatcagcaccagattatacagaaatgttcagacatgataaaatacattgagctcaacattgcctcatggtgatatcctttttaagtcagctggaattgaagttaaaggcaggattaatggatggaaaccctgtagcatctctggaccctgataagtattgcaagaaaagcactcgagtgaacaagagaattcctacaggagaaattctgcttaggatattttgagataccattcacctgcttcatgtagctatgcaggtaccatgttatttgacactctgccatctaaacagcttatactgtagccaccattacatttgtaatgtagcacagctgtgcaaggtcaattttaaggtgtgtacggacagtctttttaaataagaatgcagacttgactgatgagtgacttaaagagcatgccgtgtgatttaagtgcagtgctgtctgagaagctgcacagccctttcactcactaatttctgagccagtccctctcagaggacccaagctgggagtgtggctggggagtagctgtccctgaagctcccctggagagaggggctggaggatctgagcccaagcatggtttgagttcaggaattcaaggctagtgagaactagtgctggggaagaagttttcaagtttaattcttcagttttttttttttttttctttttccgagacagggtttctctgtgtcgccctggctgtcctggaactcactctgtagaccaggctggcctcgaactcagaaatccgactgcctctgcctcccaagtgctgggattaaaggcgtgtgccaccacgcctggcaattcttcagttttaaaattggtttttaaagagaatttgtttataaatagtactgagtggtttgtatatagcacattttaaaaattgttatttaaaagctatctttataacattagatgtcaaacatgtctcattacccttgaagtcgaaagtgtgtgcatttaacagccatgaatcctgtgaagtataggagtttctcattctacaaaagaaaaaactaaggcatatggagttatagtcactgaaggtcacttgaatttgacaagtccaatatcagtgtactggctgttatactacctttgaaatttttccatgtcttgcctttaaattataaagtactgtgtgagtgtgtgtggggagggggaggttaccaagttgagcaagtaagaagtacctctgaaatgtacatttctttttttttttttcccattttttattaggtatttaactcatttacatttccaatgctataccaaaagtcccccatatccacccacccccactcccctgcccacccactccccctttttggccctggtattcccctgtactggggcatataaagtttgcaagtccaatgggcctctnnnnnnnnnnnnnnnnnnnngcactgtgatccactcaccagaggtcttagggtcccgtggggagtcccgtgtggacccttgcgggtgttgggcaagactctgctggcaaggtagcccggggctcgagtctcgagtcgagcggaagggacttctgccccagatccgaaatgtacatttcttgacacatacaaacacacaagagagatactaacacactctactaatatcatttaatttttacttagtaaattgcattagttttagcttgaaattagcaagtgaactatatttggcaaatgtaccagagtttatcccactttggaatctgaaaaatctggcctagggtcttggcctgctggctgctgtgttcactggagcaaactccttgacatcttcgagaatttcccatccgtgaagcatttatctgtatccctgagcttctgtgttaatgccttctgagagtagagatgatcagttaaatcccacattaatcatttcattcctgattccagtcactgcttaaaactgggatggaatcctgtgcgttaagaatgtactcagggagtaaagcaagcttcttgcaagtgttgggaatggagttctgacatccagaacatacacacttgctggtgagaagatgtgatggcccatgtgactccacctctcgggatgtagagatgagatgtccggggcaagctggttcagtagacaagtcagagtcagccagctctaggtttattgagagctctagttaaataaagtcagattgctggacacatctggagaacatacgcatacacatgttcacatgcacatgtctgtgcacatgtagctgtgttccctaggcaagcatacatatgtacatttgtgcatacaacacacatgctccattgcccctttaaaataagtcatctgatttctctgaagattgctgacacagaacatttagagtctgttttataaaacaagcattgggaattggtcaccgttacttggttaacatgtcatattctgcttgaaaaagagaaatacccaaattaaaatgactctttcaggactaacaggagcaaggaaggttactgtagaccatgtctattttgtagtcttttattaatctttaatgacttttcctgtccaagcatgggtagcttgcagatgttccttggagagttttaaaggatacactttacagtgtaatccactgtgctcttattgccattttacagggggaacctgtcttacagctggatattttgtccagtatgtacatggcctttaaggaacattctagtgtccccacactactaattatatccttcatatatatggttgaggaaataatttaagtaagatatttaagcatgtgtgtgtgtattactgcctcactccctgatttataaagtactctgcctgctgaaaacccagccagcatgtattacggtttcccctgctagatgcccagcaaggtacaaaaaagctagtaaccttgtgtatggagaaccatggagtctgagggaagataaacctagcaactcttattaaacaaacacagcacttcccgttaagaccaagatgtattgttatatatgaggagagaccctgtgtgcatgaaggaggcagaggctgtgctgtggtagacaaaggtaccttggaatgtgcatgagtggtgagcagtgtttcttaaggtgtcagtgctgtgtcaagacataggtgatctggagtggaaaatttgttagctgatatttgaagtctaagtgcgcacggcgtgtgtggttagtgaacagtacaggccgacctgcagctgaggaaagagggaggaaagagggaaggagcagggctccgtgaaggaactgactcgccaggacacacaaaatatgactttgtaagttgggtttattttgcacatacataagaagttgaaagagagacatacagaggggtcctgtgtatcctttgtccagtttcttcccacgggaaatcctatgtaacaatcagtatacacctgagagatagacattgggagaattcatggggctattcagaatgttagtgttaagtgtgtgtgtgtgtgtgtataagtttcctcgcattggtggatttgtttaaccatgacttcttttatgtcatcacctcttattcccctctcaagccctgccatctgctaacctgttctatactgctatggctttatttaaaaataaaatatggaataatacagtatggaactttaaaatataattttaaaataataagagggacatggggaattgtaaatgtgtttcagagagccccttgcatgagtttgcccagtggtcgcatctcatatatctgtaatttcaaagccagaaggttgacactgcacagtatgcatgtatgcagttttgtgctgtgttctcctgtggatccatgtcaccaaaccatattgaaaatgcagtactaaactcaactctctacagtcatacctattctgtctcaattctatccctaagcactacccagaagtaatctatttcccatataagactaccatgtaaaaagtgttacatgcgtggacttatacaaaataggctcttgtttagcataaaattctcgaggaatgtatatattttacatcactgaataatatttgtttgtttcttcatctgttgaataacatttatttgtcttcatcttttgataatatgaataagtgtgccaccagcttttgtgccatactttgtatgaataaatatgctgtttaaaaattctcaagaacagagccccagtgctgggctttatggtggttgcatatttgcttttcttaaaaaaaaattagatattttctttatttacatttcgaatgttatcccatttcctagtttcccctccgaaaatcccctatcctccccacccccttctgctctccaacccacccactcccattcctggtactggcattccattatactggagcatagagccttcacaggaccaagggcctctcctcccgttgaagaccgactaggtcatcctctgctacatatatagctagagccacaagttccaccatgtgttttctttgattggtggtatagttccaaggagctctgggggtactggttagttcatattgatgttcctcctatggggcttcagaccccttcagctccctgggtatttctctagctctgtcattggggaccttgtgcagtcaagcttcctctgaaaccctgagatcctggtgtgaccaagctcctgttatcctgggatcctggaatcctaagatcctgggtatgttacagagcctggaagtggtgtctcctctggcatctgtgaggctgcctgctctgttcaaaaccaaggtataccagcatcgaccagaagggaacccgagccactggtcaggcagggctcctgtgtgtccttgctcctgctgtcacaggtccctcacaattgttttggaatggatattgcgttccactcaccagtgattctaagatcctgggcgtgctagtgcaccttcagtgtggtagagtcctctgggaaccttggcattgtctgtcaagttcacgcccaaggtggcccagagctggcaccaagctcctggtcgggtgagtttcctgtgtccttgcccctgctggcacagacctgtcacgattggtttggaacagatgttgtgttccactcaccagtgatctgaagatcctgggtgtgctagggtgcctgcggcgtggagagtcagtcctctggggaccatgggaccttccaccgagtttgcacccaaggtggccccgcatatttgctttttaaaggtactaccaaatagtatctgtaccattctgtatttctgccagtattttgtgctttctgaggcctccttaatatttggcattgttattttttaattttttcttttctgataggtctctagtattcttgttgtgttccactttgcttgtccttaacagctaatgatgtcaaactccattttccattagtgtcttttagtttggtattagatgcttagggtttccacccaagagacacaatggactggcaaatcatagactcatcctgagtcactaatcaagttctaacaattaccctagaaagttaacaacaaggaatgcctattaaggccgtttagtgctaaattttaattagagcatgcacttaatttaggtttgagttactatcttaaagtgtaccttatattcatgtagatatctgtgtaaatacataaagggatatataactggatatacaaagtaaatgtgtgtattcatgtatgtatatatttctttgagaactatgtactttttaatctcaacaaaaatgtaagacatatatttatcatgtttggagctatgtttgtttggaaccgtgagggttagctttaactggaatcagtgaggaattgtctgtattgggctggcttgtgggcaagtctgtggaaggctgtctatctagactaattgatgtggggacacctagcccattgtggagagcatagcttcccaggcattgagtcttgaactggttaagattggagaaattgagctaagcacaagcaagcatgcaagtgagcatgcatgtgttcacatctccctgctcttggctctggtgtgactagctgtcaccttgactttagcacactgactgtagtgtggaactgtaagccagactaaaaccttactttcctgctttgctttttgtcaagctcttttatcatagaaatagagatgaaactaggacagaaataaacttatttttatggtaatgtaagcagcatatttagacagagtgagacataagcatatttaacgtgcaaaaatagtattttattaaaaaccataagcaataaataactttattttttccatcttgtgctggggattgaatcccatatctcatacttccagtcaaatgctttaccattaaactaaaccctcagccaataatttgattattttcaaaagcagactggattaaatgagaattgaaataagtagagaccccagtaaatgtgtggataagatactgtttccccacgacgccttatcacatgattcaagtagaggtgataatgctgcagtgagcattgtattctagcagggtcagtaccatcagtggctccaacccaacctgatgtgctcttatgtgctaaggagcacacgggtgacaggcactgcgtgtgcctttcctggctccggtttagttttgacatgttaacgggatgaggacattgagactcagaggaataaagtcattatttcagggccacacaggtaataatggttaggatttaaaaaacgtagagagaatggctttgaaactcaggacacatagctggtctgtgctcctttcttcttgcttctcaggtccctatgagattagctatggataaacttcaagagaggacagtgtagatccagaggaattcctgcagtggccatgagaagtcggcctgggtagtggtttgaataggaatggactccataggctcatcttatatatatgaagtcttggtcatcagggagtggcactgcttgagaaggattaggaggtgtggctttgttggagtagctgtgggcttgttagaggaagtatgtcgctggaggtgggctttgggttttcaaaagccctagccagtcctagactgtgtctctcttttttctaccacttgtgaacttacatgtaaaactatgagctacttctccagcacatgccttcctgtgttctgccattttccctgccacaagaagaatgggctaaacctctgaacctgttaagtgtttttttttataagagttgctgtggtctggtgtctgttcacagcagtagaacattgactatgacagcctgctctgaatagatgagcttgtgtgggtgtctgagcctgtggtatagtatgatcttggtggaggcagatttttctaagctgtctttattgtaagctctggttttgacctttctccagtacctctgagacaacaacttcttgccctagtgaagaaatggatgtctgtagggtcatgtcagcctgctgggtaaagaaccgatgtaaatgggtatcagccaccagctatggagggcaggtgtttgcagatggcaccctgtagactgccttattccagtgctgtttctgtggctttacaggctcgctctgccatagggacagcatgtgtcagacagcaaacttactgatgaagagtgcctgggcctcatcctgtgtgtgtatctttctcattgattcaaggcgatggtgctaggatttgcatttgggccactttcatacacatttctagacccagtaggtcatacctttagagaccatgaacacaaaaaatatagaaatgtgaagtataaccactgctatactgctataccattatattgcaaacaaataaccgtcaatacagtagtacttccttatcctggcttttagttatatgtagtcaaccacagtccaaaattactattgtatgtcatgtactaaccttaacataggtatatgtatatgcatgtaaatatgtaattatatgtagggcttagtactttccgtagattcagtgatccagagggggtttggaatattctctgtaagtaaggggagactactgtgccaggcctcatgaaacagagtcatgaggacagagggctcaacacataagcataagttactcagcagtaagaacagcagtaatataaagaacagaatgaacaaagtgggaagatttactctgacaagcaactgtttgaggcgaggaacctagacaccagatgagtaagctgggtataggcaaagttagttactgaatatcacactgaggagctctcagggtgaggggaaagtaagagagcaaaactagccaaccaatcagatagctggccgaacgccaacccaaaacagaagccagagatggtaaagtgatgggtccagcactcaggtagcaacatccacagaagtaggagaggaaatgctcagagataatgatggcagattccttaggataaagaaacaacaattgcatcatgtagaaagagccctcagtgccattcaggaactgtgaaacgacccgcaatctggcaggatattgtgaagttgtagaatctcagcatcaaggacgtctaacaacttttgtagtgaaagaatggatcattacaaaggagcatgagtcagggtaagtagttgtgcatcccgaggggctcagttattttgcatattgattgaggtgtaagacaatcatctgaataatatataatttagagcttcataattcataaattcatatcctttttgatgaagtatttatcagtgtaacaagagcaatgttttctttatgattttcatagctgtaagaaaagctatagggtggtagatcatgatatatggttttataattttgtatgaatatttagaagttgctattttttttattaaagaaatgtacctctctttactcttgggtgctttgtgtttgctgttgtctttggtctcatgttggaacacatttacttagagatatgttttaaaacttgtatatgcaaaatacttttttttttgttttttgcaatcgaatgtaacacaggtagtttgggcagcccccagcctctggaggtaagctctctgccactgaattttaacttcaaccatacaaatggttattttttaatttacttttttgtgctcttttagatggcatgctcctgccatttatgttctgtttgtatggtagacagaagtcatattcattgatggttcaggaatccttgtctagtagaagtacaatgcagactatatttttctactatccacataacatttataaaggatgaaattaattgtaagtattagttcagtatgtaaactacttttgtatatcagtgtacagaagccattgaggtattttacagcctgtatatgagagttttgacattgggtatatgttttgtaccatatcatggctggatgcatttcaaggactcggtggccacatgtgttcagtagacacgtcaccatccatacattgctagagcaaatgctacttgggccactttttaacagctgccttcaagccatccattgtatggctttggacttgggtaagcattgatacttgtcagttgatgctgataatatcacggagcaccagggcttctggaggtcactggatcacactagattttctgcatagaatctatgctaaagcatgaaagcctacggacttctctgatactgattggagtttttgttttctttcctaagcccaggcagatattctgcctgcatggctgatgggcagttcagggtgaactgaatgcctcaccttcttttccggctttgttcttgcttgtgttaatgaatagtgtattcattcttgacttgtacatgccaaaccatctttgacttctaaagtgacatgacaagtcagtctgctactccaaagagtttccttaagtcttttgctgcctgtatgcttatgatggtgtgtctttaattacaaatgtttactgatttttagactgtctgtctgtccatccatccatccatccacccacccaccatccatgaatgcatttgtctatttatttacttacttacttctgtctgtgtgtctgtgtgtctgtgtgtctgtctgtctatctatcatattaatatgttggtgttttgagacaagggccttctatgtagccctggctgcctggaactagctccatagactagcttcccataatgcaccgagaagctactgactcctaaatgcagggattagatgcgctaccacacccagcctaatgctttgtatgaaaagtagctcagtggcaatagctgcttttggtagatgactttaaaattttgtgaagtgtttggtatttcacgtaacattattgcaatatcttagtagggcacattcaactttatgttgacattctcttatatttgattaaaatgcataaaccaagagctgcacatagtggaagagggaaagtcaagctttatagttagtgccctagttagcttcatttatcagttgtattcagcctagaatcatctaatggagtctcagtagatggatttcccgggctactttgtggacatgcctgtgggacattgtctagattgataattgctcctccttcatggtagcccttactgtccttaggcaggccatcttgagtcatactagaaagttgagaaggacccagcaagcatgcagcctctttcatggcttcagctcctgcttgaactcttgccctgacttccttcagtgatggatcctgacctggaaatttaagtaaccctttcctcccccaggttgctgttggtcatggtgtttaccataagaagcaaacttgaatagttggtatcatgctttttgtccagaagatcttttgactcattcaaaatatgttatcagaggaagcaaaatgtaaaaaagaaagtaagatgcagattatttttcttagtttcagtagataaacttagggatagtgagtgctttaaaatacaaattttgggacttagtgtgtattataggtaagatctcttggaactaacattgcttttgggttttggatccctttctgttttctaaaactctttaataaaacatggaaatattggatataaaggacgcagatgctcaggtttgccctttgcctggtggttatccatcagacaccatcaaacctctcatgcttttggaaagtaatcagttaaatgtgttccaaggtcttttaaagtctcagccagttgttttggtatcaaatgatacaactaaatggtttttcttaaagaagcatatctctcaacttgttcactttatccccagttcttgattttatgccatggctggtgaggtaggtatacctatatgtatatgctatatgtatatgctatagcatatgccacacacatacatgctgccaacaggaaatgcccaaggtctgttccagtctgccatttagataggagttaataatttgggttattagaacagtgagtacattgctatagctacatttttattattttgtaatgcttaaactagcacctaaggattcagaccaacctctcgccccctccttccctccgtccctccgtccctccctggaatttattagacataaaaacagaaaaaggtcataatctgaaaacaagagataatgaaaaataccttcttttctcttaagaaaatttgcatgccattttgatttatgcagtggcttacactggccttgagctcatagtgttggtgtgaatgcagtaagttcagaagctgtgctctgttattgaatgactgtatgtcattgcagacttctagagtttagaaatggaagacagtgcatgtgcttcaggttgctacttgcttcaaactaggaagctttaaaaataggatgtcattactcaggaacttgaagatctcaagtttgataaaaatctgtttagtattgtagattattaagactgaaatctgaaacagtgaacagcctcaggtattttactttaagataaaaaggtaaggaatgaaatggggaaggaaggaagggagggagggaggaaggaaggaaggaaggaaggaaggaaggaaggaaggaaggggttctgtcaatctgtatgtatttattgaaacattcaaaatatgcagcttcttcatatttcttcagttagatcaaaagacctctaaattttgatgaaataaggcccctttgtaagtttatcttatttaaagagccgtgataacgttggggtgaaaagtctagatggtgtatgttcaacatagtgcagtaacttttctgtcttcatttgtgtgttgaccttgagcatgtgtgtattgtatataaacacgtgtggcagtacaagttgtgtgtgtgtgtgtgtgtgtgtgtgtgtgtgtgttgtgtgtaggcttgattgatattggttgtcctttctgtactgatctctaactttatttttgagaccagtcatctttcactgaacctgaagcacgtagattctgacaggcagtctgacaatatcagtgtctggataaagaagtaagtactgagcgtgtgagatgcccaggcacattaggctctgtttatgttcaactgagaacccttctatattcacacaggcaagggctcccttaaggagaaggcaaggcaagcagctagaacactgagcaaatgtgtcctcccagcagcacctgtgaacaggagcaagcacagaagggctggccgtgtcctcaggcgcctgggccacggtccttgaatcacacgtatggaacagtggtgtgaggttttagctgtaggggagatggaagcttctctgtatcctttttgattgtttgattttagtcaccctcatgctccccagtacttcaaaggcattgctaagggccatgctttatagaacagccgtttccaaagcattcatacaaatcttacccacaagctctgctctgttctccattgtccggggtccacttccaggagagtggaagtccaagtcagtgggaaatgacttcttgcaaaaccaaacaaacaaagtatgtatttgcacatacatatctctgtctctttactttgataattatagttaatggtggctcctttgatgttaattccagattccttgataaagaacatgctaggtatagggccacacagagagcatcgcaagcataggacactgcatggaggagtgtcagtgtggtggcatcttagactgcttatttgaacaagatacagagtcagcaggattaaggaattgttgagcaagctacttagagaatatgaaccgtgtgcactgtggaaacccctgttagacacttaccacaagtctgtagagacagttggcatctctggtgcatggagtatgatctgtgtgcttatttaggaggctctatgagcaacttccatctgatacaattcagcttagtattcatgctgaaggaacagttctacaaaacccaggaagggcattgtgtttcctgtaatatgaagtaaaaatatcgaatttatatttaggtaagtgtggtacagatacttgaaaagacagataatgattgaaaatataatgataaggagctttagtacttcagttattgtttcacagatgtattaaacgagtcattatttagaaacttaaatgatttctactgcctttgaatataaagattttgggctgaaacaaatgctcgcttcatctcttagaagttgtggtgagtacaagactgaggtccagatccattctagctccctctccactccaggggcatctatcacagggagagggaaacataaagccatctttttaaaacaacaagatgtgcaggatatccaggagagtctgcaaagccacggtggtggcactgtccctacccagagatgtccagaagcagtgcgtatgtcatctgcatagggcgagtgatagcagacagtgagaggcgagtgtcatttggagcgacagggctggctggtgtgctacctctgagacagttggcgattcggccatcaaagcttcagggactttgggtggaccacttttgagatgctaccatgttggggagtgtcctaaatatgtaaaaaccctcttgagtgttacttaggtggctctgccctttttccataagaaaagtctctttaagagggcactaaaaagttcagttttgatgtgaagagtttcagtgttccaagtctcatttgctgtattcttcttctgtccttgagaagccggctgtgaagacagactgggagactgattgcgagacttagaggccaaggtcctgtctagcgaataccaggccctgggcttcatctccagggctgaagaaaggaggagagggaaagaggccgaaacagaggagaaagtctgtcagttcacctgagactgcctgcattaccttaagacttttgagcctaaactgtgaaggtactttcaaagccacaagatttttctgaagggaaactaagtgacccatgtgtgccctgtctatctctgtagccttttttgccctactcaagcagttgttttatattttacgtctgtatatgatagtggcatgttgaagtgcctattgtaccctgataaaatgatccaaaccgagagctgggatatctgtttccatgactcctcccagtcagccagccttctaaactggaaacatcacctctacagtgcttaatattctttggaagtcaaaggacttggcgtgcttagaactcaaatggaatctgttttgcacagcaaggtcatttgccagttttggaacctttgtactgaaagtcatggtggccagcagatagggtaattccaagcgcagcccctgactgataaagccacagactgataacgccgatttcatgatgccgtgagataacgtgttcctgagcatcatgaaaactggtagattctgggggcgtttgagtactaggtgttattattggtcaggagctgtctgacctgctaaggagattataagctgggagagcacatgtggctacaggagaaagaagaaatagaacatagacattcacagtgcaggctatgtgagtgggagcctttgctgttacgagagaaggtagttcagaaggacgcaggactctctgttgttaaaatcaatgaagttaaaagagcagctgcttgtaaaagttaattttctttgacatctgctttggtcccagtaataaaaaaacgatagctctgttgagcagtctgccctatctaaaccggcatcttcttgtgattgtgagatcagtttggaaaactgttgccttttgttttcagaaaatgaatattgaatcatttgtcctttaagatatatgcaaaggcatagtatatgcatctttaatttagtaggacagatttgagttggtatcctggggattacaggatacatagggccatcctagggattacaggatacacagggccatcctagggaattacatgatgcatagggccatcctagggaattacatgatgcatagggccatcctagggaattacatgatgcatagggccatcctagggaattacatgatgcatagggccatcctagggattacaggatacatagggccatcctagggattacaggatgcacagggccatcccagatctgtgctatgaagagcaggtgatattttgataaacattttctattccctttatttaaacatctaaatttgattcttcttagtgtttgtgaagatacaccgctgcctctgtcgactttcagtgagactggagactgctttgcttatttgaagagtcggcgctaagtgacagacagtgcctggctctgcatcgttcaccttgggaggagtgcacctttgatatgggatattttcatttcttgagttctataagaaagcagaggtgactggtagagggtaaaaccaccagggaacaaaacggagcaatattttccaagtgacccatgttttctcgtcatttttatgtgttttaatttagccagtgttgggcaaggagttcagagagggggatttatcgtttcaaaatgagccaccgtgcccttcgttgtcaacggatggaagcaccttcgtttaggaagcatctgctgtccctttaagatccatttactacatttcactatgtttcctcctcatttatcatggtcccccttttcatgcctatcttctagaaaaaacatcatgaaaaaagtattttttttttctataggctccttatgagcccctttaaaattttatagagaaatgactttgtttatttctatgtgtgtatgtgtgtgtgtgtgcctgcatgtgtatctctgtgtgtgtctctgtgtgtgtgagtgcctgcatgtgtgcccatgtgtatgtgtgaatgtatgcatgtgtgtccatgtgagtgtgtgagtacctgcatgcatgtacttgtaccacgtgcatgcttggcatcctcagaggctagaagaaagtattagatcccctggaactggagttataggtagttgtgagcttccttgtgggtgcctggaacccagcggggggacttcagcatgagcaacaagtctacaggttagtaactgggtggcaacaaaatccttttttttttttctttttttttttccatttttattaggtatttagctcatttacatttccaatgctataccaaaagtcccccatacccacccacccccactcccctacccacccactccccctttttggccctggcgttcccctgtactggggcatataaagtttgcgtgtccaatgggcctctctttccagtgatggccgactaggccatcttttgatacatatgcagctagagtcaagagctccggggtactggttagttcataatgttgttccacctatagggttgcagatccctttagctccttgggtactttctctagctcctccattgggagccctgtgatccatccattagctgactgtgagcatccacttctgtgtttgctaggccccggcatagtctcacaagagacagctacatctgggtcctttcgataaaatcttgctcgtgtatgcaatggtgtcagcgtttggatgctgattatggggtggatccctggatatggcagtctctacatggtccatcctttcatctcagctccaaactttgtctctgtaacttcttccaagggtgttttgttcccacttctaaggaggggcatagtgtccacacttcagtcttcatttttcttgagtttcatgtgtttaggaaattgtatcttatatcttgggtatcctaggttttgggctaatatccacttatcagtgagtacatattgtgtgagttcctttgtgaatgtgttacctcactcaggatgatgccctccaggtccatccatttggttaggaatttcataaattcattctttttaatagctgagtagtactccattgtgtagatgtaccacattttctgtatccattcctctgttgaggggcatctgggttctttccagcttctggctattataaataaggctgctatgaacatagtggagcatgtgtccttcttaccagttggggcatcttctggatatatgcccaggagaggtattgctgggtcctccggtagtactatgtccaatttcctgaggaaccgccagactgatttccagagtggttgtacaagcctgcaatcccaccaacaatggaggagtgttcctctttctccccatccacgccagcatctgctgtcacctgaatttttgatcttagccattctgactggtgtgaggtggaatctcagggttgttttgatttgcatttccctgatgattaaggatgttgaacattttttcaggtgcttctctgccattcggtattcctcaggtgagaattctttgttcagttctgagccccattttttaatggggttatttgattttctgaagtccaccttcttgagttctttatatatgttggatattagtcccctatctgatttaggataggtaaagatcctttcccaatctgttggtggtcttttccactaaaatcagggactagacaaggctgcccactttctccctaccttttcaacatagtacttgaagtattagccagagcaattcgacaacaaaaggagatcaaggggatacaaattggaaaagaggaagtcaaaatatcactttttgcagatgatatgatagtatatataagtgaccctaaaaattctaccagagaactcctaaacctgataaacagcttcagtgaagtagctggatataaaataaactcaaacaagtcaatggcctttctctaaacaaaatccttttcagagcagttgtgagctttggtgttccaggtaaaatgtcttacccagattttttttttttaaaaacaaaacaaaatggaattaacttgtttagattcagctccaaatggagctgtggtattccaactaacaaatgtaattgcttttaatttgtgtttcaaaacttttaagtctattagaggaaatagttctgtttcttttattattttgccttaggcagcagatacctaacctcctattccatatccagagtaatacattagtaatcagtcagaactgtttcctggacatggctggctctgatggcttcagggtgtactgctccaaaatccacctttggggaagccacagcagcaggaaggtccatatcatacttggatctcttcaagatacttttatgtattcatttgtatgtttatgaattttcacctacagcatgtttgtgcaccacatgcatgtagtggctgtgaagatcagattctctggaactggtactacacagggttgtgagccaccatgtagatgctgggacctgaaactagatgctctgcaaagagcagccagtgctcttaaatgttcagtcatctctttagcttaagtttttggtttcaaacatctgaattcaactcttttaatctggctgattgattgatgttttgaggacaggccctcatgtatgccacagtggccataaactccccatcttcctgcatcaacctcttaagtgctgtgactatttggccaccagaccagctctaaaagacaatagagcccttgctttgccattgacattagtacacttggccacctgcctacggttctggatgtcctcctcgacttttggttccagagctccgtggcctgtacttcctttgtatttctcatgttaacatctttctcccacagcggtgtcagctgtagtttgggtattcatcttgaatccctgcatgcactgtactccttagtttctctccttgctgctgtgtaatcttgccctctgcagtgcctttcactgctggagaaatagctcgtcctcacttgtcttaggtatttcagagtcaggactaatggtgtgggagatagatactatggagacaatcttccacctcacatctgcgtggtagccatttaaagagggcttgttagttagcaagatgtgtttatttttgtgtgtgcacatgtgggtatgtggaagccagaggccagcctgggtgttgtgcctttgctggtgttcctttagtgttactcgttgggtgttgcctacctaggtttttttgagacctggtctcttactaactctgagcttgttggatagtctaagtggactagccatggagctccagggaaccagccacctatcactgctgccccagaggtctcattataaatgcacactactatgcctggcaccgttttatgaggttttgagaatcaaacttaagtcctcatgcttgaatggaaagaacctggcttcctgagctgtctcctgaccccatcctcattatttgtacccaaacattatatatatctcaaaatttaagattatttaatgatatcaatcttttaagaattgtttttattacttttaagacgatgtgtgagtatatgcaccacttttttgcagtactctaggaggccagaagagggcagcagatctccttggacctggagttacaggtgattgtgagctgcccattgtaggtgctaggaaccaaattcatgttctttgaggagtgagcagtatgtgcctttaaatgtggagccatctctctagccccgtatcagtcttcaaaacacagtttatctaggcatcaccgagttcagttgtaatagctcatccctgtactatcagcactctagaaataacgccatgaggatcaccttaagtttgaaagtttgaggccacctgatctgatctacatgatgagttctaagccactcagggctatatagcaaggccctgtcacaggaaacccagtggggaggaaaatcagttaagcttgcaaaacttgtattgcttaattcaaatgtgctagatgtatttttaggtctgtcttctcaatactgtctcaggcctaggctatgctaacttgtatgcctgttcccctgaagtaaccataacctgggattcataaagaacaagtttttgtgttttctatatgtaaacaaacagaaacaaaaaccctcaaaaggtaaacaccccccaaatttgaaaatgaaatttctttctttgattactattcattttaacttgtagagaaaatactttatatatctactaataaacactttggtatgatagtctattgtcttttcagaaggctgataactgtcatttagttttgatttagattttttttttgtgaaagcagaaatttgaaaacttacctatcaaatgcagacatacaattttttgttcatcaattaatagagtgagttgcaagttcttgccacacattctgagctggctatctgttatgagtctgttaatcattattgctagggcggtggcagcctcagggaagaatggagcagagaaccaatacagtagcttagggaggcattcggagagcatctgtgatgatgatctcgtagtgacagccttagccatttgaagtcagtgtacggccctgccgctttctgcagtttgaggataggttccccaccatgcctccttcaccccaaaccatgcactacttttgaaaatgcgaattgttttacaagatgcagaggagagtcctcaggcacattctactcagatctccagttcagaaatcatccttggtagatctttgtccaagtctgcattttgttaatacaatgaacaccatggccaaaagcaacttacagtcagtcagtcagggcagggactcaacagtagcccagggaaagaaactgaagcagaagccatggaggactgtgtactgcctgggtccctctggctcatcttctgtttccttttaccaaaccacagtagccatcaagaaaatgctcccccaggtcagttggatggaagccattcttctgttgaggttccctcttcctcctgatgtgtcaggttgacaaccagattgttgtcaaccattacagtaaactgaagagtaagttggtggtagaggaactcaaaaccaagtcactctgtcctgggaagcggagttgtgacagctctctaccagggactctgctgctctgtcttgtgtagctggctgggtctggggcagccactcactctcggttgagtacctcactagtgtggccccaaaatgaaaagtttgcagatgttggatgtaaggtcattgtaataactttaacctgagagcctaagagaattctttgctgattttaattagggaagaaattaactcttaatttgaaaacttcaatcttttagtcagggataaattaggaaggaagcaaaacagaaggcaggcccggtagaaaatggagatgtgttaatagttcagggagaagggccggaggatggacagagatgaaggacttgaggaatttgcccgtttggagtgagcagctgtcttgtggcgctgtggtagagaggtgtctgcttccatctagaagagatgcttaattaggaagctgtggaaactgacaagtgcttggagaagtccagcttgtctgttctgttctcagagaactggcttttaaaccatctagataggttaattaaatctgcttagagaatagctttggttctgagacatggaatcgctaacaatgaaagtgatattttgcagagggatttggcattaagaactacattataggataggccgaacgtttgcctataaaatctgatgactttgataatctttctggtggtgacacactaggctggcatttttcctagaccctaaagacctgcttttgctaaaattacagcatattattgtgtcacagtcttatattttaaattcataatttgtgcatgtgttgacttaggtgaaacctggaatgcttgctagtcattatttgatcaaattatgttgttgtttgtttttggatctgttctgccacgaacttacagccccaaccctgagacccacagtagaatattttaaacattgtatcgctatttttattgatataatataaacatcagtttggtaagttgttttctgattttgggaaatctttcctgagatcagcagtgtgaggatacagtgtataataaataccaaaggatgtcttgtagtctgttacttttcctctgactttgttttagtagaatataagacctcttttaatgagagatttacttgttttgttgtcttgagtctgtttcacattctcagactacatcgggtggatgagtgtcttgacttcctagtggaagttctcagaggaaaatgcagttcacatggctgtgaacacacagaagaagccggtctgtctgctgttggtttgatgcatggcatttattgcaagggtttggctttcagtttggtctccaggcttcatttgaggtcacatttcagagttaaatacatttagtttgttttgagtcttaggagatgttcttggtttctttcagtaatgtggttgtgaaaattatggaaattatgaaggagtcggtgtgtattccgatttcctgattacttagccataagtggaagttcctctccttaatgctatcattttcctagtatcataactggaaagctttttatacatcttaatgtttagtgctttctcagattttccatacagagataacatgcttgtgagtagaggctcgtccacaaactcagatgtctgggctcttttcttacattcctttctcatcatttgaagtgtagtaacttaatttatgtcctcaagacaacgtagttggctttcacttttgttttgcttctctgtgctcctgcctcagcctgtgctggaaacatggagttattcaatcctgatgaattaatgattaagtccttgatttaaagcagaaagcgttctctcatatttgtgcatggcctccctggctgcctcccctccttagtgtcccctcagctgtcctgtttgtcttcaatgttacccgcccctccagcccaccactctcctgacccttttctctgatttcagctaacggccaggtcgctgcctgctgtgcagtccgatgaacgacttcagcctctgctcaaccacctcaggtaacaaaggcaaagccttggcacacttttcagtgctaaactacctcagtgtctaaacattgctttttatttgcttgaattctgtaagtcaacttgaatacttggctatccttggctaattcaataagaatatgtaaactatttgtttacacatttatactatttatagatttatactacacacacagtgcatatgtatatctatgtgtgtgtctataaataaataaataaacaaacaaatagaactatttatacatttataccatctcctgactatttgatctcaggtattaaagtataaatgattgtgactcttttatttgctccgagtcattctctctacatttttatttagcctacttatatttacaagacttacatagtcaaaaatactgtttctctttacagtttctaagttttaagtttttaaagatttatttattttatgagtattctgcatgtctatatgtgtgggcaccatgttctagctttgtgggaagaggtcaactggaactggcttgtgagccttcttgttgtttcgggaactgacccctggtcctgtgcaaaagcagccagtgttcttacccaccgtaccatctctgtccccaagcttccctttctcccttgtcactcagaaattttatattcaggcattattgtttttcatcttttccactgcttcttttcctttcctttgctcccctggggtcagggactttcatttttccatgtaattgattttgtggggcaaggctgtgaggtgtggttaaggctagtattcctggtgtctactagcattcatcctatatacatatgcttcacctcctagagctgcactcacaggtcaagaaacccagacctcaagtttgagtatgttgttcaatcttcactctctgacccttctaagtcttttgatttttatcttcaaagtatctctcttacttcactagcttgttatccattttccttaactcatgcttttccctctgatgtagttcacactcctgccagatgtgattatgttcttggctttagctgctctctgtctgttgccctccacccccttcattctgcttaaagcctgagcctggtgcctactctggaattcctgctggtaagaactataactggagaatggttgtgtgtcctttaggtcaggtgtcatgttctgtggtcatgtagttccttcttttcggcctgacccagacagaggcagtttcctgctattgcaggatttgatgctgttattgtcctcccactgcccgtagccagggttatatcccacacctactaggtgccatgtgatctgcagagtgaagtgcaacatatgcctacagatgtctctgatatcttttgttttccttctgaatgaaattcttatattttataaatcagtttgccctaaaattttgctggttccacacgtaagtaaaagaggttgcttcttagctctagtggatacttgattctgtgcaatcatgacagattcgcttccttccatctcagtatggtaattgtcacctagaatttagattaactaccgatgtctctttgagtccttgaaacttgaacaaactgtacatttgtttagggctttcattctccatggagttcattcaagactggttgctaggcaactaggcctggatgttgcttttttattgttattaaaccaaatggcttctcattttattactgtgtcagaggcatctgtaggtagggtggcagctggtgtgcatagcttggcacctcctgttctacagagtaaccctaggggatgtgcctttcaagcatgttggattgtctcttggctgtcaagtatgatgtttttctttgatctttccttttttaaggccaaagtggcaaagaactgggctaaggacgtagctcagtgggtagagtgctttttatagtgagcatgaaaccttgaggtcgatctctctagcatgacatcagcagggtttggcaacatatgctcttgggagatagaggcatgatgattacaacttcaaggtcattctccactgtgtagagagctataggcaggtctaggatgcatgggacttgagggagagggagagggagagggagagagagggaggatgctgatcacgtgacttgagagagtctaatggcaatcttgttaggaaaaaataattattgagttgcatgaactatataacttgtgtgacttggagggtgttattggaatcattatttgtcctaatgttggtgcctctaatgatgaaagagaaaagatgaatagcatttgaatagcattttaattaaatttctcaataaatctcatttgggagattattctgatacctataaaagtcaaaggaacagtagagagaaattgccgaattattttacagaatctcgtcactcagaattagtgcaatacttttgctaacctggtaatgtaggccattttgttataagatattactgagactgaagatgtagcatatccatattttttcattgaatttagctctcttattaaaagttaaacacagaaaaccatttgcctgagtatcgtgtagaagtaagtttattttcacattaacagtactcagtagttattgagtgcccactatgtgtcaattgagtgcccactatgtgctgatgaggtaaggtacagtttgttatcagagaatttacaggtttggcttcatccaagagatcactgtgttagcgggttacaaacctttgctaatcttttggttagaacaggatagcaggcacacagctttattaattaacctgcttacccatgtgatgtcttccttaaatgatggtatcaaggctcacttgctttacatttgttctttctaactcagtagtgactcaaattggctgctcaaatcagaggaagccttaatcctacttgcagagtctttaactccagggtagaggaggagactaaggttgctggtgaattagtaatttcagacaatttaggtttcaaatgattgcaaggaatatgtaaaggatgtgagtagctaggtacaatgtgagggtggttttaatgtgggcagtgtttgctggtcactctctaggtgatggctacagtcagggaaatggctgaacttaccaaagagagatgagagaggaaataaatgtcttgaatccacagcatatcagagttttaaccatatgggcagcagggcgtgggagtgggggtggggtgggagatgagtcagaagagaaactggtagaaataccatggagagattttccctaaggcctagccagaacacactgagaggacattgtttcaacgatgccaaaggaaagcatggagtattgtcacacaccaccgggaagttaggtaagaggtgtacaatgctgactgaatgtagccctcggacttagccacagtgttataataatggtacagctggaagtctgtgtcctaccaaggaataaataagaaatgaggccgtggggaccggacatgcaggcttctcttaggcttcaccctaaggcagggaagcaagaagggtacagtcatgggcttctaggttgaaggaagttctagtttttctgttaaacgtgcaggggtttctgatcatcagtagacgtttccttccctcttctctcagtccctccctccacccctcctccctttctcctcagagaagggcacagctcccatggatagcaactggccttggcttattaagttgcagtaagactaggcacatcttctcctattggggctagatagagacagcctgtgttaggagtagaggaacacacgtttatgggtgagggaagaggtctgtgggacctagagggagcatagctaagggagtcaggcaggagagggtacagaggaagagaaccaaggactcacaggggttggcactgatcttcatagtatgtgagctcctgttgagaagatcccacagggatagcaggcagatgtgtgtctgtaaaagggggtagaactttagagaaagtgctcctcatgaaagcttagtttctttaaaatgaacactacagcccacccctctcctcagaagatggtcctttgtagccccagggacttgggagatcaagacaaccggtgacttgaaccctggagttccaggccgtgaggcttaacacagcaaaaccccttttagaaaaagatgatgaatgaatatttcataagatacttcttgttaaaaatttttgttaggaatattcttcaattaggaaagttatctgattttgagttgctgagaagccaaacagaacaaccaaagaaactcccccccccccatgattccagactaggagagagagtttgtatggataccttctgtttttcttaaaccaggcatcgttagctgtccgtgtaagctcattgtcgcccctgtggctctccccctgcattttctaggcatggttatttagcgtactggtttatttttgagccgtacaaagatctttggttatgttcccatgaacctaggcatttactgtaaaggagaatcttttactccctaaccctggtacacatgaaatactatttataaagtagtataatttttaagaaaacatgtatttgtttatttatgtatatgtgtaaaacaacttgcaagagctggttctctcctcctgtcagtggccctgaggaccaaacccaggttagcaatggtggcaagcacctttacccactgccccagctgccagcccctcaggctccaagggtgtataataaaaagtattatttccacttactacctcactcagaatttaaagtatgaaagcatgaggttagagaggaaaacttggataccagttttccatacagtaatttgccagagattttatcccttaaatatactgtagtgcctcctcatcatgtgtgtacctctcttgcaccgtccacttgaagataggaatggtgcgtgtggggatatgttaccaatcacctttcttgttattctttttttttttatttttttattaggtattttcctcatttacatttccaatgctataccaaaagtccccccccccccccagtcccctacccacccactcctcctttttggccctggcgttcccctgtactggggcatataaagtttgcaagtccaatgggcctctctttccactgatggctgactaggccatcttttgatactttcttgttattcttatttaatgtcttgccccttattgaagaataaatagcttttaaaccatggttgttatactttttctcctaattctattatcctgtttcagcttgagtgaattaaaacttaaatagtgctaatacaacctagcagccacgggacagttctgtgcagaggattaacttgtacagcatcctgaatctgtaaggtagtcttactgatcttacagcattgcttacactaatgaagcaccttgcttcctctctattgcagtgtcacattcttatagttgcttgtatagaattcctgttcccactgcagtgcatttgcttacatgcacgtgtttctgttcaggcctcttaagaatgtggtatcactaatcccatgtcagacatcagacaggcagcctctggagaaagcttctcctggtaggcacagtgataaactgaagtgttttctctttgaataaactctcattttcaaatcagaacattgccttggtattcatgtgtcagttgtggtagaaatgaaagtaaatgttagcaaatggtttgtagactggggctcccaccagtcagaggccgcagtgaaagccggattaatcacaggcggcagctgtcgccagctctgtctcattcccagtttcgtgaactatgtattttctttcattcatgcagcaacacagcttgtagttccctgattattgcaaagctctgtgcagtaaattcataagattattatatttaaggttattcagggtcattataaacaaaataaattaggatatataattttaaatttataagcttagaattatattttttcatacctgtatcaataatgaccatatcttcttaaggatatatttgctaaacattggatttagagtttttagatatggttccttaactccaatctatttacaaaccaacatttttgaacacacacatgtctatgtatatcttactaagtagagaaaaggcaagtctcaggagaggtagcgtatgcacatggattagtttaggaatttaaggctggcttagcagtcttaccagtgtgtactactcttcaagaagacgagcgtttcatgtccaggactcatatctacctgtagctccagcttccacacacacacacacacacacacacgtgagaaagagaatgggagaaatgaactcttctccccagcgcagccattgctgactctgttgtaaccctatgggtatttgcatgtaattataaagcagctacattttgaaacagttctttcacctacgtcataataatgtgacaaagtagaagttgattttcacaactctagtgttgaatgcctgcacattgttcggtggagagcaggcagctctgtcttttgcttagctcctctgtgtgtgtatgaggagggagttgagattctgtgtgatgagggaatttgctttggaggagaaacgcactaacactcctatgctggactttctctctaacattgattggcctctagataagttaaaaaaaaatcaattttcatctgctgggtcaatccaaagctctttccaagtacagagggctgaggataggggcactggctttctgaaaagacccaaggatgcactgtagcatctactgtaagacattggcaactgcacaggagttttgcacagttgaactttctgggaagatggctgtactgatgattccagcaaccaatagtcatgcagctaccttatgctcatcacatacatatgcccagaggtgatggatcacaaagcttaaaacactatctatcaatggtggaatccacttcagggttagtaattgaatgtactgttaggggttggcagaaactcaggagatgggagaagctagctggaagaagtatgtcactaggaggatgcgccaggatgctatattttatcttaggcatgcacctaccccctctctttccctctctttttctcttggtgtgtgtgtgtgtgtttcctggacaccacaaagagaataacctcacctatcacatacttctggctctgtgacattctgctttaccttagacccaagcaatggagtcagcctactcttctgaaaccatgacccaaaataaatatctccctccttaaggtaatcgttggaagtattgttacagtggaaagatgacttacatgggtaagctcgtaaaagcttctcttccagggtgtggtaagacatttgggtaactgaaggttatgagtcataaagggagggtaggttctttacttggtgtggcttttgtctctttgtgttttccaatggtcttaggagacccttgtgaaagggtccgtgcctcccagctgagcagtttatctgtgcaggagtatagcagagactgcacagaggagggacagttgactaggacctcctgcttcagccaagtgctaagatgacaccacccctggctccagagttcttcatggcagctgaaggtgtggatgagaatggccttcatatatgcttgcatgtatagtctccagttgataaatggttttggaaggattagcaggtgtagcctgtgggtgtagatgttttcgtatcagaggaggcatgtttatgggggtgggctttgtcacttctgacagtcatgttgcccatggatgagggtataaagctctcagtgactgctccaacaccatgcctgcctgcttcctgccgtgataacagtggactaaacctctacaacggtgggcaagcccccacctcaacgtgttctcctttatgagtgccttgctcgtggcctgtcttaatcccaagaggacaggagctaaaacagcaacactacctgcccagtcattttcagttatttacctgggtggtaatagtctagagtgtagtctctatgagagtaaagaattggcacatcttgtttacctttgtttctctgttacttaaacaatgaccgtcatagtaagatactagtggccatgagaatctagtgcatgggtgaatgaatgcatgaatgaatgatacaagctctacacttttgcaattcgttcactttttcaaagttgctaaatactgagtttgaatgagatcgtagtttgttgatggtattctgagtgtcaaacccagagcctctctcgtgataatgaagaatctactctagtcctgaggtgacaattaggcccatagtcacagagcttttagtcatttccatttcaactctttaccttctcaggtaggagttttgtctttgtgacttaacagattgtccatgtacacaggactttccattcctgtgtgactctgaaacttactgaatctcacagactaatatttaagtagcaaagctgttaggatttaatgcctgaaacagaactcagacatgatgagccttcagtgactgtttcaggattaaaggaaaatgcgttatgtgattctttgagctgtgacttttagtaaaaatctcactagctgtctccacacctattgcctggccaccccacccctgctaatgttgaataattgaaaagcctacccagtttccccaagcacagaatccttgctatctgtgaacgaatgtggtggtggtggggttgtcttagaactccatgaacaggattctagctcagaagctttctgtactctgcacgctatttgtaaggggccgagagtcagccaacaattatcatgttgattgttgctgggacctgcatcacttagggattgattgccctagctgtggtgatgggagtgaagaaatggcagacatagttcagaagagctaggattgggtggggatgggctctgatggagaccggcagtggcaggcagaaatcctgtgtttattatgtacagtgtccaggagaagggttggctggtctgagcaagcgtctctgtagggattgatctcacggggaggatggttttgtcacagtggttttagcagaaggtcagcctttagccaacattgtactcaagcaggggacaattttgctgttctctagctttacctgcagagggctttgctatcccctgggcctgaggcattggagtctttgacacggccattctcacgtcagcagcacatccacttaggacttcatctcttctccataaagtttgcaggaagttcatccttctagcctttattcttccagcctcttcttcctcactactgccccagcaggcaccctttcttagtcttagggatcctgaaccactgccaagcagcctgtcctagaccatcattcactgaacattacaccaccagaatatgcaccaagaataaagggattgtaagacatttactggtgcaggcagagatttgttagtggccttgtatggtttttataacatatacacatgcgtgcacacacatgtatgttatatgtctatgtcatatgtttttatggcatatgtgtgtgtttaattttatgagtgtgtgcgcaagagagagtgacagactcatagacatactcacattttgtaatccaagttggcctcaagtgtaaggttctaggtgtgcgctggaacgctctccctgaattttacctttgaaagagactttaaagagagatgcacctatttaaggctatcttctgctgagatttgacagttgtaggctgctgatattttttgccagaagcacaatatgcagaatccagtttcattgcagtttcttggattgttatgtgtatacattggaataagcaaaacctgggccacatgggggagacgaaagcacctggagcgaagcagcagccgtctgggggcagcgcttaccagtggcagagccccgctcactcctcctccttaccattgcacctcctgctctccagaaatacagattgtactgcatattgtctgatgataggtttctgagtagactttttaaaaataaaattgagtaaaattcatgcttgtggaaaaataatttatattcaattttgtctgaactttattgatcgtgttctcatttggaataactgccaggaaactcacctgggctaacataagacagataccatttaccagggatttagctgtaaaaagaaactcatttcgatttcagtggtgacagctgctgaataagttttcttgcgatgtccttcacagcaggaaatgacatgatgggactctgtcttccatgatttcatacccacccaacaaatccacactgcagggggatttgctttctaaatgtctgaactgcctagcttatgtgggcagagtggtttttctttttctttcttttttttaaatgtccaaagtaggtaaaattgtgattacaaaatgggtatctgtgtgacatgcagaaacccctgtctcctctttctgaaattgtttttctctgtgctgtgacacaggtggctttatttgacagggtcagactgaaacttgggattctttacagaatgctgtaagccattactgttgattttggtagatgccttaatttccctttcatggagcaaaccaatgtgatttctgacatgccagttggttcagttcccttgtgctttctttgctgatttcctgttttatatcatcgtgcaaatgataaactcaagctttcctgacggagaggggtgatttgtgctgacctgtggtcctgtggtgctgggcagtgtgacgcacagatggggcagtgtgatgcacagatggggcagtgtgatgcacagatggggcagtgtgatgcacagatggggcagtgtgacgcacagatggggcagtgtgacgcacagatggggcagtgtgacgcacagatggggcagtgtgacgcacagatggggcagtgtgtcgcacagatggggcagtgtgatgcacagatggggcagtgtgacgcacagatggggcagtgtgtcgcacagatggggcagtgtgacgcacagatggggcagtgtgatgcacagatggggcagtgtgacgcacagatggggcagtgtgatgcacagatggggcagtgtgacgcacagatggggcagtgtgatgcacagatggggcagtgtgatgcaagatggggcagtgtgtcgcacagatggggcagtgtgctctgtatattgtgcttgagaatctctctgatgaggaaaggcattcccagaggatgggagagcaaggcttttactgtggtatagcatcgcagctgcactccacaccttatagatgagagaaggaaggagatggcagttgcatgtctaggtagaccaggcctcagatagtaatgtgtggaagcttggttttctccagactgaacctgtttagtttacctccagctaatcccaatcttaagattgcttaagggcaaagtacgtcaaatacatcgaacactgggtttccaagtagagtgtcttagagacaagctcttctgcactccttactcggccccgctgtagcctatgttatgcccacgagtcttggcaattttagtttggcaggctagtgactattctgtgaatatgcctacctagcctaggatcatttggctgtctctcgtcattgtgcatatatgctgcagtacccttagaaaagccatagtgggaatcacatgtatactttaacatcataggcaggaaggtcattttaatggcttctttttttacttaatatccaaactatgattttagtgtgtaattgacataccaaagtattaatgaaaaattttatattatctcattttaagtatttgaaatcaagagtacattgtagttattattaaacatcttaaccaagaataaggaaagcttaagggctcagcagtcacatttggctggtggttcctagctaatgtggacagagaatttctatattttatatgcccaaggagagtaaaactgattgaatgaagttggattccatttaaatctcctgtatctgaagccaaactattgtattttggaaatgtcccaaaggagtaattgttcctgtaatggtagaaaataaacccccaaacttccagatattaggcatccaagaacagacacctaaatgcttctacctcaagatgaaatatttcttacaatggtttaaaactagtagattagaaaggccttctggtgctctctggaagagattataaacaataagcatagaaagctgacacagtagcggcgagccgtgagctatgtctacctttatggggcagaggcagcggtacctctgtgagttcacagacagtgtggtctatcttgtgagatccaggccagctatggcttttaaaaagaaaaccaaaccaaagaaataattcagaaaggaaaacaaccaaggcatgtttaggtctaatacatttaggccttggtgaagaaaaactttggtacagattatagtgatggagtttacaaatcccctgatcttcttggtcacctttgatgccactacccagattccctttatagtccctgcctattgcagagctagataaagattctgagagccctgcttatttccttgttggctgagcctccacaactgccctgtaccaactgggctgggtgccgcacacagaagaactgccactgagaccccaccagttgcaaatgctccaacagaattttcgctcctacctaccgtctgggaaggagatgaagcagctgtcagccatccttgactgatgtgtcagggtgccactgaggggtgacgttcatcgtgtgcttgtcatcagtgccacagcgtgagaagatcctctccaccccaaccaactagtctttctgggagacccacagacccacttttgtataatttctgtttgtttttttccctccaactctcagtttccacaattcaataactgtccctagtgcaggtctatgtattcagtttccatgtgtgtgcatcaacgggacttacatttctgttgctcccacaaagcccagaaggcctgcctctcacttgggattcatgggtgggtgtgcggagaggtgtttgccacatctgtctttttagatactcatggcttatttatttagatattcatgtgtttgtaaatttgtatgagtgttttgaaaaaaccgtatgtcagtgtaactgtgattgtctgtgttcttgtctcagtcatctatcacacccccactccccaatattgcatggacttaactgggttaaaggtagcaccctgtaaacttgggtatataaatataggtttgggattctgataattaatcttgattgtcatcttgacaagggacaggcctccgggcatgcctgtggggcattgtctagaagaggtttacctctcggaatccctgtgaggaattaccgagttaggttaaccaagcgtcaacagcccttgggctgagccagccgtctgttttgttcttagttttgtcttataatttagtaattaggatttgttacataaggacagtaactgagatgtgggagaaacttattagaatctgaacgtctaatagcatttttaaaaaagagtccatcctgtgttatatgttctggtcagttttgttaaggctgggactaggtttcttttgcgggtccacagcactgttacattttagtaaaaggacactcagtccttttacaaccagcatcttcagaacatcttccagtgcaactgaaaacccatggggccacacccttcctgctttgtctacttttttgtaaccccagaaagcctcctagctcacccttggtaccttttacaggccgctcaagcaaatgataagtaatgtacccatagaataacgttggaattcctaaccttccccgaactagttaatcaagcgttatgaatgaaccaatgggtagtgtgtctttttcattttatatttatggcaaattagtatctcagataagaaacaaagatctattttcaagattccctgattagttaatcaaacatttctcttcatatttggcatgataatgatcatggacacagtatgaattttgtgaaacatttaaatggccttttaaaatttgtttttggaggaaatggcatattatgacacaaaaggtcaggagtataattgatattaacttgttgaaaaccaaacagtggtgaaaatgaatcgtcttcagaattaatattttctgttggatctgcatgtgtgctgttactcaacaattaatgaaaaacaaacaaacaaacaacaacaacaacaacaaacaagccatgaattggaaagaaagctcagaagcgagggaagggaagagtgaaatgatgtaattgttataatctcaaaaataaaaagataatgaaaagaatgctatcactgtttttctttatttaatataatcactatggcatatttataaaacaaatgcactatcttaacatcacaaaataagaatgtgcctggagttaccatcactgagttgacaggctttcctttggaagcatcgtggtaccgaggttgatggcactctgggtacagtggagacccacgcccctcacttttctcagtcctcttcagaagcatcccttgggctctccatgcaaaagccaaaattgctgtgccatgagttagcgtgaattaggcgttttcattctttgaggcagtgttgcttgcttgcgttctgttcgtgtctctatctttgagttgttccatgagaaaacaggaaagtcagccctggaactgctccagtgacctaagggaagccattagttaccttcattcttgggaccaaagatgcatgccaaacaccttctcggggagccttgatttcagcccatgggtttagtgtgccagggaagacagaggcagagtttgtggtgcaagaacatgtgggagaggttcctaacatcccggtggatcaggatgcagagaccctgaacaggaccagagatgggaaggtgggtgttctcttcacaggtccaccctcaaattccagtcaggctttctggacttaaaaggttccctggctttgaaaatagattgagcatccagaggtttctcttcgtacctcctctgtctttcccttcatcccccactccctcccatgtctctgtgtgtggagggtctcagaggttgaactcaggccattggacgtgaaggcatttgccgttactcactgagccatctcactggcctgagctgtgggtgacatttttagcatttaagccagagcagagctttttgtgattttgaacttacattaaaaaattcttttagccgggcagtggtggcgcatgcctttaatctcagcacttgggaggcagaggcaggcgaatttctgagttcgaggccagcctggtctacagagtgagttccaggacagccagagctacacagagaaaccctgtcttgggaaaaaaaaattcttttagtgtttatactcaaattgaagttttatttcattaaaataggttttctctgttgaaggagaatttgtatcttggaagcattcaagtaactgagctgtaagttccctgggactcttgtcttctcccctaggttaaaatctaaatccatctgttgagataagtcaagctgttaccttccctggcctagttgtaatactgcctaaaatagtttcttagtgtccagtttctctactttctattcattttcccactctgcttctttaaatgaaaaaacagttttaagcaaacactgtgtaagttcagtgcttggagattctcagggttttcccattgcctacagagcacaggctccaagggtttcttgtcatctgtctttgctttccatgtcaactctattacagccagtgtaagcagtcttgagtgtccaggatcctcattggttggtgcataaaggatccttaccatagatgagaaggggagtgtactggctagttttgtgtcaacttgacacagctggagttatcacagagaaaggagcttcagttgaggaaatgcctccatgagatccaactgtaaggcattttctcaattagtgatcaagggggaaaggccccgtgtgggtgggaccatctctgggctggtagtctcggttctataagagagcaggctgagcaagccaggggaggcaagccagtaaggaacatccctccatggcctctgcatcagctcctgcttcctgacctgcttgagttccagttctgacttccttggtgatgaacagcagtatggcagtgtaagctgaataaaccctttcctccccaacttgcttcttggtcatgatgtttgtgcaggaatagaaaccctaactaagacagagagtcacattcccagttccatttctgtcatcactcccagtggactccacctgaggcatgcgtgacaggtgccttcctttctagatgtgcacgctctgtgtactcccgctgtagtgtgctgtgattctcttttgcctttacccttttcttggaagttagctcatttgtatattatgttaaggctgatgcatttatataaatacttggcatatgtatatgtatatatattttgaagatgtatatatctacatcaatctatatatctacatatatgcaaaaatgacaattatttttataaatgcataatatgtgtatgtatgtgtatgtgtgtgtgtgtatatatatatatatatatatatatatatatttccagaatgacgattatttgtgtaaaatgaatgagtctaaatgtgtgtgtgtgtgtgcgtgtatttttcctcttcttggactgacttcatcccttgctgtgtagttcagaatggcgtcacattcctaatctccttaccctgctaacaggtgtgtgccactgctccctgcttgtgtttcttcttattcctctaaactcagtatgccacattaatctggctaagacaagttcctgtggtataggaattatttgactgtgttttatcaataatcacctataattatatctgtatatcattttaccactaaaatgtgtaaaacaccactatctgtgtatttgcaaatagctcttttaagtgactgcaatcaccagtcttaattatgcacatggatactgaggtttacaggggtcagagacacaaagtagcacagagccggattgtgtcccctctaggcgcctaccgaccgccttgccgtttgcctgtagtctattcactggtaaagaatgcaattgctctgctgtataagaatatactttactgatttttttattagcacattgaatcagtcatttcatgtgctttctccagcatttctagtcaagtctgacatctgtaattccattttacaaataagaatgttgacaaatcagggtcattacgtgacttccagttgtagaactggtgacttaaaacctgaagcaagaggtcttcagacttgcagcctctgctgtctccattaccctatggtacttctctgctttcctgtaagattgggaagagaagtaggtttttattcttgggattttatagaaataatggtcttttatgcctatgtaagagtctaaaatgaactggggagatggttccatggataaaacactgttacgcacgcatgaggactggagttcaggtcctgagcatccatacaaacatggcctgccgggcatggtgggcacagggtaagctggctaactggctgacccagggaagcccacatgtagacgttacctctggccttcacatgcatgtgcacatactcagaagccaccctcacacctgtgaacctaagtatacatacattgtacatacataaacctgccagacagtctcagtcattaaagtaacagcagtgggtttcctgtagcttgatctttgtatgcgttatgttaaatgtcattgatggaatgtgtcagaacaaatcatacattacttccagaagagggagactgtgggaaggagacgcttacacttaggtctgacagtctcatgaggtaattgcagcatcccagcatactactgtgggcttgtcccgtaattcatatctgttccttaatccgtgggattgaccgactgcagctgcttaaagagcatgtgtgcagttcagtgggaaaggaaaagtctgtgcccaatagacatgaagtagagcctggaattctttatggttaactcggctcttatctccagtgttttcttcagttgcatctctgtaagcacgagttgactggatacgtttctctatggaatacagcagctgctctttgttgtgtcaaactgaataccatgggaactttgtttatggggttggacatgggtagtagatcttgtcatggatataggagattacaaaagatgaatggcctcagatagtgcttatcaacttggtgtttccacatttgtaaataacaccagagagatgtttatgactggaagaggatgacagcatccagaagaaatggagtgaagagtcaagtttgcattcggctgcacagcagtcttggtgttttgatcctaacatgtttctaatttcttcatttgctaatgtaagctaggtgttctcttggaatggatatgaggacttaattagagactgcactaagagattccttgcacatttacacacttgagtattttaatgcccagggcttctactgcatgtcaggcctttaacaaaaatgatgtcgatttggatttcaattcagatcctcctgtcagcactgacagcagtcaccatcatctccatttgacagagaaggaacatgggatgccaaaaggctaaatgactgctcagggatctgtgggcgggtgtgttctcttggacacgcccctttccttgtgggtctgatgcagcttttctaatgaggcttacatagcagggctaagctttctcagtgtaggttacttgtaagtcatgcaattgttgccctgggttaggagtcaggagatccaggctgctgctacgttgtgtgttactaggaagtaattcattgcatatgccttattaaatacatataaagcacttggctttctgctaagcttcatgggtaaaatgtcttattataactttgatctgagagtaaaagttctctttgaagagataaaagtatttacaaatctcatttagtgttttgttctgtctttgcttttcagtcattcttacactggtcaagattatagtacccagaagaacaccggcaagatttccttagatcagattgattcggtaagcgccagcccgttacaacagacttgtctcaagtagagatccttgggtggaagctggcagagtgcttgctaccttgctgcttgctgatcattttaagagaaaaggctcgtatcttatgtatgtgactccttttattttaattgtaagaaaaccaaatttaaggggaagtagtttgcagtctttcagttagttttgaggatagaacttagttgttctttacagagagacattagatgctcactagagggggcagcaaaggcaacaagtgaggcctggtcctcctgacagggtccacaggcaagtctgcccaacgagagttcaagtcctgggaggaaggatgtatctgaggacattagagggaataaggatgagatggagagtgaaaatgctgagttaaaaccaaggaatgatgcttcatttttttaaaaagaattattttgcgtatgtgaatatactgctgctgtcttcagacacaccagaagcaggcatcagatctcattactagtggctgtgagccaccatgtggttgctgggaattgaactcaggacctctggaagagcagtcagtgctcttaaccgctgaactatgtctctagtaccatgatattttagttttgacattaaaacaaaaagacctgtgaatttttaaagtatcggctaaacattaatttgaattttctctttgaaattgtttctattaattttgtgttctttatgtctggtttatgttataaatcaatttcctattttcaattgtattttcagacttttctcttagagaaatggaatattatgtccatataaaccctcttagaatattcagagcagttttgtttgtaataaaaagatggacaatatctaatgctcttcagtaagcaaactgcagcatattccagctatagactgcacctggtcattgacctatcctgagttgtcccaggccagccttgaaccaaggataaggaattaccaagaagccagtcttcaaacacgacatgctatgtgattttgtttagtccgttctcttgagatgacaatgttactgaaatgaacagatgagctgtttccaagtgttaagacaggaggaggaggaggcaggggtggaggaggaggcaggggtggtgtaggacacagaaagcagcaattagccagcaggaggagagccggtgagacgtctcggttggtaatgtgcttgttatgtgtgaggacttgcattgggatcccagcatttacaaaaaaaagctgcatgtgctggtctgggcctgaagtcccagcaccaggagggggcgggcagacacaagcatcctagaagctgtgctggccagcaggtttagctgaagcagtgagcttcatgctcagtgacagaaatagaggaaaacctctggtctccacactcaaattcaggtgtgtgtacacacctgcagtaaacacaaacaggaaatcgggacccttgtgatgctgaagtcattttgcatcctgactgtggcgatggatgtataaacctctctccatggtgtaacgtccacacagaagtagatgcacaactgcgggaacctgaggaaagagtgggacatatccactttgtagttgcctgtcgtgcaagagtttatatctgaggaaaactgagacacgctgtatctctgtattacctctgtattacctcttgcaactaataatgtgaatcactagttatccaaagaaaaaatttaaaaaaggaacaagggaaacagatattatataacctagtatgttcaaagtgttaccagcttgactttgaatcattataaaataatgtcttgtttataatcatagtaatataggaatgctttctgtggcttatcttctttattctgacttagtcaaatctacagtcacagcaaatatgacatgtggtctagtatatgttcggcattgccacaacttgcttttttgtcttgtagctgtctacaaaatccttcccaccttgcatgcgtcagctgcacaaggcgctgagggagaaccaccatctccgtcacggaggccggatgcagtacggcctgttcctcaagggcattgggctaacgctggagcaggcattgcagttctggaagcaggagtttatcagaggaaagatggacccagacaaggtaatgctgaagagccatagcagcagcaaatgaaagcttgttagtctgaaactacaagatttgtttttgttttaagaatatgtatttatttatataatgtatatgagtgcactgtcactgtcttcagacatactagaagagggcatcagattccattatagggttgtgaaccaccatgtgattgctgggaattgaactcaggacctctggaggaacagtccatgctcttaaccactgagccatctctctagccccaagatctgtttttaaaatatgcactgaaacacaggtaaaagtatataaggtacatgtatcttagtttatgtaaaaagaaattcacaccttttttatttctttgttaaatttatttaatctttttttacagtccagattttatccccctcctggtctaccctctggctgttcaacatctcatgcccactccaccctccctgttcgctgcccccctctccattagaatgtcctcaccacccccaccctaccagacttccccattctctggggcctcaagtctcttaatctagcaagtgccaaaagcctaggccagtgtctttttcagtaggcatgctaccagcaggctaaatctgctttctgagctctgtttctataaggatgcatgcgcacgcgcactgtgaagtcagttaaaatgctttctttcagactgtgctctagagcatttatttcaacagccatcactgcagacccttccagctgcctttaatgagtctagaacatcaagtcctcaggcccactcctcagttacttttcttttctactaatatcagatggtaaaattatgtctagaaatgtgctttttgtctcatgtcatacaccacatgaaaaaacgtttgtgtcgctttgatttgcttcttctggatcaaaggctaatagaaaatgaagaatgtttacatgaagaaatgccatgtgtggtctcctattagcttttagagctgccataacaaaattccaagtgtagtggttcaagcaacagaaacttagtttctcgtggttctggagtttggaaatgcaaatcaggatgttggcagattcccctgttcctgcggcctgggcctgtgacttgaggacctgttctctgtgtgagtccacagccactgccactggccgccactgctgctgccaggcctctgcttgttctgcactagctgcaccgggtagtatcttattaaccttgcttgcagcctttaaggcactttctcaggacagaatacagtcacatctgagatcagggcttaaatgtaagaacattaggatggcatgactcggtatgtaacacatgttttattatatactttatttaaagacctggctctgtgtgtgtgtgtgtgtgtgtgtgtgtgtgtgtgtgtgtgtgtgtgtgtgtatgtgcggggtggggggagcactccatcccatacatgtggaagtgagaggaagactgcaaccctaattaaaacataatgtccacataaaacatttatgtggaatgcaaagcaacttttaggtaaagtgaaatgtgaaggtagattgttctagaaaacattgatctggagctgaaggacatgaacatggagtaagaaggaagcgggcaaatgtttctgcttaccctttcttctctatagactgtctccccggctggcacgctgttacctggtgttagggctgattgtggtcttggctgttgtcactaaggagtttctgcttctccgtttgctcttgcatttgattttcttacatacacttttagaggatcaatgttgagcatcaatagatacatcattcctaagaggacaacattttgttgtgagataatatcctgagaccaaaagctttgaagtacatctcactccagggaattagatttagagtgtagattttagccttagttttaacggttgtattaatatgtgtgatggattaaaaacttatagacaaagccttcttgtcagggcagggcacttgaaaattgcacctaactagtcaaatacaattctttggtttataaatgactttcacaagaggtatttgaagttttgaatctcatatttcttaagtagtttcttatatttctaacataaatacatcatgctttatgggaatgaatgtacttaagtaatcatagcccgtgtttgaggagtttcattttgttaatttaagttttttacttattgactttacaggctgttccctaatccctccccaccttacaatccttctccttcccgatccccttctcctctgagcaggtagggacccccttgggtgtccctcactctggcactttaagactctgcaaggctacatgcttcctctcccactgaggccaaacaaggctgcccagctagtagaacacatcccacatacaggcaacagtatttgcgatagcctccattccagtttttcggacccacatgaagaccaagctgtccatctgctatgtatgtgtggggaggcctaggtccagcccgtgtgtgctctttggttggtggctcagtctctgagagccccaagggtccaggttagttgactctgttgatcttcctgtggagttcctatccccttcagggccgaaatccttttgaggagttttcttagttataatttttgtattttaattgccagtctacctgaggaaaagcctcaccttgtatcccacaacacattaaatttatcaaacttttataaaggtgtgaggacacacagcattaaaatattcttttagttagaacttggttattaagttgctcagtcactagaattaagtggcactgggtaattgtgacgcattcacagccctgtatcctctcagctggattgcctgcagtggtattgatctcagttgccttcccctggctcagctggacatttggcgcttaagtggccgcagggtccttgcatgccatatgcagggtccatggcttgctgttgtgactgagccaaggaacatttcacaatatttcgtttgtctgagacaccaataggtaataacataggatagatttgaattgttcagcttactaccaatcactcaaaattaagttaattttctttttaacttattcacttacattctgttccctgccccctcctggttacttgatatgtgtgcgactatacatatcaagatgtggggacagagcccacagtttgtgttttcagaaccttccacatgaaggtggtgttctccaggttagatcgagaaaaatggttttgggaactaccgttaaaaaattcaagttgctaaatggcttattcaaccagtagccactgcacatcttcagctctcagttgttctgtctgcctccctaggcaatttgggcataatgatctgtcctgtgtcaataatccatacatacatttaaaagcccgctacatgccaggtcctagtaaatgctaagtgagtatgtacagcagagtgtctcagctaatgtactgctaatgaatctccaatatactccagtatcgatcccatgagcccttggggaagccaggctggacctggagaactcatagcttgttgccttccattgtaagtagtgcctttgttttactctagaatgttttctgaacatccttctctctgtgccaagtgatgtgaaaagggtaggaaagaactaacagagaatgcaggcttggacttaggcaagcatatttttttctgccatacataagctatatagctctgttagggttctccagtgggaaagaactagtagaatgactgtttattaaaaggggctgtattaggctggcttattcagtactgtctgagatagtggctgtctcactctggagagcctgagaacccaggtgctagctgttgagcccccaaggcttcatgcttcagagccctaacctggtgccaagggcctagagattcccagagaacctctggtcttcattccacattggaagactgaagaagcagggttcttataccagcaaaggaacatcacaatagtagcagcagcagccgcaaggtagatgagcttgctagccagagaaaaagcttttttttttcccccccccagatctccttagatttgtgctggcattgtaagatgccacacacatttaggttgggtcttccaactttgaataactaagtttgactgtgataattcctcacaggtaaacactttactctcagcatctctctctcctactcccttaagttgtacagcaaccggacatagaattcctcacatagctcctgcattctattgtggctgttgctatctgtccagggcttttgtcagatgtgaggaatggaatacagcttcagttcctagtctctgagaccatcatacgggggcagcaaggggggtggtgttcataaaggaattcaccagtgttttaaaaaatgttaaattatagaatggcagtttgaccacttattgatatctggtgtttgacaggcaatgtagttgttattgtatatctgattgtatagtcctgaagagaagcattccttaagtgtattttcctgatagaacaatactagaccctatgatctatctagtatcattcatccttagttagcagtattttgttttttaactgtgtctcctggccttacagtaaagcagagaagacataaaatgagctcactcaggctgagggtggaaagtgggatactgctttaattgaagcctgagactctgattctgttgaaatttagagcatcacccgtggtaaacgttacccttttatgaagagtgcaataagatttaggcaagaacatggtacaccagtaaacctggctaggttttattttaaacgctgtatttcctagtgtctggaaagagacatgaggcacatcacaggttgactgtgttgtgaaaattgttcaatttgacaccttttgtaatagaaattttcagttttctatttagtcactagaggtacaataaatgaggtctgatgcttaatcttattttctaccttggtgagacaggaatcaccagggaaaccggccacagcgggtctatatggggtgtcttgattaaactgatgcgggctgtcccctgtcccctcccccagtaggagtagtgtgccctggggtttctgcattgtattaaaagaagatgaactgagcatgcactgtttggttgtgggtgtgatgtggtcagctctctcaagtcctgctgtacgactccttaacctcaaatgtggccaggatgaacctgctctcctctttagttgccatcgataggacattttattagtgcaggaagagaaactaaggcacagatagtgattgtctgctaagggttacagagaagtaactgtctccatgaaatatgagaactaaattgacacttaccattttaaatgcttgataagtgcactactctataatcattcacacatttatcataagggacctatcaatccaacttgtagagaaaccttactcaggtgattggctacctacattttgattttctttttattgaatatctatgttggtgatatgctaagaaagtaattggaatggattaaacaaaggttctgcaaaaggagtctagtcatcagagttttaaaggttctctctctctctctctctctttttttttttttccgagacagggtttctctgtatagccctggctgtcctggaactcactttgtagaccaggctggcctcaaactcagaaatccgcctgcctctgcctctctgcctctctgcctctctgcctctgcctctgcctcccgagtgctggcattaaaggtgtgcgccaccatcgcctggcctgttttcctgaaaatgacatcagcttattcattagttgaaagccaggtagactgggctatgtcagaaggcaggtgagggggcaagaatgagatagagatggagcagggggaggaagggaagagggagggagagggagagaagagggatggagagagaagaaagtagaagaaggagaaggggggctatatgaatatgcaaaggacataggggacaaagtcttcactattttattataaattgggatcaccttccaatttattacaagttctctgggaagcacagacgttgttttgattttgtattcaagtaacatgtattgggtactccaaaatggtttacatcgctcagcaaacaagtctcttgagtagggtaattccgcttgatttgggtggcagcataggttagttgggggagtgtatactttggaatcaaattagagcccagacccatctgctcattataagttgtgtgactttgtgtgagtctgctcccaactccagctcctcgtgccttgggtaaggataatgctgggatttatatgatgattgtatatgatactattcttgctataccacatatgaacagtgcccactatttagcagagaatctaagttgattgctcctaagttcccatttaacgggaactagattgtggtaacaacagcaggagcttcgagtgaaatagtatatctgcccaggggcctcagagggtttttctggagaagttagtatttgaattggtccctgaatggtaacaatatagaattgggagacagtattttctgaatcgtgctatgtttctattataaaggctgttgataactgtggtttgtctaaagatatcattattcaagtgggtgattcttacattcaatcttggtaagagctgggtgttattaaatctcagctaaaaccttcctgctgggtgctgaggaactgcatgtgggtatcattgctctgcagttggatggaagtgaaaacctaagtgggtgattccagtgtcgaatgccagaagagggttggtggatccatggtcttcccttggctttatggcagtgtggttgttgtttgcttttaatctgtaagttgtgccttctcaaaagtgtatctaaaggcctacttagtctgcagccgcatctgacaggctctctgaaagcagtctttccctttgtggtggggattggttttcttactaatggaaaactggagagctggtggacagaggtcccaggacacttgtggttgatgacacgggtgctgctggtacgcagcatctctgaggcagagaagtacttcttggacatttgaggtttccagggcatggcttgaaccttgattattatatctgcacccacggcagacagtgatcttattcattttgtggcactgaatacatgcagaagtttatgattcctaacttactcagcctagcattttctctgaggcctagacccagatatctgagtgtgtgtttattatctattttctgaagcatataaatgtagttcacagatcagcttgggtttctaaatctgagctcctggtccgtggagcagatcaccacatgtcgttgccagcgcattcatctcagggaatggacactctgttatgttgatggactcacatcaagccttctcttacacttgtacagtcagaagagcagtctaactcaactctgaatgtgcaccacgcctatcttctttgatgtggaggagccccgacttggtactaggaggtggtgaggacttaagaccagttagcaggaggtcttcaggccctggaagaggatagtggaaaggtaccctttcctcctggccagttctcagcaacttcttaggaggattgttagttcttcctgtggtagtggcctcctggagccccagaagcatgatacattgtgtattgttgactggaacattcaaaactgtgagctaaaagaggcctttctgttgactgttgatctcaggtatttggcgtgataatgaaaagctgaccaaaacaacgactgtatcatcggttcttatagccacagtgctagtctgcactgtcattgtgctgcggactcttgggatagcgccatagctccatttcaggtttctgtctcagaagccttcatcagtgtcaataaaagcagagaagcagaaaggccaccatgggctagtcttttttcctaatgggatttaaaattcctacaagccctgggacagaacttttaataacattttctccagcgtcctgccccaaattttgagaggggtaattatttccctgatacatagtcaatggactgtaatgtgagagcattccagtagagctgctggtttgggtatagcgttctttgatggacagttggcctgtataccccagctatattactaatcctaaaatattgagagtataatgcagtgcgctcccaaatgtgtccgagtacaattccttattcttagtgattgagagtgcacttcaggacagggaagtgcttcaggctgatcactaggaacaccagttaccattgctcaggaaaggaagtgctgcttcgtagagatttcaagttgagttagtgtcagaaaagcagctctgtcttaaaaaaaagaaaaaagaaactgaatcgcctgtcaagcctattagtgcctaagtctcacctactatattctgataatgagtttgtttgtgagtagtgatggttggcaggctggctttatttttactttttaaaagtaaagttcagctgagttctgcaaacattttatttgacttaactttaaaattttatgtttatttcctgatatatggacatgagactctgatttagtgacagagtagaatatattaacgagaatgtctttgggacataattatgtagatttaaaggagtgatggcgttttaattatgccctttagctaatgcacttgcatattaaatccactcgtgtctttttgagctttcctctgaacctttgctttctcaggcctgaacgtgctcattaggtcacaggaataaccgaaagttatgtaagataagctgaaggctggcaaaggatggcttcaaagtacgttcaggtttgaaaaagaaatggctcctgtgtctaccgtgttctttgccaggtttaacaggaaggaaattgcagtctctgtgtgtgtttagctggcttcctcctttccaaataagcgacattccttggttgtactgtactgaagtcagatgacacgttccttttttaaagctggggtgtaggaagtaaaacgagggtatttcaaaatgatgattggttgtttctcttgggtggttgtgcttgttggttttgtttttgactttgttttcctccatataggctctcagtttaaccaaacagctacctaggagctatgaagtgatttgcccaccttaggagaggagagcactgtgaagcctcccagcttcttggtggggtttgcttttgtgagaagctggactaggcgaaaatcctcagtaaaatttaagatgaaaaaagacaaaaactaaaagctctgaattatcatgattatgattattattttccttttgaaaagaacctaggacaaactggccttgaaatcacctttgtagtcaagaatgaccttgaactcttgtttggcagactcctgcttcccaagtcctgagagttttccaatgtcgggctatactgaaagatcacaggatttaatggcccccagagggccagatagtagctgtgttggcttctgttgcagccactgtgctgctgtggcaggaagccaccacaggtgggacctgtgtggacatggcctatttctcataagccagttacccaactggatttagcctgtgagttggctgtagtttgccagctcttaatttaaaacatgtattcctatttattcaaaccaacattcatattgtatgtatattctgtagctgcttttatgtgctttttatccatgctcattataatggcatataacagggtgctaatatttaaaagtttaacatggaaaactacaagcgtacagaaacataaatccctacttctctatcacatggagcgattagctctctgcttctacacaggatttgtcctttattcatttgttactcatttgttttctctgggtctttagaaaacattgttccaaactgtgcttatgtggtactgtgtaggtcagatttctctagagaaacagtctcagtaacacacacaggtccagggagggaaggtgaggaattgtctcatgtgattctggagaccaaaaaatacagactctgctgtctataagctagagacttagaaaagccagtgatgaagtttagtctcagccaaaggcctgagagccgggacagctagcaacaggagaagggcagtgttcgccagtaaggctgtgagggagaagggtagattttctttctttaacatttggtttaggcttccacacattgcatggtgcctattcacactggagagagaacgcggctttaccaagcctgtaaaatactcagatatttgcagaagtaccaggcaccacatagtccagttacaatgcacaaaatcagccatcataggtagccctgcactccagtatgctctctacactgctccctgccctgcactttggttggtttttaatctattactttacaaagaacgagccatttctataaaaggcgtcattgtcccccttcgtcatcatctatggcactgtgccctttcctattccatgtctcatctttccagtaagaagccagtcctgccagctccaaccgtaggaatccttcctaagtgactcacccttacatttcagtttctgccacccaaaggggcatagtgatgcccctttgccatagccttcaccactgatgtctcacctgatggtctggcaatagaatggtcttcctgaagcaattatgctaatatttgacttcttaatttatcggccagaattggcctgtaaagagccttccctaggtcatcgtgaagactgatttcccctgagatgtaaatcacaaggaacagaatagtttcaaatctcactttatagattgggttgggatctcaaaaagctaggttaattgcctgaagtcgcagacctcatgacaggtctagcagaatcaaacccagtactgacaaaatggcaatgtgctttttagaaccagtgctcagtaacagctcgttcacttttgctctgtaatctcagagtgagcaacatgtagtgcggttttaattgttcctgcttctgtttcaatgaaggaggatttacacagtttcatctgataaactagagagagtttttgagaataaatgaggataatatgttcaaacttctgctccatcacgtagcaactgtctgctgactttgggcaaattgcttagtcttaccacagtcaagtttcctcatttatatcacagagattctaatagtaccttccctaaagtctggttgtaagcattaaacaacctgtgccttgcacacagtaggtattcggtatctttttgttttctgtagttaaactgtcctgtagttattatcagccatttaatctgagcattagaaatattacagaaattgtcagcaaagtgacatgagactctttactgatgcagacggtgatgactggccagccatgaactgattgtcattgaagacactagtgtctcaaggcttcaggctctcctgcaggattgttgagtatatttacagattgggcttgaaaggatgtaggcaaactgaatgttttgcgtttataattttccaacatttgagtcttatcaaatgaaggagggctgttgggtttttgttttcatttttgagtctgcacacttcccgctctgacagcagggaaagcgttcagggaacttgtatctgcccagctggacacagactactttacaccaggtgggaaacaagacaccttctgctctgctgccttcccgccctcacctgttaaaggcacagagccagcccgtcatgtagattgcccttctaatccctctgagttctattcatgaggaagcttttggaacatgtttagaaggtgctaagggcagagttgttctcattgcttgtagggagtcacactactttccacatgcgcttctgtgaaatgtctcgcagcggcactttgcgctgtctttgtactgcttcggtctgaagctgagggtggagggtgtgtgtgtgagcgtttggcctgatcctggagctttcctgtttgctcctttgtactgactttgctcattgcacggcattggcaaagcacatcactgtatttttcttaagttatcaactgtgttttgagccatgttcgaaagggcaactggtttataaatgactcttactgagaatgtgaaagaactttgtgtttggccctgagaagtggaacacttgcattttctagtgcctaagtcggtgtacaggcgacagtgatgccatctggcgtgctgtgctcctcatggagtcagtctggtgagtttgtggttacaaagatcaatacagtctgttctttatcagtctccaccttattgtttacttgcaagtacatcacccagactaggagggggaagtgtacactaacttcaggtttgctttaggaaaaagaatattactcatcttaaaccacagtttcagtattcttccctatatgtcttgggaatttctgtacttcctagcgaaacaccactatacaattaaaaatggaatagaataaaactattttattcaaacttttgtatttcggtaggttactttttgtccaataaaggaacgtatgtgtacaattctgtttcatggatattagggaggtagtgagaacaaagaacctggggtccagtgaagaaggtcgagctgcggtcctcaggtcccgagctgcagtctttaggtgtgcatctgtccaggcagggcctttgcaaaaacacatttccttccaattctgcctttccagcaaagtgaactgggtccaaagctgaaggacacaaccagaccctcacaccatcttggaagccccgagaagctgttcacacgcctttctgcacaaatgaaggagagcgtgccttttgtgtgtgtgcagccccagagttaagtcagtttcccggcactgaggctcttcctaacctgtgggctgtggctttgctcctctttcagagtttcctccccagttctgcaggagcatggcagcagtcgcttgaggtttgcttctgttcgtgcatgatcttggtcaggttagctttgctacaccgtgggctcccccatgtcctcatttgtgtgtggctgctgtcatctcagtgttaggggcttcttgtgaggaacaggcataatctctgccaggcgtgggacactgtcaggcatgtggaggagcctttgtgcacgggactgctagagatagtcagtagcgtgcacatctgagatgagagaaggaagcttcggtcctagcaatgggtagtctctgtagagaatgttgtttgagattcttatttaagttaatggataattaacatgaaagatgcaaagtgtaatattgatttttttgtttgtttgtttgtttgttttgagacagggtttctactgtgtagccctggctgtcctggaactcactttgtagaccaggctggcctcgaactcagaaatctacctgtctctgcctcccaagtgctgggattaaaggcgtgcaccaccactgcccagcaatattgattcttgaaaccaagatattgatgaataatgaagttttataagcctaaaatttatatgtgatgtttttccccttttcactgcttactatttgcaagtcagacatttttgaaaatataacttgaatataaattcatccgagtaaattgagcagaaaccccctacattttagtattcatatttaatatagaatcccagggtagattcatcagccctcggctctcacgtttttctctttgctggttaactcttgttagttactctgcccctcttcttgaggatgtgaaagcggatcgtgaatacaggaggaatcatctggttagtttgttaacccgtcacagtagctgcagagccagtgacacatctgagaaaaggtagcagagactcgtctgggaaaatgttaggaatcaaagctaactggcatgaaggagctgcattacacaccttgtacaaacaccatggttgtatacaggttgacagtgaaggccacaggcctgggtcttcctgttttctctgtgcccaccgctgccttttctttgcactcagagttcatgaagttgattcctttccttgctccccatgggacatcccagctcggtctccgtttctctggttctgttacagcagtacttgttgtcatgtaggcaagtttcctgtacagaccttataaaatccttgggtgctgagaaaagatggattttttaggattcaggtaaaagagttggtggctttgcaacatgtcctctgtgacttgaagaggctcctgcctttcagcacgtttgcaggaacgaaactaattggatgatgaagactgaaatgccgacaggttttgtttgaaaaagaagatatattttcctgtgtagtgtctcggagctgcatacatatgcccttgtggccacatttcattacagctaccaagcttactctcagaaagtcagatcccagggcactttatacactgatgtgaaataccatagtatctgttggaagaacggcgttgattttatacttatacttatacacaaggtaaatctaatcttatagccagactacccttaatatagtcacattgcataacaggtatctcagatcagcttctttgatctagaaggaagcagttggcgatcagtagtttacctttcaatctgggaaatgggatggaccacaggacttggaaaatagcatcggatgctgcttcacttgctcagtcacatttgtaacgctctaggacagtgtggaacgttaaccttttcagggtcagtgagacagctcagggggaaaggcccatgcagccaaccctgacaacccgggattgtccccaggacacacagggagagggagttaactgaatcctgcaagttattctctggtccccaacctggcacatgcacacacatacacaaatgtaataaaggtattttaacaaattgttgctggtaggtacatagactacctctaaggccctcagctgaactaactccctgggagtgcagatctcattagtacctttactgctcagagcccccattcttctatctatgaggtcaaactggatttgttttatagtgttaagatttaagcaaaataaatgtaaaagcataaacatacttgaagtgcttcccgaacacatgaagtaaatggatatccaccattacagcctttacagcttggctggaattcaggcacaggcctgggactgtgaactcaggcttgtcacttagacttcgctgtcactgtctcatcactaatgaggaggtatagcccccggtcatcaatttttagtgaggcatatcaggaaatgatatttcctcagctttgcaacaagaagaatgtttttttttaattaaagtttccatcaaattggtgccatttcaatatattttctttttgaatccaagatgtatgaattggcagtttactcacagaattttttttttgtgacaaaaaaatctatttgatttatgtaatgaaaaaacaagaaagactgcctgtatttctctagtttccctggaatgggatacatgaaaggtgttttcttgtttctttaaagcctgtggaccattcccctttagaatgtctattgtttccgccaaaagatttttctgcataaacttagattttattgtattactgttttgagttttaggctggcaagtaggaggtggcacatcctctttaaatcatgatggagacaagtccgtgaggttgggtaagcatcctgtctacccaccctgtcaccacacagaactaaaccagcgggagtgtgctcacttcttgagaaacgcaaggaaccaaaaatatcatcactaattagctcacagttttgaagttcataagcatgtgtcagatctctttaggacatggggtgtgttcatgggctgtttgagcctccaagggagagctgagcgctggttaactcaggtataaccatgtgtatgtgtgtctgtgtgtgtgggggtggatatctccatgcacctctcctacccctgtgttaaagtctccccactttacccctggaaactcctgtcttcatgtgcttatcatttgtgaatactactttatatctctgaacaaaaatttgaaataaaaacatccatcttttttatttttttccagcatcccccataatgctcgactgtctatttgtttaaggaaaaagtttaattaatgaacaaggtgctgtcagtgttgtgcagcagcaaagaagagaagacagattaaagcttctttcatttggctccgttgagtcccgaatgaatgccgtagtgttgaggagcagccaagatgtggaatttgagattacttgtttcaatattggatgaaggctcagctgagggagagagtggtgggtgcagggttcccatgggggaattgaggtgacttcttttgcataccatgtcaccttgtccccttccttcaggagctacacaacctgtgtttcttgaacaggcacattttgcaagtttatgtatggtacacgatgttttcatagcagaaagaagaagaagagaaggattatatgaaccaggaaaaagtcgagatctcgcactgcactgtgtgtttatgtgcatacctactgaatttaattaatgattttttaaaccatttcactatcaaaaaagagtaggcgtaggaatcagaggggtgcccctgcatcatggccattacgcatccacattggagaacacaactcaaacctacgtcatgtaactgtctgtgtgcacgcatgaaaccagtctatggagcaaacgttgtcgcttgtgacttgggtggtactgagagaagatgaatcctttcatatttatctaaaactgtctcatgtcattgtttgctgaggactcattgtctgctgttactcaagtttcaaaagtaatattgtggttgtatttcttcagagacaaattgatttgggggttattagtattcaacaaattactcttttaaagctgcacatcaaaatattattcctgtaattttatgagcattgtgtttctcattctgggtctgctcatttgtatgccagggaggccctctgaagcagcgtttgaatttcagtggaagttaatctgcatgtgaagaggcttgtggtcccaggagctggcaaggcagagcccgtccttagttcttggttttccccagccttgcttgttgttagatctcaccatttaaatgattcaatttaaatgaatataaaaagttctttctttaggaacagctgtttcttttaaacagaatgggaaatgatttctatgaatgtgagtttatgacacagtaatctaaaaacctacaacagaaatttctatagcagaatggtaatttgagacattagtcacatgcatgtatttaaagataatatgcatgtgtgtgatcatcaagaggagtattttgcataataatatattcaaataaatgattggggtaaaattataagcagttgttttttttaatgtctccaagtgtgatgtagcatagagaaacaaaacaattgtattaaggggaggaatcctttacataattaaatactataaaagaatgttaatatctatacacatttgtgtatttctacatagccggaacaaatgaaatgagtgcagcacaaagtggaacttggagacttagtgagataatcatattactccgttatcttagctctaaaacggggatcagaacatggggaatgctcttgtaaaatactgcttattgtaatttgcagggctgcttttaagttcgaatctttgagagtttatcactatttattttaaacatattcaccaccccatctccttccctttctactctctcctcccacccatcttttcccatccaactcttgagacttcatctcttctctccttccttccccaagtccagtgtgtttccagcaagctttgtggttggggcccaccatggtatgtagttagcctatcgcaggtcatatcattaaaggaaactcactctccttttagctattgagtattaatagtctgtcaactgctgttggggttgtgtcctcctgcctcctcctatgttggcattttgtctggctggagcttctgaaggccttgtacatgccatgtgattggtgtgagtgagtccttcctttgtgcatctaatctctcctgctggcgttggaaatcattgtttccctgatgatatccaccacctctgactcttacaatctctctattctctctgtaggggcgggacctctatattaattggcatttacttcaaggaaaggcttctctgataagaattgaggaaaggctcgctcatttgtggatatgtcattatgggccatatgtccatttagaagaagaatgcattgggttctctcccagggcctatgtctatgtttgtgtctcccttgacggtggctggtatnnnnnnnnnnnnnnnnnnnnnnnnnnnnnnnnnnnnnnnnnnnnnnnnnnnnnnnnnnnnnnnnnnnnnnnnnnnnnnnnnnnnnnnnnnnnnnnnnnnnnnnnnnnnnnnnnnnnnnnnnnnnnnnnnnnnnnnnnnnnnnnnnnnnnnnnnnnnnnnnnnnnnnnnnnnnctcccctcccctcccctccctttccccccctctctctttcttcattcactttacatcctgattccagctccctccctcctctcctcccagtccctcccttacactccttcctcccatttctccccctcctttctcagagagtgggaggtccctcatgggtaccagcttgccctagtacatcaagttgtagcaggactaggctcatcctttcgcactgaggccagagaaggcagcagagacagcccctgctctacttgttaggagacccacatgaagaccaagttgcatatctgctacttatatttagcgggcctaggtccagcccgtgtatgctctttggttggtggttggctcatgatcccaggttagttgactatgtaggtcttgtggtctccttgactcctctgactccctcagcccttctccccactcttccataagactctctgaactctgcccattgtttggctatgggtctctgcatctgtttccatcagttgctagatgaagcctctcagaagacagttatgttaggctcctgtctgcaagcatagcagagtatcattaatagtgttatgggttggctctctccaatgggatggatctcaagttgggctatcattggctggtcattttctcaatctctgttccatctttatccctgcacatcttgaaggcaggacaaattttttaggtcaaggattttatggatgggatgatatttccttccctccaatagaagtccagcttggctacaagagatggcctgaccacttaaggctccatataccctacaggggaggagtcttagctagggtcaccctcatatccttccaggagcttcccctgtcccaggtctctgactcatcccaggaatggccacctccccaccccgatttccattctttcccccagcccttccctcaacacctgacccccacccatgttccctgcctccatccacttctgaaatatattttacttctcctgctgagtgagattcaagcatcctcccttgggtccctcttgttgcttagcttctttgagtctggattgtagcatggttatcctgtattttatgggcaatgtccacttataagtgagtgcgtacatctttctaggtctaggttccctcactcaggatgatattttctagttccatgtatttgcctgcaaaattcatgatgtcctttttttttttttaatagctgaataggtattacaaataaaactgctatgaacatagttgagcaagtgttcttgtggtatgggctggggagatggctcagccattaaaggctaggctcacaactgaaaatataagaatatgtggtatcttcagtaatagcttactgtgtagatctggaggtagccaggagtattggcactaacctgctaataataacctaagacattgagaaaaggccatttctgtcttcattacagtgatcaaccattgtcttcagtgccccaaatgcaccagacagaaggaagggagagcctagagctgtcagacgacacaggagcgagtcatctgctccactccactcctccacagtctgtccttaaaaaagatggcactttttaaaaaaataaatctcagtcccataggagaggttatagaatgagaaaagattattttttttcattatttaaacaagtagaagtggaaatatatgaaatttgccaattgtatagattgatacagtatagtctggcaagtccatagtccctgcctgttatgtatagagctattatgtgccacgtaggtgtaaaagacatagagtttaacaaaatagacagacaaagctgtgtcttgatggcttgggtgtctctccttagcccagttttagtgtgtcctgatgctgaccctccatctcttctgagactctagacaaagttctcagtcacagcacagcctaaaccaagtccagtattattcttgccatccctagagagagtgagtgtatgactgtgctccagtttgtctccccctnnnnnnnnnnnnnnnnnnnnagggttagagcccatggccattgtggtaggaatccctccctccctcccctcagttcactcactcatgagccagccccccatcagtaaggcagtcacttctacagtcttatccctagtccccgattttgggatcaaacccaagaccctgtgcatgttaggtaagcactctaccactgacctacatcttcagcattaggctttactccttatgataacttttgagtgttctcatacttatacttttagtactgaacctatagctcaggaatagagtctttgtctggcatgtccatggccctgggatcgaaccccagcactgaacagaaggagaccccaaactgtaaaagcataccatattagccagcagcagccctgtatgttcctgtctctggatgtgtcaagagaccacagtgattgacttatattctgtgcaccttactctgtagacaaactctcctctcgcactaatgcacacttcccagaaagtatatctattgttaacgacacatgtctgtacttcagtgattctgtgagaagagttactaagtggtttgaaagttagcttttaaagtgagaattgatatgaaacatagataattttactatttgtagtctaatttgtgcctgtgcctctgtgtgtgtttcagtttattaatgcactacagattgaaacatacgagtctgtattcaggagacagtttgccattccccagctgtcttttgggcatgttcgtgtttgaccaacttactactgacattttaattttacattaaatctctacaaatgactgagagatttgttacagcatccagagcacctgtaatgtgaaataatggtttcctttcaacatgagtacgatggtaaaactgaagggaaaaaaaggcatttcttcctgtttcatatcttctgtgtgtagatagtttgaaagaatagcatagcaccataaatcaagtgtcttaatgaggaaccacgctgttgctgtgaggagcaaacagataacctgaagccagacagtgaaatttacatagctctcccctggtagagccatctctttgctttgctgagaacacaatctgtcagtaatttgttacgtgtggttacaagggcgagcacgttgttttgggctctgattcagaaccttcatcacgatctgcagggtggagtaagctgtcctgtagcacacccccagaaggagggagaagcagttctcttccatccagcatccttcctctggtgtgtgctaagctgcccctttgtagtgaatcctgcttgtgtgtcatttacataagagtgtgatacactgctctcattacactgacacaactctgagcatgtattctttctgtaagaggcatatttgaatcctgtaattacatatttatacccattgaggttagtgaactttgttactcggcctttttgtccctgtcactaggaagaactgtagtgttataatttgtatggtgtgcaaggcaggctgaagcttacagtggctttatgcaaacacagacgtacatgatatatgtcttactgctataagacagaatctgttttcgtttgcctgatactatggagtgaagtgaccagacaaattaaaataggaatagacttgggaggaagtggacagaagctacaggtaaaacgtagacaggatgatggtcacctagcagaacctgagtatgtttacttttgggaagtgtttgtaagtcactattgctttatccctgaggagagattctcatttgtgtgctctcatggaagagctggcagggcagtgggcttgggttcctagtcagcccacagccataaagccaaacatctcatcactctagggcatgtcctgccgagtccgacatttggtagggtaggcctatttagtgcggtttttatttttagtgctttaagtttatgataagtttactgaaatgacccagtccataggcatctgtgctcagaatcttaggagtcaagacagcttccatcatgcaccaggagattgttgcccacacctgagtgcggatggtgtcaaaggtacagtgtgaattgttggcttggcgtttatgaatgagggaccaggatggccgtccgagctgagctgtggtaccgtaatgttactaaagtaaaagcagatctggacagtaaagcaatatccaaggatttcctcgaggaactactagaacagagagaatgaggccttatcatagagcagggcacatcaaacagtgtcagcaagtgagcatttacagcctaagaataagtgcagtcagtagatgtaaagttaggggagtattccatgggtttggaaagatgagctgaagttctatcctttgtcagttgcctcactgactgccaagcctgggatcccaacaccctgatatttgctggatcactttcacagtgagccttagtggagagcgaatggcaactctgccatagtgtatgccttgtgcttgcttagtgaggttggagcccagacctgccctgtccactcaggctttcagtttattacccattggcacaattatttttaagctaaaaagtcccccattttttctctcttcctatgaagtactttgagtgttatgcttagtaatttcacagaaaatttgctcaagaaccctttgcctcagcctcctggaatatgcattttatttaaagaagcacagaaataaagtgtaaccttttataggcattttattctgactgttagattcagacctctcaagatttgcctttggaggtgactcattaaatgtcttccacggcttctcaggacttggcaagtattacctaggtgccatggagaaacannnnnnnnnnnnnnnnnnnnnnnnnnnnnnnnnnnnnnnnnnnnnnnnnnnnnnnnnnnnnnnnnnnnnnnnnnnnnnnnnnnnnnnnnnnnnnnnnnnnnnnnnnnnnnnnnnnnnnnnnnnnnnnnnnnnnnnnnnnnnnnnnnnnnnnnnnnnnnnnnnnnnnnnnnnnnnnnnnnnnnnnnnnnnnnnnnnnnnnnnnnnnnnnnnnnnnnnnnnnnnnnnnnnnnnnnnnnnnnnnnnnnnnnnnnnnnnnnnnnnnnnnnnnnnnnnnnnnnnnnnnnnnnnnnnnnnnnnnnnnnnnnnnnnnnnnnnnnnnnnnnnnnnnnnnnnnnnnnnnnnnnnnnnnnnnnnnnnnnnnnnnnnnnnnnnnnnnnnnnnnnnnnnnnnnnnnnnnnnnnnnnnnnnnnnnnnnnnnnnnnnnnnnnnnnnnnnnnnnnnnnnnnnnnnnnnnnnnnnnnnnnnnnnnnnnnnnnnnnnnnnnnnnnnnnnnnnnnnnnnnnnnnnnnnnnnnnnnnnnnnnnnnnnnnnnnnnnnnnnnnnnnnnnnnnnnnnnnnnnnnnnnnnnnnnnnnnnnnnnnnnnnnnnnnnnnnnnnnnnnnnnnnnnnnnnnnnnnnnnnnnnnnnnnnnnnnnnnnnnnnnnnnnnnnnnnnnnnnnnnnnnnnnnnnnnnnnnnnnnnnnnnnnnnnnnnnnnnnnnnnnnnnnnnnnnnnnnnnnnnnnnnnnnnnnnnnnnnnnnnnnnnnnnnnnnnnnnnnnnnnnnnnnnnnnnnnnnnnnnnnnnnnnnnnnnnnnnnnnnnnnnnnnnnnnnnnnnnnnnnnnnnctgtgtcagtgaatattcctctaatcaaacatattatcaaagtatacattatctgtctgtctttacttgaccaatgggttatggacatcaaaaaggttcagaggttcagtccattatcatcaaggcaggaacatggcagcatctcggcaggtatggtgcaggaagagctgaaagttctacgtcttcatctgaaggctgcaagtggaagactgggttccaggcagctaggatgagggtcttaaagcccacacccacagtgacacacctactccaacaaggccacaccttcaatagtgctattccttgggctaagtatattcaaaccatgacatgcagtattatggaaagaacttgggttttggaatcaaagtttgcttttcaggtttgctaattctttagtgtttgtcttgtgttccattgcttctcctctttgaaccgcagtgtcctcttgtgaaccgccatggggactgatgatctgaaccaatcttttaaaagcacccagcagcatgcctggtggcgcctaagtgcctttcagtgaatgttaagtccctttccccttgtctcattcactgaaagtcccatgcatcccataagtgtgttttatgaatgcagaggcaggccttccaggtaagaggcagttgtagagggaaatcagagggcagcgttaatcatttgaagaggcatttcatatgtagtgagtcaggatgtagttattgaaggacagcttaagaagaggagggtgttcccacccagtacaatccccaaaatcaaattcaggggggcagactgattattcttttctggaacagattaatctcatcattgcatgtagacagttggctctcacatccttagactcagtgattgaagtattcaggaaaaaaaaaatcttttcattgctatcattccctaacaatgatggtgtaacaactattctataacatttagactgtattacttgttataaataactggtgatcatttaaagtaggtaagaggcttaacaagttggatacaaatattacacagtttgtaagttattggacactggtgtgtagattctcatatccctgagattgctgggaagcatccctgttagacaccagagactggggggatgattctaaccttcactgtctcctccctgagaaagtttgtattgttattgttatttaagatgtttgtttgtttagtaaacttcagagaccagggacatggcagtaacagaaaaaccctgtgtgtgtgtgtgtatgtgagagagagagagagagagagagagagagagagagagagagagagagagagagagagagatgaaagacccatggcagtaacagaaaaaccctgtctgtgtgtgtgtgtgtgtgtgtgagcgtgtgtgtgtgtgtgtgagagagagagagagagagagagagagagagagagagagagatgaaagnnnnnnnnnnnnnnnnnnnnccttcctcctccttcctcctcctccctcctcctccctccttctccctccttcttcctccttcttcctccttcttcctccttcttcctccttcttcctcctcctcctccttcttcttcttcttcttcttcttcttctcttttcttttctttctttttttttttttttggtttttcgagacagagtttctctttatagccctggctgtcctggaactcactttgtagaccaggctggcctcagaaatccgcctgactctgccttcttaatcatgagtttcaattacatataatggttacaaatctcatatttttaaaaacaagttattctaagtcccacatctgaacactcagtttctcctgtggtttctttccataatgcatctatatccgaaggtaggagcttgtctattacagagtagcagaatctgagtaagccagatcttttcaacagcaggtttctcttgtcctgggaggtttgcagttacaagaaaggagatagatatcatgttattttaatttcacacaattcttattctcccaacacagttaaccatctacctgcccttatcctgttttcatagtaaagcacatatatggtcacctggagcacttcaggtcagagatgctttgcttttcttgagacaacagaaacagaaggtctgctcaggccgctggctgcgcagcagtaagtcctcaaggagccccaacgctcgtcagcaaattcataaaaccaggaaaatcagattcccagtagacacagaagctcaatctttatagtggacaccgacacccagttactacctttggtcattagcctgtcccctgtaggtgaaacttcaagagccctttgtaaccaggcttgcctggttcttgttctctgaccttagcaggccttttactcggtaactaagaatgtgctttttatcattgtgttgtgccctaggatttctgctacaaaacaactggaaaaataccctgacctgatttaattaattgtacataaaaagcatctagaccccatctttttatctttttaactaaacatacttttaccttttttatagaaatcgtcagctaaattattaatctatccgagtggcattgatttttgagaaatcactactattggtatgcattgtgattgctttacccagtggggaattggaaacctcccaaggatattcatgcagtacaaaacccagggtgactgagtcaacaagaactagcagcagtaaggggtcttcagcaaacaggaccctccctcggggttttccctctctgggatacacttatcttggcttcactggacggtgagctgttttcctcaggctccaatactggctgcagatcctccactgcatggctactgccaatggagcatgtgtgtctccgaaccccgaatcaccttgttgtttgatcctagctggtatcgctgatgctgttactactgtattgagtgatgtactctctctgtctctctatctcttcagtttgataaaggttactcttacaatatccggcatagcttcggaaaggaaggcaagaggacagactatacgcctttcagttgcatgaagattatcctgaccaacccaccaggccaaggggattatcatggtaagtgcttgtgatggatgctggtgagtgctgtttgcattagtgaaggacctagcttgtctgtgtctagttggagccccattactctgacagtagtttgtcttattgctgagctcactcagcttgtgcttggcttctgctggagtaggtttcctttcctcctctgttcttgtcttgtgttctgcaaggagcttgggatagaggtgttttaaagctgtgagaggtgtggaagccctagtttcacaataacacattttgttgatgttcaaaaggccttgtgctgaggcacagtgtattgtttgtcttactactgtcatctgagtaacagattaagtaagcagtttaacaaagccccggtgtcaagggtgtatgccagtttgcctaagttgtgtacacacacacacacacacacacacacacacacacacgtttttcagttcaaaaacgtattttctaaaataattcaaccagcacatctttaaaagcttcccattttgtctggtatgtcagggaatgattaatagtttatattagtaacctttctagattgccaaagcttgctgtaaccagatgtcagtattttgttttgttttagaatcttaaatgaaaccaccatgaaaagaacataccgttaagctgttaaaaattgggcaatcataaacaatatttttagaatttccctcccctcccctnnnnnnnnnnnnnnnnnnnntcccctcccctccgtttctgtttgcttgataggtgaatcaagttgctataaatagatgtggcatggtatgtggtctgttttcgagtgggttccatgactgctgcttgtaatatttgtcctgtttctctggatggcatattttatagatatgttatgtgcatttgagtataatgcagtttaatctgaagcttcattgttggtttttgggctaggtgatctatttagagatgaaagtgggggaatcagaattattttattatggcctatatgtccttttgtgtttatcaatgtttgttttaagaaattgggagcctcaacatttggtgcacatatattcacagctgtatcttgttaatatgcggtgacttcatctcttttgactacttctggccttgaaaccagaggagcagagttagctggttttccatttctgtttgcttgatagatgttttccatcatgggcgtcaccatatgtatactagtaagaggtgcatctcggaggcatcaggcaggaaaccagttcttaatttctatagtgttttgaatctgtagctcttaaaactgcttaggacttgtgtctgtccgctgactccaacacctgttcttgcaagctgcccttcattctctagcatatgaatcacagtgttctaagcctggtctcttcatcagcaaccctgctattttacgtctactgcctgcttggcatcttcacattgagcctctccagtgctttgcaggttttctctccttgaaataggcttgagatgctcttccccaagaatgtcaggttgcaggagactgggcaaggactctgttcagatggcgttctctggggaacagaatgttctaatggaactacttttcctgtccctctatagaagcctggtttacgtatccatttatattatctatatggtaaacactgtgagatgatagattttctggatgtaaaactcagagaagtattaagctgtcctaatgtcatctcttgagctactctgagatgtgtttatgctgaaacttcaatcacagatcagccagttggctctgcccagggcactggctgtgatggagttctgctcaggagtttcatcttctgtcagttgcgaatctctgcacttacctcaaatagaccttgagaccctgtttctttgttactgattttttttttcagggaaatagggtattttttctttatttaggatagagaagtgacatctgacctcagtatatgctcagtcagaaactggacatgtgtcctcttttgttttcttattaataaaattatcagccacctacattgcttcgacttcatcacctaatgctgcttagaatagttgaagaaccagttatgaatctatgtaagtctaactgtattctggcctatcgtctcttacagctgtatcattctgcacttttgtttgtttgtttgagttccttctttttattaactcatgcacaactacttgttttctggtttgttgaaacagtaagtcagacaacacttgccacagtaatgcctgtcaaagtggcttcttatgaaaactccagcaccacattcatcagaaggacactctcgacgaagtaggcaaattttgccattttcatccaccttatagtatttcagcacatccaacttaaccttcttcctcttatgcttgttcttcttgggagtggtgtaagacttcttccttctcttagcaccaccacgaagtctcaacaccagatgaagggtggactccttttgaatgttgtactcggacaaagtccggccatcttccagcggaggtcagcctctgctgatcaggaggaatgtcctgggtcttggcctttacattttctttagtgtccgagggttcaacctctagcgtgatggtcttcccaaagatctgcactgtagatcaccacctatgccatctccacccacgaagcatcagaaagatcactctactcttttaacactgttgttagctgtgggtgtgttcacctgtcttttattatcttgtttgttcagcccgaagatcattctctttgaagtgaagagtaggaacagggaatgttatctgtaaaagtgacaccagcctggctaagtactggcttacttcctctgagttctgagtgagcatattgggaaaagaaccttccttgagtttccttcagtttcctcctggcgttgtctttcaggactcttgcgtgggtcagttcaccttgtcaagtataatttgggtgacactgttcagtctctctctctctctctctctctctctctctctaatacaccttaattcttctttaattattgtaaattaattattattaattaatggaaacaaccaataattaccattgcttctttctcattgggtttttttttctatatttcaaacccagatgctgcaaaaataggctctttttaaaaatccagtaagatatttgtattctttgagaatttcatacatgtattcccactctttgatcatattcatcctcaccactcccctaactcctcccagacccacccctcctcacctcaccacttcatctctctggtttttaatttaaataacttactgtgttccatttgtatccagtcagccttgtggaatgccagagtctttactatgtatcatatgttttctcaaaatgtttcctgtactaaagtgtatttgtttaaatctgaataaaggaaatgctataaatttgcagttttcatagtcttagagatctgcagggttacaatggaggcttgatttatactcaagctcttccagaaatgaatttttccttcctggcccttttccattgcgttttcacccccaattcccactgatttcatataaaatgtgccattgctcccagttagcttgtctgtgtattatgctgtgcttaaacagtctctgtctttcttctagtggcccattcttttattttgctcatgaaatagtgataatgcaaatacacaatgtgtagtgtttctttctaacagtgcctgattgtccacgttgttcaccgctctgattcctctgagttttggatatttctattatctataatactccttttctgtacctttatgcaaaattttcagactgcatcatgagagtatgcaaattttaggtaaactgttacagctacttggtgattttgtgttctggtaagagagcaacaagattaaaactgtttccctcttcctagtgagtggccgtgtgagcctgagagtgcagcactgttttacataactcttgagcctgcagcatcctgacaacacagcagctaaatccccatttagatagagaggaaagtggttgcacctacgggcaattgactttttattaataagctgttagacagttaagggcccttcggcagccactcaagcgtggtgctgtgctgaatcctggtaaataacctggttgtcctgcggcttgtgttctgttgtcagggtgccccttccgtcacagtgatgcagagctgctgaagcagaagatgcagtcctacaagatccctgcctcggggatcagccaggtaggtccacttctgcttagggtcctccatgattgggcagctgctgtcctctcagatttgtttataggagtgatgctgtgtaatgagtgcatcaggactcacaccacactcctgtcttctgggtgaacggggccacagccgtgacttttctggttcctattccttggaaatcccaggtcttccgtctgctatgctgcagttttgtttctccaggcggtaaaggagcacagcaatcccaccccacagcttgtttgtttctttgcttttctatcagctgagggcctcgttaaaaacataaatatatgtttaatgtattgaggtttaatgtagtgatgctaaaaattcttgatagagtctttcattttggaaggctgttttccatggaaataagatgctgtgcagtccatccaggagtgttctggtaggcagcagtggttgcttggtttaatccgtatgtctgatggcagctaatttaaaaacaaaacaaaacaaaacaactttgttttgttaagaatttaagtaacaaatgcacaaactgtaaacaaaatattcaagcgattacatcttttagtaagtctgttttttaaaaggtaccatgacgctgttaggaccattgtctacaattcagtctggacttgctttggattctgtgagctgaaggagcctctctttcctggccccagaatagtcatggtccattcttagacagttatttttttatttgaaaaacatcaatgtacaagaaagcactactgtccaaaatttagacgagtctagttaattcagcttgcttgttcagttctgacccacttattctaggcaaggagaaagtctatatgcagtctggagtctaggtagtattttctgaaagaactgatcgtggagtcaggaactggaagcaggaatgcatgaataaaagacaggactgtgtagggtcattggtattcaagctagtgatgatgatggatccagtactgccaggggctagcctcagatgttctttcttgttggttcttcttgaggcaggggaggaggaagaggagaaggtcagcaggggtaagacttggtcttaggagatatttagggttgctgtatactaataaaacatttacctgccttaaatctaagtcacttggcttcagtagctgacctgtcttctgagttcctttgaggtgagaaactgtttagcaccttgtcataaaacagcaggagattaagtaaagtagtccttgctctatctacccgggaactgtggggctctaacttccagcctgttagttgaagtcccaggaagaaaaaaagaactctttgaaaagtgattttctaagttgtaaaaagtttcctataaaagttctctaagaaaaagggggatagccaggcagtggtggcgcacgcctttaatcccagcactcgggaggcagaggcaggtggatttctgagttcgaggccagcctggtctacagagtttgttccaggaaagccagggttatacagagaaaccctgtcttgagaaaccaaaaaaaaaaaaaaaaaaaaaaagggtgggggagggggataagggtatatctaaataaaaggggaaataatcagtaaaggggatctgggctaagaaaatcaggacaagaaaaaaattctttgtcctcagcacagatgtatatctctcagaatacatgatcacatggtaaaaagttcatcacaggtttacacataaattcaagtcaaaattgaataaggagtttacaacagagaatgtttacatgcatatccattaggagtaattatctggctaaacatttatcatttgtcccaagcttaacaggttcatggagagttgaaaactctttgtggccaaggtattagtgaaggtttgtatagataaacctagtcaatattttatcttctgtcctagcacctatagtatatcattagttccctttttatgacctttggttagtggttttgcaacctcttggaatttgctctgaatagtagatgcctgcctgcttgtatgacactaaagactagcagcattctcattgcaattttgattatctgagagaaactaatagcagtctcactataaaagaatataataattactaatataattttaggaattcttataggatcatcattaaggattcagaaatcagcaatttgtctatatagcatcactacaagacagtatgtttttgttgttctgcagagatctgctcaaacaggtgggctagtgactactaattattatgtaaatttaataacaggaaaagcatattaatagcaggaatctttcctaaaatgaatttttcctggaccttgcctactggggtaaatttgtcatagattttaatccaaggtggacccatctcaggaagatctcctgctagtttttagcttctcctatgatggctcctgacacagtatataagcaaatatgggcatcttagaagaactagttagtttgggagttgagttttatatgtaagcaaattagaacagcagagagaagtggttttaaagctaattagagaagccacggcaatagttcctagttatagttataagattgggaagactattaggaagccgaggagtctggatgtgatgatccataactagtaagctgctggtggtaagctgaagtcagctcttctgaggctggggaaaatccaggcagaatcctggctactgctgtcaagataagagggaatgggactaagaaattcagaacagaaataggagcagagggaatgtcagggttctgtaatataacagaacttacagaatgaatctgtatatataggaggatttgttagagccacttacaagctatggtatagcaaatccaacaatggctggctatgaacagaaattccaagaagtaagtagttgctctgttcatgaggctagatgtctcatgtggtcttcagcatagactagaatcctgaagaagtaggttctaatgccattgaaggaatgggcttgctagtaggtgagaacaagcccagagcacaagcttccttcttccttgaccttatgtaggcttccagcaggaggtgtggctcagattagtggtggggattctcagctcagaaaatctggattaagggtgtgtcttcccagtagtctagcaagactgtcctttcagagaatccactgaatagatgactcagacaaatgcctactcccacagccaaagagtagatggatcttgggaactcttacggaagaaagattcggaggaagggttgttctcccagaggggataggaactccacaggaagaccaacagagtcaactaacctaggcctccctgcacaaatgtagcagcatgtgcagcttggttttcatgtaagttccgagcaactgcagcgggggctattccaaaagctgttgcctggacatgggacatgttcttctagctgggctggccaccttgtctggtctggcctcagtgggatgaatgcaccgagcctccaagagacttgatatgccagggtagggagagagagagaaggattgtgggagagggtgaccgggatgggggacagtgagcaggacttaaagaagtggggaaaaaaaaaagtgtgttggtgtgtcttcctatctcaactggattagaacatcttcctgtttcaaattaagcaaaatctcctcacagctgtgccctccattgttgggttttagttaattgtagatgtagtcaagttggccatcacaggaaggaaatatatctgcagaaaaggttagttttacaaaatatcttgtagagaagagcttttaaaagatgattgagttctacttttgtaaagtagtagctgtattgttgaatgggttattcattgttggtgttggtctaagggtccatagaatggtgggaacggaaagcaaaaacttacttctttaaaagataatgaataaaggtgaccgtgggtgacgcaggaaaactgcctgagtgatgcccaggaaaccacaagcatggggctgagggaggattccatcaggatagaaatgctgaagggaactcaagccagaatgaagatggaactgaaaagcccaacaatccaactagaaagttcaaaggctctaggccaaacaatcaaggcgtatgaaaaaagtttcaacataggaacgggcacagaggcagtatgagacagcataacaaaaaacaagccctagaactttaggtggagatgagggagaagaatcctaagttcttcaacaagatcatcgaagaaaactttcccaaactaaagaaagacacccccacccagatacaagaaactctgaagaacaccaaatgtggaagaatgaaattagacccatatctatcacgtccttcaaaaactaactccagatagatcaaagacctaattaatatattccatattaataattacatattaattaatacatgcatattatatatactatatataaatatagtattatcacagatggtttcttttttcattaaaataagattgttttcatatacagttagtcattataagttgtaaaactcacaaattggttgcattcacaagatttttcaatcaccaccttgtcaagtttccaatctgtacatcacctcagaagataaccagtgtttattagtctccagcgcttggcaagcagcagtccactgtcttccacgatgctctctcctaatcttctcgccaactttcctcagcgtcctgtccgagatccctggacattagtcacaaagtcttaacttagtgtccttttttttttaaatttatttttagttttttaagtttctactggtagaggaagtgtctgttcatgtattttgctcacttttctgttggtttgttgttttcttgatgaatgtaataattctttttgtagataaggcccttgtcagatatatgacttaaaactgcttccccttactgtagactattaatttcttgataatgtaatttgatggaagcagattttaatgtgggtggagtccactgtgtattcttttgtatctcatgtctctgatgttgtatctaaaagtccatttgccagcattaagatcatgaagattgacactgcgattttcctgtatctgctttatagttttgagtctttaatctgttttgagttaggttttgtgtacagtgtgatgttgagtctctttgcattttgtatgttaatgttcagttttccaaacaccagtcattttaaaaggtagcttgctagttgggggatgtagcttagggatgagacctccaaaatagtgcagagtaagttgaatgtaggtgtataaggtgttttctgaactattagttccattgttttggtctgtatgtctgtcttgataccagtactacagtttagatatcacagctttgtactgggttttgaacccagaagtgtgaattctccaattctgttcttccttttcaatactgactcggctattctgagcctgttgtaatctcctatccatttctggatcagctctagaacttcaatgggtaatacttagtgtgcttgggtcgtactgatgtctgagcattgcatgcaagttcctaacaaaggacatcttttctttattggccagtcactcacacaggacatctttcttttactcagccagtccctaacatggggcaactctcctttactcagccccttcagttccctccttgtgttccacattcctcggcataagcgtttcttctttctctggccattcatgactagctttagaaagacttttttattcatgtatcttccagcatcggtaggttagtttatcatagtaggttttgatggattctgtaacagcaggtcttctgagactggatgcagcattatctcctttgcatctggatgccttgcatttcctgtgtagttgccttcaggattgtaagtaaatccctcccactcctggcttaagtaggagtttttgtttgaacctcctgagacagtgggcatgccaggtgccttgtagtatctgttgaggcgggtcacagacttttggttttcttcactttagcaaggcgctgtattatgtcagttgactttcgtacttcagaccacttagtgtcagtccagtagccattgtcagggcgtctatcctttaactgtgctgctggatttgattggtgagtgttttggttctgtttataccagacaggcactctgccactgaattgtaaacgcagtccagacttgctagtattttattggggttgatgtatgtatatatgtatatatttattcataagggatccccatccattgttttctcatgtttaaagttttaattactttgctgggaggttttgaaattttgatttgatattttgcttgttatagttttgtctgatctcttgggtcaattttgacagcttatatttctaataatttgtctactttttgtttgttacatgattttcttggtttcttttaactctttgaacatacttatggcatactgtgttgttcgtggctacagtgtattccacctgtgagtaggtcacactttcttatttctttggatgttttatactgttctttaggaaaggagagaatctgaacatgcaggtttctatctatagaagtccaggtctttatgtgtgacccatgtttatagcctcgtgtagcagatggttctctgcgtactacagttgtagtatggtgactgactggagtgggctgaccagatattgaattgatttctccaacttggggcatatcaagaggcagtgtgttaggaaagccgctctggaaaggcttgggtgtattgactcatttatcagtataactgccactcatcagaccaacagcggatggtgctgtacctgctgtgtggagctggctggagttggatctcaagccactggagtcagttctaatgtaacactgttggtgttaaacacaccatatgaagattcatatagaaaagcattgtaaagtagctttgtcatattttagattaattccatgctagaaatgataatatttttgacatatttattttaaagtactaaaagtatgttgtctgttccatttgagctttttacgtgtgaccatagaaaagttaaaataccagccatgccctgggctataccttggtaggagagccctgctctcgatggtgatctctgagctttgagtactcgagacttttcattatcagagtgattaggttctgtcttcacattgtaccttagtacaactactcatttggtagaaatcatactatttatgaatatctttagtttcttttccattttagtgtttttcaatagagaaggaatatttgttttggaattttgattcagtataatcattaataattatgatacaattatgtaaatattataatattataatattattcactaaagtggatctgattagtgctttcaagaaacttaagtagtggtattaaagccattgaatgtggaaaagtatatgttctttgtactttttgggaggctagtggacctgcttttcacagtccaaaaactttcaggcaattactgaccctattaaatctaaactggtaagtgccttttaatgaagagatccttttaaatggacagtttaaaaggcttcaaaataactatggcagggtttcatggcagagctgataagcgctcctataaaatctcatggctccttatttatgtgtgtataaatctgagctaccgaagaccattgtcatgttgtcagataaggagcacccactatgggtgatggtgtccagtctccatcactgagggcacagtgtctgctgtggtgccagggctacttctgactggacagcagcactgggtactgtcgttagtggtggagttgagagtgtgtcattagtcagtcgcagaactgcagtagagatgtgatagccaggattatatgtttagttttgtgacaaaatcatcaaatatttaattcaagtattaaaatactttttcccttttagaggccacagatagttatttatttaaaaaatactattcaagataaatagttcaaggaaaagtcacacatgaagttgaataacatttgccttggttgatgaaaacattctctattttttttaaaaatagaaagtgtattttaaaaaatagcatttttatagttatgtattttctatagatttttctatgtcagaaattttgatatagatagaatagtatttataggtactgatacagatagatacagatagagtggtatttggtactgttacataaatccaacgtgtccactgtagccataaaactgcttttcttatttgttcttgtggccatttttatagagcattttgtcaaagtccccatctgttttgtagaaacaggctttaatagaaaattaactaactgtatttgtaagtcaatacttgacactcttaattttctcagctctgacccacttcagagccatggtgtgcagttcctgttagagaattaattctgtctgtctgtctgtctatctatctatctatctatctatctatctatctatctatctaaagtgtttatatgttatacgtaatgcatatatacatgcgtataatgcatatgcaccttgaattcctttatccttggaaagctattcagtggccggctttaagtgtggcttctctttctattatactagcatttccattagatacaactcatccttttataagatctttaaaaatactcacgaatcagtataagtgtcttccacctgcctataaagctcatagggcatagcagttctgaactatcttgctttttcatcaggacaaacaagaatgtatccaaagcagagcaggaatttgggactacatgctggagctgagggtcacactagcacctgctgtgcctctaagtaggcgtgtcacctgagtcctcagttgcctttcctccagttcctagttcatttagttgatgatgtttcctaaacacaacacactgacattaatctgcacggagaaattcagtacctgagacaacattttaattgctttgtaagaatcatttggtacctgttttgctgaatgaagaatgataaatgctctgataaagaccagtgtaatcaaggtgtcacagatccgaaggagagcgggagagagtctgccacgtggggatggtattcaaatcagtggcaggaagtgaggacacagaacaagaaaaccacattcacccaatgttaatgaacagccatttggctggcacagtgactcagcaggtaaagatacttgccacacaagcgtggtgacctgagcttcattccagaatccatataaaatgtggatcgagagaccaaactctacagttagctgtcctctggcctccacatgtacaatgtgactctatcccagttgctgttgaagacacgagaaatactgtgagaggtgatactaatgagacctccctgatggagctaacatcatggcaggtgctgaatgcaggggagggttggcatttaggagcaactctggtgacagtgtgggtctgttggaagggaaaaccaagaagcctgatgataagacaaagtgatgggggctgggcagtagagagcagagggaagtcttaaaggcatttggaagtaaaatccgatcaaaactagacttgtaaacagtaacaaatgagcaaggaaaattcttgacatgctatgttatcaagcaaatgaaagcatattttcaagagagagacacttggccttgttctcactagtgaaggtcatagcagagatgccatggctgatgtttgggatataagcagagcactatatgcaggcaggttgcacacttcatacctctctctgccaagcttccctttcaaaataaggaagcttagtggagtggaaagtctgtgtggtctgagtcttgaaaagtcaagcttttcaggacaaagcaagactgatgttgcttctacagtaagacacacgctgaccttgaatcacacacgtgagctgcacatgattctagttggtgggtgcagcgtgtgctgctgtgcttgtgcattgtgccagtcaccaaggccaagggtgggcaggtggcagctttctgctgccaagcgacccttgagcatcactggcgggcactggagtaaatggtgggaggaagctgcacctgcgctcagagtttagacttggaacatgtaccgggcattgatatttatgtttatttctcttgtttgtgtggtatttcccacccgtgtgggtgaacatcctatgtgtggattggcttggcaaagctcagtctgagagatcgcagtcattcaaatcagaatgacggttacttcatctgtcttcagagacatcttggttatcccactttctgaggatgcctttcaggtgtggtggtaaatgtctgccgcaccagcactttgaaggtggaagcagaagagccatgagcttgaagctagcctggacgacatagactgtggctgcaggtgcaaaccagaggacttgcagcactgaggagagcggtgaacacaaagtcccatccctaactgagaagccatttgtaactgatgcctgctggagaggggagatgtgttttctccagatgagtttctgggtaaatcagtcacactccaggacaggctcacaccctaggtactcacactggggacaggctcacaccctaggtactcacactggggacaggctcacaccctaggtactcactctccgggacaggctcacaccctgggtactcacactccgggacaggctcacaccctgggtactcacactccaggacaggctcacaccctgggtactcacactccgggacaggctcacaccctgaggactcacactccgggacaggctcacaccgtgggcactcacactccgggacaggctcacaccctgggtactcacactccgggacaggctcacaccctgaggactcacactccgggacaggctcacaccctgaggactcacactccgggacaggctcacaccctgaggactcaggcagcacaaggctaactttgtggggtttggaggtgggtggatgggtaattttctttattaatttgatatttgtttggtttggtttttatgtaattggtgttttgttttgggaagggacagggacacaggaagagagataagaggcacaaggacatgaagttgtgtgggtagggagagaacctgaggagctggaggaagggcaaacatgatcaaaatatagtataagaaagaaatgcaaataagaaagaatactgacaaaagggagaagagaaaaataattcccttagagaaatgatcagtaatttgtcctgaggataaagtataattaatttcctttgctaaacatagcaagtacaaatggatgaactttttttgtgaagatgaaaagctgaattattttattttttaaagtttaaattcttggtggattttatttgcctactagaggataaatgaaagttgaaggggaaatcaaggcatatacatgacataaactttgtcctcctgtgtcactgagagccaggctgctgtaatgatgctcttgcatcaaaattttattctataaatactgggatgaaaaaccaaaagttgtattgccatttgagcactagtgccacatcttcatggaaactttttcttttgtaatttgttttcaaggtcggtgtggctgttaagcttgatgatacttttctggagcgtaactggaaaactcgctgggcaggcttaggacttgcctgtggcttatttccttccagctttcaggagccgctctttggaattagtgctgcctgcgagaggaagtctttttctggggtctttgttggggacaggaagactggagagttttgtcatggctgttgaagaaccctccgagctacagcagccactggagtaccatgctgcagacttcagggcacttcccgcacttctctggctttcccagtcccccatccagttccctcttcccactgtctgctgctttctgtcctccttacgtgagtgcccacctctgtgtggattgtgtttccttgacccattctgattctgatccttactctgcactgatctctgcctactgtcctcggaaggacatggctggcctatggtttcagtgtttgcatgagcttaggctcaccgtggtgagcacgtggggagtctagcctagtgaagatgacgagtgaaggtaattaggcatcctctaggagggagtgacagccccatgagattggcctgctagggctttctcagtcttttggcttcctgtcttgtcacatgatacctttcttccatttcatcctcattagatgccaaactgatacaactacactatcttgggcttttagccttcaacatggtgagctaataaacctgtagtgaatcgggtacccactttagagcatcctgtaatggcagcacagtgtgcactatgcagcacacactcatacagggagtgatctttctgagctcctgggactgtgctggaaaagaactctgttgagaaggactgtccccgactgtgtcgtctgccttccccagttctttacccttagcaacacttcgattctgacccaaattctgatccccagagtctcttaggcccttcttggatttcttgaacttatacttgtgctttttatcacaaacttagagtattgggggcatatcttggtcttcccttccatctctaactttgtatttcctgccttgaagtccttcagtccaacaaccattctattcatgcctgtcttgctaactgccttaacacagtgtttaatagtgacgttcatgtcagaaaaattcaacaaaatcaatagcaaacctgcatcatatcacactagataggctaatgctatcacatctgaatcacacaggatgttagcattatagctgcatgtgtcataactgtgttatttccttcctccctccctccctaccgcctgacacgcgcacacacacaaaaaacctcaattagccgagtttatatggtattttgtattttatatgagaaataaatgccaacatataagaaacagctgaatcattaaaaaaaaaaaaaaaaagactcattttcacctcctttacgagtggtgaagagattgtaagagctacaggaccaggaactcatctgagaagctgtgtcttctctgtgggacaggtaagctgccccgtgaaacctcaacagcatggctacctaagcaagacctgaacacacacacacacacacacacacacacacacacacacacaggaacagcaggtgacataccaacactgatgggagagatctcacaagccaccaccactagatgaagagttataggcacttaatggctgctaagagagggagaatcagacttcccacggatgagccccttaacctgtttatccagtaccaactgtcatccctaaagcatacacacacaagcagttaagtggactgcacgctgtatgaccgtagataaggttatgtggagggagacagtgggagacaggagcagggtaggactttaagggacagaagattaccagaggatattatgcgtatctaccaaatgtaatagtaaaagtcatttgtacaactagtaaatgaagatgtaaaggctttgtatgtgccttgtgtcctgttgttggcgagttcaagtcaacctcttagaaagacactgtttttaataacctagatcattatgttaggaaagcatttgagaagggtggttttgagtgatgttgtaaagcatcagggcccgttctgcttgggtgttttcatgtgaagtacctgcctcttagaaacagtgtctgcctgttaggaaacgctttagtttctagtctgagtacttccaaccactgtctctgttctcatcctggtgggacccaccagccagacccagagtctggaaaatgccctctgtcctaggcagtctatagagttaggctggattggagaaagtcagtgcacttaagccccgagagatcacctgtcagcctgcatctctgcagtatagatcataatctagactcttaataattgtgttcttaggtagcttcacgttttctcttaaattttgaaagactttaagttgtttgtgtagtcctctatggaaaactagattaagctacacatgatttcttaattcttcttaaaattgatcctgttcctaatgagagctccaggcaactttgttttaacaggatgcgtttctcatctgaaatgaaaatagcatctgacagcactccctgattgcctcagagtactctgtctcttggaattctccttggctcactttttcctccgcgaatttggttttaaacttcctctgctccatctcctttattctaaacttgtcagtttttcttgctagaaaacaaacaataacaacaacaaaaacccaatatcgtctttgctttcatcagatctataaagttaaaccaattttttgttcatctccaatatgctatgctgtggttaggaaggctcttttaaaatagatgtgtgagtgatttcaaatcaaaatatttttgttacagaagggtctcttttgtaagatgagtgatggcagatatagctgtgttcataatctgaatttaactaaaaacaaacaacaacaaaccctggaattttcaattaagtctgcatttcttaccttctgtcttacttttttcactttagttttacatgtgaagccacatgtgctggggagctttacccaacaacttgacataagctagtcttgcgtgggaagagtcttagtcatgggttatctgcatcaggctgcttggtgggggttaccttgttcgttcattgatgtcagaagacctagccagttgtggactgcaccagtctcttgttttaattttccatgaaaggaacataaacataccacatggttcagttttatctctgaattaacttcattttcaggtaatttatggcatcagatattaaatttgtgtttgaagtctttgaaatgactgttgatatatgttagtctcctgctgttgttatctgtaattagttgcaggttcattgttacacagctataaaaatggccgtgggaaagcattgggatgtaagctcaaagtgctcgtgtcacaaaatttgtgatttcatttttttatttattgtcattcattttcaatgtatttatttttcatttttctctaattaaggaaaacgtgtcatggaggtagacagagtcctgggttctgtgacagtttgacatttacacagatttttttttttcagatgaatgttaattgaaggtgatataaaatttggtttaagacagttggaagaaaacagtcctttaacaaagtcttgctgctacatgatgccccttttacaactgtgattttcttgtgttctgtcaactataaagtgagattccatggagggaataccaggacttccgggctgtgctcatttccgttgtggcaggaaggttagccttttgaaagcaggtacaaatgaacctttctccggagttcttttcccttcatctgaggttatctcttaatcccagcatttttctgcgcttgctaaatggctcaaatatatattttatttatttgggtgtgccagaggcaaaagacagggtggtgttgctaatagatgctcagaataggctctttactctcatgtaacttcattacagaatagggaagttgactgaaggtaagccattgcctctctatgctggtctagagcaacttagctcagttttcctgttggattcacggcagtattagtgctgtgtctgtgtaaatagaggatgtgaaaataagtctgaagagtgtatttgattgctttatgactccataatcagattactagattcatagttacaggtttgttttttttttaaagaccttgcaatatgaaatgctgacagtaagcatcaaagtcaaaataccagattctattctcatcttgtcaaatcaatgttattaaaagccacgggtggcaggtcagaaagctcactcgctatcacttgccatctgtgttttaatgctgagctgcaccacttctggataatctcagcatcattgtgctgtctgggctgcaggagcacagcacgctacgtgattatttattgagtttcttctttggaatggagattatgagaaggccaacagctgtggccgcagtggcttagaagaaacttaacatgttttgtctcttctctccnnnnnnnnnnnnnnnnnnnnnnnnnnnnnnnnnnnnnnnnnnnnnnnnnnnnnnnnnnnnnnnnnnnnnnnnnnnnnnnnnnnnnnnnnnnnnnnnnnnnnnnnnnnnnnnnnnnnnnnnnnnnnnnnnnnnnnnnnnnnnnnnnnnnnnnnnnnnnnnnnnnnnnnnnnnnnnnnnnnnnnnnnnnnnnnnnnnnnnnnnnnnnnnnnnnnnnnnnnnnnnnnnnnnnnnnnnnnnnnnnnnnnnnnnnnnnnnnnnnnnnnnnnnnnnnnnnnnnnnnnnnnnnnnnnnnnnnnnnnnnnnnnnnnnnnnnnnnnnnnnnnnnnnnnnnnnnnnnnnnnnncccctccccctcccctctcctcttcttctcttttctttcttcctttttttttccccattcattctagattttggatttggtaaaggggaatcattaccaagtagcctgtcagaagtacttcgagatgacacataatgtaagtaaattgtttaactttatagattggttgtatgtggcttgttgctctgtgttttgtttggtgcttttatcatggcatggtgttacttaaaaggtttataaaagggccaaacaactaagatggaccataccagaaaaccagaaatactatgtggaagatgtgtcataagacgacctgaccacactagagctgtacccaccgctccacatctaggttcaaggttgttaaggttttttgtgaagagacagattggaaaacctttaggctttatgatgtctatcacaactagtcaactgtgccacaacattgcaaaagctatcatagaaaatacatgtcatagctgagaacatatagaagtttgtccttaacagcagttttcagtctgtgggtcatgacccctgtggggttgaataaccctttcacaggggttgccaaagacaattgaaacacacagttatttatgcttcataacagtagcaaaattataaagtagcaatgaaaataattttatggttggaggccaccacaacatgaggaactggattaacaggtcttggcattaggaaggttaagaaccactgatctataaagagggccagagctgactcagaggtcttagtctgccaagtcttcaacacggttagatctggaaccttagctattcctgtccagaagaaccaatggcactcttctcaaagaaagtctgatatattgtggctgctgcttaatagtcatctggtctgcttccctggtctcctgtgtttgtacgtacaaccatgtagctgcaaaggagtcaagaaacaggatgatgatcttgcctgcctccttagtactgaaagtcctgagggtaatgtagatgagcactgagcgcttctggcggacacagtggggcttgaaatctggaaagcaagaagcacaggctcgagaggcctgcaagtggtacaccggagaatgtatgccctgctacagcattcacgtggacaaaatccacagctctatgcaagccaacaggaaacatgtctagcacaaattcagcccgctgggtccctcattcacagccgataatttggacatggattccacatggattccaaacccaggacacacatctaagtgtaccgtaggctttggaggtccatgcacctcctgaaatagcttgtcactgaatcctgatgtgcactgttgtggatagtggtgtcctgagcccttccctgcccccagaaaggtgctgtttttgttgagcccattatcagatactgtgctagattttatattcatgttttctattaagctgtcaaaagatttttaaaaaaattctcttatataaattgctgaatttataagtgttcataggaaaattgtcttatcaataaatgataaataatatgagtctacgtttgtggaacccttaatccatactacgcatatcactaagttctttgagccctccagccaggcactaatgtaacacattgatgaacacagcatagagaagcagaacagcccagggaagttcttgttggaatggaacatggatttgaacctgtgctatctaagtcagtaaaggtctgattgccttgccatgctctatttctgatactagagttgaaggaaatctggaggttattcctgacaggaaaatgctaaacactgaggcacattcaaggttagcagatctaactcatatactatggcttatgtatgggaaactgtgattccaaatgactcactccacctgtctccattgaccaaaggaacaggtagagctagagattggcccgctgtgaatcctatcttctacatctaataggaaaatattacctttggtgaaaacaccgtatttttataaaatttgaagtatttattgtaagcaataacaaggtttctttagcttgatcatgacaggacccacatagcatcccgtgtctgggcttctcagcaccagccttgaatacctgctcagcgagcacttctggggtggtcccgggtcagcaccagccttgaatgccctgctcagtgagcacttctggggtggtcccgggtcagcaccagccttgaatgccctgctcagcgagcacttctggggtggtcccgggtcagcaccaaccttgaatgccctgctccctgagcatctgtgtggcaggtcctgggaagatgggaacaaatgtgtatttacctaaacagggaccaaccacagaccaaggtgtagatactgtcgaagtccaacttggtgaaccagtgagttttattacacaggaatatgggtgaaggttacttacaaaagcagaaattactcaaagaacagcatcatcaaactccaccccagcatgaataaaaacttaggaaatctggagcatactgtacaacctgcaggcactcagcagttatgagtgtccttcccaggtgacacatttgctctcagccttttttaggtcccttgtctggtcttgacttcctctggtcagcttagcttacctgcttcttccagaaatgtcagcttctctgagagtttctgagcagtgctaacagcctatctgtgactagagagggagagaacccagtgaatctgcaatctcaggaatttcctgacgcttattgaatcatttacttcctgagtttaaggagcttccctgcagggtggcatagttcatcccttttaacatgtgtgtctcaaggagctttcccttagaacatccggtcgtgtgtcatacccccccccacacacacacacacacgcgcgcacttgcgcgcgcacacacacacacacacatttttgcatcctttttctcacaggtttccttcccaaatggaatattttaacctcagaggagactacttcatgttagaacctagtgtcttgcttagcttgcttagcttgaaacttttaacttcataatatgctctccatcatttgtgaaccttttaagtaaaaagcctccaaactttcaggtttgagatcctcttatctttaatttttaaaaataagttaggtttaagattgagttatactaaattatcccctccttttctgtgttttgttttgttactacagcttggacaggcctcagttgttatatagcccaagcatgaccttgagttcctcatcccctgcctcggccttctgagcactggggtaataagcaagcgctgtactgagtgagtcacggcccagctcaccgagttcttaaacatggccagtgcaacgagggctactacaattgcctgtttcaaaatctgccctagtttactgaagatgtgcatcgaaatcctttccgatctagaaatagggtagcttagactgtgtgaaaaccaatgaaacaaggttgtggggattctctagatcgattactatagatttttaaatgcaaatacctccatttattatctttagagtataaaaatagaatcttttttattactcacttcctgccatcccatctccctcccctgtaaacctctgggctcattttccccaggtctctgtgatgaaattcacttaagtgcaagttttgaaaatgaactccttaattggtaccatttgtagcagccctgtgatagctccatatggctctgtggtaacaccagctgcctcattacaagctgtcatctcaaaacctcttgattaaaacccagatatcccataggtaggcagcattgctcccactcttcccttctgcgtttgccggggcacacatacgagacccattaatgtggaggtcattgtgtggaatatgttgattcctccagtggctgtcaaaagctgacctcatgaaagctgtctgcctcagtggttttcggttttgtatttcatgtgcaatggtgttttgctgacatgcgtgtctgtgtgagggtctctgaaactggagttgtggatggttgtgaggtgccatggtgggtgctgggaattgaacccgagtcctctggaagagcagcctgtgctcttaccactgaactgtctctccagctcccaaggagtggtattcaagacagttgcatgttgctgcctcatgtcatttgcattcctgtaagctttgtaagtggaaacatcaggccttatataggttaatctctgaatcttaacttaaattggcttctttagagattgatccctttgaatattgactggaggtatattttccaaactgtagagctcagcttcttcaccatcatataaattgctacaaaagtcttgtgaaaacctatcacgttttcttaaagccacaccaccatctcccatttagaaccccatcgtagcttcctaagacatttctcagagtctacacatgcctcattccatttcttccttcttcacacagcagggagtgatatttacactaatggaatttgattatttcattaacctgctttaaagacctctctgtggatttccatttctctgaagatgaaatttgaagtttataatgggttttattaaacactgtcctggttcttactagttctgtggaccctccaggttaatcagttacatgctttatatctgagaccacttcctccaaaggcccatgtacagcccacagtagggcctttaggggtgggatctagtggaaggaagttaggtcatggagatgatgtgctgggatgttggccattgctctccacgctcccattgtatgatctactgcctcagtgcaggcagcatcggacaagggaccatgtatagaaatcccagaactctgagcagcaataacctttccccctttacagatggtttgagtattttatcacagcaacacaaggtgcataaagatgaaaaggcaccacagtgtgtctctctcctgataccaaaacataattcagaatcatctacaaagaaaccatcaccatctgtagcagtcggtgaggaaggggaagcagaagcagcaggggatttgtgtacgatagtgatgtgtttccacatcatggctcaggggttcccaagaacggagggaatcaaacagagttgtatctgtattttttgttgagtaataaagaaaatggcaattgcaaaaagaggaatttggatagtgtcctttccacaggttgactttaaagagtgcttactatcattttggtgtgatttccatttgtcccctttccataacaagcacaccaagtttatttttctgagcaagaaaaaagactacatggacccgtattcttcaatacaaaagggagacagggttcacccagaagtgcagtagagtcagaacattaatcacaccaacaagcagcttccagaccacaggtttagcaaactgagttagggctgtgtgtggttgagagagaaagccagaaacaccacccagaccatggcagcagctggtctcaaacccctgggccctgctgcaaacggttagtaaaggtattaaagtggaaattcataaaagtacaggacttaaatatatttaaaggtaagtcacttaactctccttcctttgtcaatcctgtgatgtaaaaagcaaggagctgttgagtatagtctgtggttaaattcaattccatctctctttcatacctgtaatatgcaagcaacagtttctaggttgggtttctttaaagtgggaagaaaaggtgtaaccgtgacttttttcttctgggaactctactgcattttaattgatttatctttcttgactcttaaaacatgtgacttggattccatagaaccacaactcttaaactttatattccattagtttaccccataacaagccaatgtcatagcaccgttattacacccatttcacagatgagagagtgaggcttagaaaggttattgtgagaggcaggcctggtgtacaaagtgagttccaagacagccagggctacacagagaaaccctgtctcaaaaaacaaaaacaacaaaaaccaaaaacaacaatgaaaggttattgtgttttgtcttgctcaccatgaattctgagacttcggtttagttccgttatcatctgcagttatggctgtattgaatactttaacagcttaaaggaaagtgttgaaaaatccctcatattacaaaaagaaagaaaatcccccttatattactattttgccaggtattagatgacttttgtgagatttttcttttgtacaggctttgtaaaaacaatctttaatggggcctggagagagctcagtggttcagagcattctggtgattcttgaagagacccaggtttggtccgcagcacaactctccgtaactccagttctggggaatccgggatccttttctggggacatttgcatacatgcaaacagaacacttgtgcgaatacataaaagaaagaaagcttttaaaaataatatttaaagccaagttttataaaactttgccagtgtatttgactttgcataaagccttttaatatcagaatataagtactctagtcaaaaggcctcagttccatatgtttgtttaattccatcagtgtgtagtcctgtgtatagtaggacattttcaatgtgttgtgtgttgcgcacccctccccccattcttaccctcttgttaggccctttgttcctttcaacagtttcatgtttcctttcataccataaacacatacacgattttaatgtgtgtgtaaagtctgggaaccacaaacaagggaaaagagaatgttcatctttctcagactgccataaattccttactaggattatctccagtttccatttttctgcaaacaacataacttcattcatggtgcacacaaatattccattgtatgtatgtaccacgttttcttttatccattccttggttgccagatggctaggctggttcataacttacctattgtgaatagggctacagtaaacagtgatgtacagatatttctaagatacattgacctcggtaaatacccatgagtggtgtagctggagatacgttttcattcatataaatccagttactagcttgataactgagtaagctatttactctctgtaggcattagtttgccagactatacattgaggaggttcagtttaaaggaattgtagtgtcctcatggtctctgattttctgtacataaaatgtgacactttgtgattgaaatgtttgaacttcttatgaaacacatcagctctttcaggagctaaaggaaatcagatataataaagaagttcatgaattatggtattgttaataaaattataaatttatcatagagcatcgaggaaacacttagaagttaagcagcctcctcgttaaaaagataaagattgctttcttggtgatctgggtaaaactatatatatatatatatatatatatcttagaactgtctataaagaacccatcacttcacaccacaacctaactaaaatgcctggccgccatttatttagctgctaaagcagcctggagctcctccccaggaggtgctctttttctgtcatcctctactgactgaggatgagcagtcttagctctttctccctccccgtccacattaacgcaccagacattctgtgtagatctgatcacacccactcctccttagggactcgtacagttccaactcccttaggcctagagagttatgcaaaacagaccttgactttccaggacctctgaggtgtgctccccaccagtctgtctaacctatcatggcttctatcatgagctttttacaccaggccatggaagtaaggcacttgctccccaggcgtcccctccacggcttctgcagcctctgcaccacctgcctccccctccaggctttcgccttctccctctccctctctgtctacccagccccagctcaaacccttgctcacaaaaccttctcccctccacctcgcaagagtgacaggcatttatctgtggctcctacaattcctatttctgaaaatgatgtttcagctaggaattacaaggctgtggttttctttagctttagttttagtcaagtgcattctcatgttctgaaaaactactgcttataacacagccatgtatataataagccatgtgtatagtaagatgtgaagtatatgactgaatgttctgggctcaactcagtaaatattcattagatacctgctatatacaagtgagttcaagacaaagagttgggtgttaaaagctgaaacatggggccacagacctgtggtctcagctactcaggaaactaaaacaggagaattacaaattcaaggccagcaaggctcacacagccaaagaatagatacaaacactgtctttaacaaataagtaaataaatagtaagataaataagacatagtataatggtttctgggctaaaaatagcaaatgaaaatcccacatttataaccaagcaaagctggagcctagtggtggctgttgtcacctgtaactgcagacaggaatgttgggcttcacttcaggttgtgtgtcacatagcagcagtccaacccattaactgagctgaagaaagtgacttaagggtcacattttaggtagaagtctccgttatattatgccacacactgaatataaaagcctcctcagttttcaggagtaaatgctgtatatgtttgcaatcctttctttcaccttggctcaaggacagtcatacagatcgtagctccatccttgggcaagatccttctcagttgtgttacctaaaaaccctgaagaccattggtactttagctgagtgcatggagtagaatgtggttatgtcacctggcacacagtgggtgggcagtaaacatggagtagaatgtggttatgtcacctggcacacagtaggtgggcagtaaaaacttgctgataataagatgtttttgttcatcattggtaaattttaggatcaaaatcagaataatactgcttgcccctccattcttttgattgctaaaggcacagagtaatgagaagaaatacgagctaatcctcaaggttcagtgtttgaggaagagaaatagcataagctcttaggttcccactaggtttaaagagatttttctacaccaggatggattacaggatgcccccagttaacatgaagaggttctgttaagtaggcttgcttgttcagcctgttcattataccaaacgagattccgtatgccagacttaagctttgaaatacactggtgccagggaccagaatcaaaatagtcaaagtgattttaatagtacttcaaaaaagcttggcccgagatgtgctaagcctcttgctaaggcctagggatgcagtaacgtgtgcaccaccaatgactattgtaacacagagacttgcccaggtatgtttcccagactcttactgtcgggcggggagccagagcccaggtggtacacatgctagagaagggccccaccactgagctgcacttccagccagccttgtgcagtgttatattttattctgagtattcatcagcagacactggaattgagagtgcacaggatgccgagggctgagtggccatccacaatgttgcagctcaattactgtgagcggaggtgggaagcagtgcgtttgatgcatgtttgagctgtgttgagtcatctattctgttgagtaggtagtgacaggagtcaaagccagctgcagaggtgtggcctgagcatacacaggtactagccatgatgctgtgggatcttcagcagaagctccgctgcgtggggtaaggagtaggagcagctgagctcacaggtcttcagctgtaagatggggtggggacagcactgaaagctatatttctatctctgctgtgtgctaacatggtacaaatttgcttccttgggcaggtggacgattgtggcttttctttgaatcatccaaatcagttcttttttgagagccagcgcatcctaactggtggcaaagatatcaagaaggaaatcagtcagccagaaacacctcagcacaaacctagcacccagaagaccagggatgctgcatctgcgctggcctccctagactcctccctggaaatggacctggaggggctggaagagtacttttagtaaatgatgtggccactgtagtatctcctttcccccagcgaatacattcctgtttgaaaggtttacaaaggcacacccatgcacacacacacatttactgggaagcaggcttgcttccaccttacttttgacagaatgggaaaggaagcattcctattgaaactgttaaaatcctcaagcagcaagacaattaaaactaacttttaaagttttgtataatgttggccaagtcctcttttggattgtttttgctaataaacaacatgtatatgactatatctgtgcaagtgggagtcttatttcacagtggatcaggtattatttctttgtttgaaataaatgctcatcgctgtcaatcgatatgggggcagagggagccctgagagagtgtgtactgttgacatgggcaaggccttgctaggacaccaaggcctgagacttctgggatcggcaaagcctttctattatctgggtgggaatgctgacagtgttttgcaaaaccaaccaaccaaccaaccaaccaaccaaccaaccaaccgcagcttcctcctcccggtgcctgcagcctagcactgcaaccccacagacggccttctgagattagctcagctgtctcctcgatgcacgtgtaaaaagcacaccgagtttctggttgctgctgctgctggtcacttcatcagagcaagcacggcctatgcagtcccctgtctgctgcagatgtgtctgtgttctgtcctgtcttcattccaccattgtcccggtctaatgaagattagacacttttcctttttttccttttttgattaccagctaggagaagttctggtccccgtgagtggcagcagactccctgaaatgaacagtgacttgagaagcagacactgtagctgttcatttaagagacaggctgttaaatggtgctctccatctctgtcattctcctcctgcttcttactgaagaaaggaggtttggtaattctgaagcatgaattaccaaatagtttggcgactcgtgttcctttcaggacaagcagtggagctgagactgtagagaacggaatgctttggatggagagaatattagtccatttcagacactgtggttagaaaagagagtgatacggtttcagtcttacgatgtgtcaaaggtttcttagaatatttagtcacacatttaaatgagaggccaactgagcaattgattggttttgtgaatgttacttcctacttcagaaatcagccttactttactgtaaatgactgctcttccatggaagcctctgctgctccatcatccttagacttctcaacaggaatcagattggagtctatcattgtaaactccgcatctgtctgtctgtctctctctttttctttctcttactgttcttactgtttttggacaccaatgacaaggcagtgaaataatagtgctaataggattttcagttcaccgtcatagaataatgaaactctttaatgttttcccttattttccccttacactggaggcttggaaagaaggtaaagtcagcacacaacgcatttacgactcttcataatagggaaatgaatcagcacgcatttccccactacctctattcacatggtatatttagttttagcctgcacatgagccatagaaggtagcaaaattgcttatcaaaaaagacatcataggggctggagagatggcttagaggttaagagctctggctgctcttccagaggacctgagttcagttcccagaatccccatggtggcttacaaccatctgtaatgggatctgatgcccttttctgccatgcaggcatacatgcagatagagcagtcatatacacaaataaataaacctttaaagcaaaaggacattgcaatgcacatttctctttgatcatccctttttactgattcaatacttatttaatatttttgtaccacccttaacttttggttttttgtagagttcctgcctggtccttaagtcactctgccagtctctgtgagtgaatccatccatccatccactcccatggtatccacttccaatatatatgcaaatggttcccatgccttacctcctatgaaatctctcctcaaagcacagaccagtccatacctgctacatagctttactagatccgacatgcaacttatacttaatgtatctaaaatcaaccctgtttttttttcttcctacatctgctttttttttttttatctctccctatgtcaccagacatctaagtcctcctgagattctgttttaatattagaactgttttaatgtctaaaccagtgggtctcacttgggggcagctttgccttgggagttatttggtaatgtacaaaacatttttggtatttctaactagcagggacttaggggatagagactaaggagcctgccaagcatcctacaagataatactccacaacaacgagcgtgtctggccccaaaccgtagctgtaatatgactgagaatccctaatctaaggtttcctttcttcctttcctacattgaactgcattaaactctccttaccattgttagcattaagtgctaggattatcacatcatactgtgagcttagtacaattctaattattaggatttgaaatatgaacacacacacacagaggcatttactatacgtaggttttatagtccgatgaaggggaacataatagatgattgatcttctaagtatgataatgatgacacatgagatggttgaatatgacatcgtcttacatctgaacctggtcccctttccatatctttccttaaaatttaacctaagcacttctttccatgactctatcacatacatcagggaatatgattgctttatgtgagtctttccttgataattttcactgtctctctggttccatattgtctctcctcattctgggccttccaaatcagcctccttggtacccacagtgctttacgccctctaatcccatgtggactccatgtcacatgttagccaactgacatatgttatagataatgtgtgtattcatcttcacatgtgaatccctaatgaatacatcttgtaggcagatgcttgactacctcaggcactcagtaagcatgtaaataaatcattgcttgcttgttatcccacaggaatctcaaattctgtgttttaaaacctacaagtaaaattggattgtggactgtagagatatggctcagtgttcttgagtttgtacagcacctactttgggtgtctcataagggctgtcacgcaagctgcatctccaatgccttctttgacccctgggcaccacacacacatgtacaaacccacactcagacatcattacgtccataattcttaaaaatacagactgaaggaaaggccatccagagacttgccccacctagggattcatcccatctgcaaacaccaaacccccatacgaatgctgatgccaagaagcgcttgctgacaggagttgtatctggcttttccctaagaggttctaccagtgcctgactaatacaaatgctgatacagccaaccattagactgagcccagggaccccaatggaaaagtccccttcccaaggggaaggactgaaggagctaaaggggactgcaaccccataggaagaacaatatcaactaactggaccagccagagctcccaaggactaaaccaccaaccagagtacatatggagggagccaggactccagatacctatgtagcagaggatggcctatctgacatcagtgggaggggagggaggcctgataccccagcatagggggatgctacaggggtgaggtgggtgaatggatggaggagcatagtcatggaggcaaaggggaggagggagggggaataggaaggatgggatggggggttgtggaggggtaaccaggaagggggatatccattttagatgtaagtgaataaaatgattaataaaaaaataatgaactttgactcctgagaaaaaccatcattagccatgatcttgtcaattttcccagtttcctgagcttccttgctttacctgtgaaatgggtataataatcgcacctattttaagtatcgttaattaagtgctatcacgtgcacaacacagaattctggcaagtggaaacagtaattgctaaggtgctgtaatttgatgttaatcccttttaagaaacaccacacatggctcctccctgttttgagtaggtatcctgtgaaacctcttcaggtgagaactgttcacagggtacttactggctgttcttaaatggagggacggaggtgacaagaatgtctgtgctgagaaagcagctgtacatttttcttggggctctcatggacacatgactttcgagagaaagtgatgcctacctatgtggtaccctagtttccaaggacttaaatggcaaaggagtttgaaacagggtctcatcatatcacccagctgatcttaaactggtggtcagcatctgggatactgagttatagatatatgcccccaggcccaggcttaaagagtgcttcccagtagatttccatcttggcacttccgcaacagactaagaagagtagacatctggattttcccgaaaaaaggagattctgggagacaactcgtatagactgactatagatgtactgactcctggcctggacattttcccctatgcttgagtttcacattggggcctccacctacctgccttggccaagaagctcaactgtgcctcagtgagaccaagtctttgctattatcttggggaagttacttgagcttcttgcttagctttttcagttgagagcattacctaaatcatagaacatccaaagcttcttatgttgaacttgattcatggtaagttcaaaaacaaacaaacaaaataaacaaaaacattgttagctattcttttagaagaaacctactaaattttgtttgcaggactatctaaataaagttttcaaactgcagtgaatatttttgtggatcagagtcatgttttagtttaagaaacataataatttgttcccaaaatgaaaacactataacccttagcccttcagttaaggagttcccggtgccaggcttcctaatttagtctttgacatcatcagagacagactgagaagtgtagaagcagatgcagcatacaaagacatggtaaatagggtcataccttgtgtgcttgtttctcaaacgtagttgacatcatcccctgctggactcaggaatgtgtgctattcccttgtctacactgtggcatctctcctatccttgcagctcagttcttcctggactaggctgtgaaatgcatcaagacagttggaatggagaatgactcatgccttgttgaggagaaccagccagcttgcaaaggtgtcaatggtcgtttaaaacgcagtcagtgaaaatgaaaatatccacagattcccaccatttgcattagatgaatacagtcttggaagtccttgggtgctcccttctttcaagactgacaacagacacttgtccaacctctaaaccaatgaagtgaatattttatgttggggatcccgctatctctcttgtaactactcaagtctatttttataatgaaaagcagccatgtacaatatgtggacaaattaatgtgactgttttgagtatgaaacaggccagatttgacctgtgagaaacagtttgtcaatgtgtaacctagacgaagagaaaaatatttgaagaataagaattaatggaagtgactaaatcttgtgtgtgtgatatatatatgtgtgtctacatacatacatatatgtgtatatatgtatatgtgtgtgtatatgtatatatatatatatattcagaatggaatgcatgacttaataccttccttcaagaaatagatccagtccaatggatctatttttcactggcaagtcctgtccaatgttgaaacaaattaagaccagttttatacaaaacaggaaagtaatgactagaaattccccacatacgttctgaagcccgcattgccctgcaactaaaaccagacaagaaaagaaaatgataggccagtatctcttaaatatagatgcaacaatccttaccaaatgaacaataaattcatgaccaaatggggtctattgaaggattgtaaggttggtttaatatgcatatatccatgtagcttaccatgttaacaaagagggaaacatcatttagtagagaataagcatttgacaaaataacatctgtccgtacattctagaggagatacaatattaaatggtagaagataatcaccgggacacacattctcactatttctcttcaatgttgtgctaagagttttaattattgtaatgaggtaccttagttaggattttattgctgtcaagagacatcatgaccacaacaactcttgtaaagaaaaacatttaattgtggctggattacagttcacaggtttagtctgttttcttaatgccaggaaatatggtgtcttagttacggttttattgttgtgaagagacaccatggccatgacaattcttataaaggacaacatttaattggggctagcttacagtttagtccattatcattatgtggaaaacatgacatcatccaggcagacgtgatgctggagctgagggttctacatcttgatctgcagacagcaggaagagaagtggcttgagtttctgaaacctcaaagcctaccccctagggacacacttcctccacaaaggccatacatactacaataaggccacaactcctaatcgtactactccctgtgggacaagcagtcaatcactcgagtctagggaggccattcctattcagtctactacatgaggcaagaaggagagcaaattgtccagtcaaaaaagatcagcctgtttcgtcactttggcatgactgtatcattagaacatcttactcagtctttggaatgaatcagtaaataaatatagtagggtccaaggaggcccagataaacattactagcagtcatcaaaagttgaaaattttataaatatcattatgatagcttctaagtcatggaacacatcaagtaaatttaacataatatgtaagacctatgcaccatgtacttcaacacacagctgaaagaaaagcgagattaagatggcttcgggcttaaaccatcctgagacagcctctccagaaatgtcgatgcatacagctgttaacacaaccaacttcccgaaagccaagggaactgggtgaaagcacagtacttgggtttcagcaaacttaaagctgaagtggaggaggcaggaaagaaagggttgttgcctttgcaactgctttctttaagcagagtgtttcacagaaagagatgtctcctcctctgggaaaagacagataattaactgcaggacttagtcctgagcacatgatgtatattcccaggctgtaaatggcgcctctgcaataggcgcattaacctcatgtctcagaacccgtcactcaacctcaaacagcatcaagttgagaaagaatccaagcactgggctattataagtcagagaaataagcacagaatttggccttgaaactcagtgctaggcctactacggtgaaacccagcatttagcagagtctaatgtcttttgccctgggccagtgttcatacatgaggcccctaaacctgatctggtttcacatggagcccaaacggacatttgtcttctcactagtgttgtctctaggcagccacatggtcttcaccatgaacatacctgatcaccaggcacgcagaacagtgtggactctgttgctgctggggagctgcctgggtctgtgagccctacatgtaattcagcctcatagttctgaggccaaataatgatgcagattcccccagtgcctgaccaaggctgttgactgtagactggtagggtaggcagaggtttgcaggggatggatactaaaggtatgttcagaacctatcccaagaggcaaaggtttagttatgagaaataactctctaaggccaaaacagtgagcacaatgaccaggttcagtgcaaatcccatttggggagtccactaaatgagatatcagcagtggacacaggctcagaaaaacaaacaaacaaacaaacaaacaaactgtttagaatttctggaaggatgggtaaaaataagtaaacgatcatgagtgtatttccagcactggtgaatttaagatcacagggccagtctgggctacatactgagatcctgtttcagaaatgcaacaaaagcaaaaacgcagtccagattgggcaggctggaatgcacaggtttcaccacctggtaccaagcacctcgaacttccaaggagctcatcatctaaagggcaaagggaaagctcaggcattgaacagtcgacatatgttttagaagacaagatagacttttataaacaggaaaaaattcaattataatggaacttaacaaaggagatgggtgcaacttgcaaaaaaaaaattggggttcccggatcccaccgagtatagtctgtgcaggtgagagtgtggactgcagaagctaacagcttctgggacaggcagaagccacagtgctactgaggcagccccgtttcggggtccagatatttgggcacctactctgccagaggagaggtgtctgccccgcccaggaggtctttgctggaatatctgggggagccatcttggttccgggatcccacggagactagtctactcaggtgagagtgtggattacagaagctaacagcttctgggacaggccctgttttgggccttcatcttgtgccaggaggcagatctgaatgccaggagagcttgcctgcagagagtgctctaaccactgaaactcaggagagagctagtctcccaggacagctgctagaagctaacagaattacaagaggaacaatctctaaccagagacaactataacaactaactccagagactaccagatggcaaaaggcaaatgtaagaacttactaacagaaaccaagaccactcaccattatcagaatccagcacttccacctcagccagtcctgggtaccccgacacacccgaaaagctagacccgaatttaaaagcatatctcataatgatggtagaagacatcaagaaggactttaataagtcacttaaagaaatacaggagaacactgctaaagagttacaagtccttaaagaaatacaggaaaacacaaccaaaccggtagaagtccttaaagaaatacaggaaaacacatccaaacaggtgatggaaatggacaaaaccatacaaaaccttaaaagggaagtagacacaataaagaaaacccaaagtgaggcaacgctggagacagaaaccctaggaaagaaatctggaaccatagatgcgagcatcagcaacagaatacaagagatggaagagagaatcttaggtgcagaagattccatagagagcatcgccacaacaatcaaagaaaatgcaaaatgcaaaaagatcttaaatcaaaacatccaggaaatccaggacacaatgcgaagaccaaacctacggataataggagtagatgagaatgataattttcaacttaaagagccagcaaatatcttcaacaaaattatagaagaaaacctcccaaacctaaagaaagagatgcccatgaacatacaagaagcctacagaactccaaatagactggaccagaaaagaaattcctcccaacacataataatcagaacaacaaatgcactgaagaaaaatagaatattaaaagcagtaagggaaaaaggtcaagtaacatataaaggcaagccaatcagaattacaccagatttttcaccagagactatgaaagccagaagattctgaacagatgttatacagaccctaagagaacacaaattccagcccaggctactatacccagccaaacttccaattaccatagatggagaaaccaaagtattccatgacaaaagcaaattcacatattatctttccatgaatccagcctttcaaaggataataacagaaaaaaaccaatacaaggagggaaatgatgccctagaaaaagcaagaaagtaatccttcaacaaacataaaagaagacagccacaagaacagaatgccaactctaacaacaaaaataataggaagcaacaactacttttccttaatatctcttaatatcaatggactcaattccccaataaaaagacatagactaacagactgactacacgaacaggacccaacatttgctgcttaaaggaaacccatct

SEQ ID NO: 568 - DNA, 1937 bp, Mus musculus
gagcggctgtcagcgcgggtgtttctttcagcctggctgctggctggttaaacaatctactgcggctttatttgggacggagagaagccgtggagttggaagcttgtgagctgacctggtgggaccgagtgacaggtggtcaagatgcagttctcaggaaggatccggaagaagctgcgattggcgggtgaccagagaaatgctagttaccctcacagccttcagttttacctgcagccgcctactgaaaacatatcgttgacggagtttgaaaacttggcttttgacagagttaaattgcttaaagcaattgagaacctcggtgtgagctatgtgaaaggaaccgaacaataccagagtaaattggaggccgagattcgaaagctcaagttttcctacagagagaacctggaggatgagtatgagccacggcgaagggaccacatctcccactttatcctacgcctcgcgtactgccagtcggaagatcttagacgatggtttattcaacaagaaatggatctgcttcggtttcgattcagtattttaccaaaggataaagtccagagtttcttgaaggatagtcatttgcattttgaggctatcagtgacgaggagaagacccttcgggaacaggatatcatggcgtcctctccaagcctaagtgggatcaagttggagtcagagtcagtttataaggtcccctttgctgatgctctggacctgttcagaggaaggaaagtctacttggaagatggctttgcttatgtgccacttaaggacatcgtggccattatcttgaacgagtttagagccacgctgtctaaggctttggcactaacggccaggtcgctgcctgctgtgcagtccgatgaacgacttcagcctctgctcaaccacctcagtcattcttacactggtcaagattatagtacccagaagaacaccggcaagatttccttagatcagattgattcgctgtctacaaaatccttcccaccttgcatgcgtcagctgcacaaggcgctgagggagaaccaccatctccgtcacggaggccggatgcagtacggcctgttcctcaagggcattgggctaacgctggagcaggcattgcagttctggaagcaggagtttatcagaggaaagatggacccagacaagtttgataaaggttactcttacaatatccggcatagcttcggaaaggaaggcaagaggacagactatacgcctttcagttgcatgaagattatcctgaccaacccaccaggccaaggggattatcatgggtgccccttccgtcacagtgatgcagagctgctgaagcagaagatgcagtcctacaagatccctgcctcggggatcagccagattttggatttggtaaaggggaatcattaccaagtagcctgtcagaagtacttcgagatgacacataatgtggacgattgtggcttttctttgaatcatccaaatcagttcttttttgagagccagcgcatcctaactggtggcaaagatatcaagaaggaaatcagtcagccagaaacacctcagcacaaacctagcacccagaagaccagggatgctgcatctgcgctggcctccctagactcctccctggaaatggacctggaggggctggaagagtacttttagtaaatgatgtggccactgtagtatctcctttcccccagcgaatacattcctgtttgaaaggtttacaaaggcacacccatgcacacacacacatttactgggaagcaggcttgcttccaccttacttttgacagaatgggaaaggaagcattcctattgaaactgttaaaatcctcaagcagcaagacaattaaaactaacttttaaagttttgtataatgttggccaagtcctcttttggattgtttttgctaataaacaacatgtatatgact

SEQ ID NO: 569 - protein, 503 aa, Mus musculus
QVVKMQFSGRIRKKLRLAGDQRNASYPHSLQFYLQPPTENISLTEFENLAFDRVKLLKAIENLGVSYVKGTEQYQSKLEAEIRKLKFSYRENLEDEYEPRRRDHHFILRLAYCQSEDLRRWFIQQEMDLLRFRFSILPKDKVQSFLKDSHLHFEAISDEEKTLREQDIMASSPSLSGIKLESESVYKVPFADALDLFRGRKVYLEDGFAYVPLKDIVAIILNEFRATLSKALTARSLPAVQSDERLQPLLNHLSHSYTGQDYSTQKNTGKISLDQIDSLSTKSFPPCMRQLHKALRENHHLRHGGRMQYGLFLKGIGLTLEQALQFWKQEFIRGKMDPDKFDKGYSYNIRHSFGKEGKRTDYTPFSCMKIILTNPPGQGDYHGCPFRHSDAELLKQKMQSYKIPASGISQILDLVKGNHYQVACQKYFEMTHNVDDCGFSLNHPNQFFFESQRILTGGKDIKKEISQPETPQHKPSTQKTRDAASASLDSSLEMDLEGLEEYF

SEQ ID NO: 570 - DNA, 27764 bp, Homo sapiens
actcgaagtcaatatgttactgtctctaggtctgaaaggtagaggaaaaggagctgttaccagacccaaagtgagagggtcctttagagtctgttgccaccttgagagaagcaatgacaggttgagggacacaggtggccttgcagggaggggataaatacattgatctcactttcttctcttcttcctatttccttttggggcttttaattgacctaacctaactggaagcagaaagcacagaaatctgtttatatggtccattcatttaagaacacagagcaggggagggggctagagtggttttaggtgatggggtgggaaaaggaaaatatccagcatatacagtattgtcctatgacttgcttttttagttaacattatatttatgtgattcatccatgtcgatatgcttactgtaattgtagtagttcattcatttttcacttaaaaaattccattgtatgaatacaccagaatttatttatctatttctttttctttttttctctctttttttttttgagacaaggtcttgctgtgtctcccagcaggagtgcagtggcaggatcatggctcatggcagcctcccagcctcaggtgatcctcccacctcagcccccagagtagctgggactacaggctcgtgccaccatatctggctaatttttgtattttttgtagaggcagggtttcaccgtgttgctcaggctggtctcaaactcctgggctccagtgttccaccctcctcagcctcccatagtgttgggattacaggtgtgagccactgtgcctggcccagtttatccatttctgatgatggatggtttccagtgtttgagtattttgatattgccacgaatgttcttgttcatgttttttgatgtctacgctcaaaactttctctagagaatatacctagactagaatcacatagtgggataaagagtcatatgttttcaaatttaccaggtaatgccacatttttcaaagtagttgtatcaattaacagttttacttatagtacacgagttcctagtcaacacgcaatattttcaaactttgaaacttttgtccatctggcacctgtagaatattatctcattgtggttttaatttgcatttcttcaattactaatgtaattaaacatatttacatatgtttatttatcatttacatttccttcattgtgaaatacttgttcaggttccctttctcttttctactgtttattttattttatttttcttttttttaattttactttaagttctgagatacatgtgcagaatgtgcagtttttttgtttgtttatttttttttttagtatttattgatcattcttgggtgtttctcagagagggggatgtggcagggtcataggataatagtggagagaaggtcagcagataaacacgagaacaaaggtctctggttttcctaggcagaggtccctgcggccttcggccctgtttgtgtccctgggtacttgagattagggagtggtgatgactctttttttttttttattatactttaagttttagggtacatgtacacattgtgcaggttagttacatatgtatacatgtgccatgctggtgcactgcacccactaactcgtcatctagcattaggtatatctcccaatgctatccctcccccctccccccaccccaccacagtccccagagtgtgatattccccttcctgtgtccatgtgatctcattgttcaattcccacctatgagtgagaatatgcggtgtttggttttttgttcttgcaatagtttactgagaatgatgatttccaatttcatccatatccctacaaaggacatgaactcatcattttttatggctgcatagtattccatggtgtatatgtgccacattttcttaatccagtctatcacacattttcttaatccagtctatcattgttggacatttgggttggttccaagtctttgctattgtgaataatgctgcaataaacatacgtgtgcatgtgtctttacagcagcatgatttatagtcctttgggtatatacccagtaatgggatggctgggtcaaatggtatttctagttctagatccctgaggaatcgccacactgacttccacaatggttgaactagtttacagtcccactaacagtgtaaaagtgttcctatttctccacatcctctctagcacctgttgtttcctgactttttaatgattgccattctaactggtgtgagatggtatctcattatggacttcacgtccaaaacaccaaaagcaatggcaacaaaagacaaaattgacaaatgggatctaattaaactaaagagcttctgcatagcaaaagaaactaccatcagagtgaacaggcaacctacaaaatgggagaaaattttcgcaacctactcatctgacaaagggctaatatccagaatctacaatgaactcaaacaaatttacaagaaaaaaacaaacaaccccatcaaaaagtgggcaaaggacatgaacagacacttctcaaaagaagacatttatgcagccaaaaaacacatgaaaaaatgctcatcatcactggtcatcagagaaatgcaaatcaaaaccacaatgtggtgatgactcttaacaagcatgctgccttcaagcatctgtttaacaaagcacatcttgcaccgcccttaatccatttaaccctgagttgacacagcacatgtttcagagagcagggggttgagggtaaggttatagattaacagcatcccaaggcagaagaatttttcttagtacagaacaaaatggagtctcctatgtctacttctttctacacagacacggtaacaatctgatctctctttcttttccccgcatttctcccttttcttttcgacaaaaccaccatcgtcatcatggcccgttctggatgattgctgtctctttggagctgttgggtacacttcccagatggggcggccgggcagaggcgttcctcacatcccagacggggtggcggccgggcagaggcgctcctcacctcccagacggggcggccaggcagagacacccctcacctcccagatggggtggccgggcagaggcgcccacttcccagacggggtggccaggcagaggcgctccccacctcccagacaaagagcggccaggcagaggcgcccctcactttccaggcagggcagccgggcagagactcccctcacctcccagacagggcagcagctgggcagaggcgctcctcacttcccagacggggtggcggccgggcagagacacccctcgcctcccaaacggggaggggccgggcagaggcgctccccacctcccagacgaagggcggccgggcagagacgcccctcacttcctagtctaggcggccgggcagagacacccgtcacctcccagacagggtggcggccgggcagaggtgcccctcacttcccagacggggtggtggccgggcagagatgcccctcacctcccagacggggcggccgtgcagaggcgcccctcacctcccggacggggcggccgggcagaggcgcccctcacctcccagacggggcggccgggcagaggcgctcctcacctcccggacggggcatccgggcagaggcgctcctcacttcccagacggggcggccgggcagaggcgctcctcactttccattcagggcaaccaggcagaggcgctcctcacttcctcccagacggggcggcggggcagaggcactcctcacttcccagagggggcggccaggcagaggtgctcttcacttcccattcggggcagccgggcagaggtgctcctcacttcctcccagactgggcggccgggcagaggcgcttctcacgtcccagacaatgggcggccaggcagagacgttcctcacttcctagagggggcggcggggcagaggggctccttacatcccagacgatgggtggccaggcagagacgctgctcacttcctagacggggtgaccggcgggcagaggctgtaatcttagcattttgggaggccaaggcaggccgctgggaggtggaagttgtagcgagccgagatcaagccactgcactccagcctgggcaacattgagcattgagtgagcgagactccgtctgcaatcccagcacctcgggaggcggaggcgggcagatcatccgaggccaggagctggagaccagcccggtcaacacggcgaaaccccgtctccaccaaaaatacaaaaaccagtcaggagtggcggcgcgtgcctggcaggccgaggcgggagaatcaccggagcccgaggcagggaggttgcagcgagccgagatcatggcggtacagtccaggctccgcaagaaagggagaccgtagaaaggggagaggggagaggggagacgggagaggggagaggggagaggggagaggggagaggggggagagggcttttctactgttttttatttttttcttattatcttgatactaacaatgaccctgtgttaattttatcatctcgcaatttgtggatatctaaaaaactgtgtatttatgtactttaaaaagttttatgtacttttaaaaaggtcaagtgtggtggcttatgcctgtaatcttagcactttgggaggccgaggcaggaggattgcttgagtccagaagttcaagaccagcctgagcaacatagtgcagccccatctctacaaaaaaatttaaaaatcagccagtcttggtggcatgtgcctgcagtcctagctatttgggaggctcagctgggaggatcgcttgagtccaggaggtggaggctgcagtgggcagtgatagcatcactgcactccagcctgggcaacaggaaaccctgtcttgaaaaaacaaatgaacagaaactccctccccatgcaaaatcccttaagttcttaatttaatgtagttaaaatgatcaatctttctctttttagcttgtttttttaaaaaaagtttaaaatatacataacacaaaatttaccattttaaccatttgtaagtgtacagttcagtggcattaactacgttcacattattgtgcaactatcaccattatccatctccagaactgcttatgctttttcttaatgtcttgttaaataaattctttggaccatcaagaccataaagaccgtctatatatttgttttaaattcttaaaattttgcctttcatatacaagttcttaaatcatctggaattgattttttatatagtaggaggtagggaatacatttttcctccctatagacagccaattgtcccagcaccatttagaattgtctatttttttcttccattgatttgtacggtggatctgtcatatactaagtttcctcataggtgtgggaccatgtttgggttttctattctgttccattgattgatgactttattcttgtaccaatattgtaatgtcttaaatactaatgaattaagattagccttccatctgcctgaaatgctattctcctaaagatagacatgactaaatcccaagttttcttctggtctctgtttcatggccacattcttagccagcctttcctggctatcttttctaaaatttcattatctccttgaaaaactttacattcttcttttctgattaatttctttctgtttagtagttgttatctaacataattatttatgtctttaacttgtttattgtctctcttccccattagaagatttataagagcaggattttttggctctctcatcattctcatatccccagcatagaaaatgttgcctggcacttagtaagtgtttaattactatttctggaacacaccaaataatgctgatatatggaagggtagtgtttcttcaccgtgctaccattaagaatgtgctttctgtcagttctcctgctccttgattttgactaataaagcaatctaaagcaaatggagagagaatgaagtgctttctttaggttgtttcccagccaactccgagaggtaggcagtgaaatggggagggtggagggccagaggttggctaactctgcattagcttttatgggtcagctatcttgctggaaatacctcatgttctctgcttttcatggcaaacacagctggtaggacctagaatttacagcatgcttactcagtaaagaagcttaccacgcctttggttttcagggcgacacaccccgctcagaagaggaatgaacactcacttagatttaccaagcatggcaactaaattctcagctgtaagtgtgacactttttgggatagaagttctggagctgtggaggagttatctcagggtgaatgccacgtggggcagtctgtctgtagctgggtaatgcccaaggcaggcactgaattgagcagtgatgattcatggaaattctgccagagaaggtactctgtgctttattacaggctaaactaggaagccaactcattctggaaggaatgtgtataatgttttcagatgaggacttgaagttttataggttggagtcacatttgattcaaaccatctgtttaatgggaagctgaacccagcattttttttcatatgtctctcacagtattcaacaattcagtatgggctgggcgcagtggctcacgcctataatcccagcacttagggaggccgaggcaggtggatcacctgaggtcaggagtctgagaccagcctggccaacgtggtgaaaccccgtctctactaaaaaagcaaaaaaatagctgggcatggtggcaggcgcctgtaatcccagctactcgggaggctgaggtaggagaattgcctgaacccaggagttggaggttgcaatgagccgagatcatgctactgcactccagcctgggcaacagagcgagacttcgtctcaaaaaacaaaacaaaaccaaagaaaaaacaaaaacaattcagtttcataagtatttattgagggcccatggagtgccaggcactggggtcacagaaatgaatgaaacagtcatccctgtttttgagatgctatggttcagtggaagtaaaacttacatgtttatgtatgttttccttcccatgattgtgaggtcaatgtctgtatttacaagaatcttggttgccagggctgagcattgtgtcaatcaattttttgtagatgaagtgaatacatgaaagagctcacagtgatttactgaacatggctgctgaaatgtataacattattgtgcattattgctaccgtgatatgcggatttatattgcaattgcctctggattcagaaaaacacccttcacagtgaggtagtgaccaaaactgtggcattaggaaacaataaaaatgctggaatagctgaccaacacagggtattttgttccccggggcttaaaatcagtttttaatatgatgaaaaggcagctattatgtgacatagtaagatattggtatgttaagcatgaacatatatttccagttttctctgagctggtcatgaaatgacactggctacttcgtcttttaattgggcagatattgtaggaagtactttggggatcacagagatgaacaaaagggctcatccaaagaaagcttaaaacctagtagtgctggaattcttaactagccacatatggtgatcttgaacctcttgaaatagtatagatgtgtgtgtaggtgcatttttctgaagagagctttcatcacattgtccagtggttcatagacctaattaacatccctctactacagaagttcttaatcttgatcttccaaaagataaagaacttctgtagtagagggctataattatttaaagaactacaccatatgggagtcatgaagagcctcaggggtttaaatgaggagcaaaacaggtggcaacactgagtagtttcattataaaatccttgacaattttgcaggagaaaatttctttgcctctagtgataaaaacatttttcatatttaacagtagttattttttctatgagttacctcttcttcttcttgtcctatttttctgtttgtgtcttaggatttttttcctaatgagttaacttctttgtatcctgatggcattaaccttttcgatgttatacttttggtagacctttctctagtttgatgagtgcaaaatacttctgtgaattttttacatgcataattttatactttttatggtcaagtctttatatcttttttctttgtaatttataatatttaaatttgtttgctatccagagataagatattcatgtaaatattcttatggtctgtgatgcaggttttttcaggcagtttatatgctttcaggtgtcttctttggaccacgtgatgtatttgtattacgtatttgtattatgtatttaatacagagaggaagaaatgaggtgaagctctgctgtcatattactggaattggtgtagtgagatcgttagcacagtggggcctggagagtttctctgggtttgaacatggctctgacattttgtgtccttttgacttcatttaacttctctgttcttcagtttccgtatctagaaaatacgtttaatataataacctttgggaggccgaggtgggcggatcacgaggtcaggagttcgagaccagcttgccaacatggtgaaaccccatctttactaaaaatacaaaaattagccaggcgcctgtaatcccagctatttgggaggctgaggcaggagaatcgcttgaatcccggaggcggaggttgcagtgagccaagatcgctccactgcactccagcctgggcgacagaacaagactctgtctcgggtattggtggtgggtcggggggaataacctatcttatgtggttatgataataaaatgagttgatatgtaaaccacttagaacaggtcctgatataaagtcagtgccagccacagtttagtccaggctgggtagatgctttgaagcttgatattgtttcaatgtactttgcatttctaaaaacgtgaacatttcaaagcattcatttgatctcctaaggactacctataccggagcctcattccagcacatttgtaagcgaggcacgcctcctagaggccacgagtgaagttaatttccagttctcgaaaatcttacagacagcggagaactggtgtggtggctctgacgccccgcttgtgagtctgcagtcggacatctggaaagtaagcggcacgtccgcgtgatttccagtgcttcatcttcttccaccctaccttccctccgaggctgggttcttctaattcctgtagattgcagagcgattcctgcgaatgtgccttctttcattcattctagttcattccacagataattcagctgcgcgcttcctctgtgcgaggcattgccggagagcggggagcgaattgaacgtggaacctgccagtaggggcttgccgcccaatacgaaattcaacatatgtattgtatgtagacgggcaaactaacgaggatcttgtaacttgttttctcatctgccaaatgggggtaatacgatcttataggaccttataggtcgctgaaagattaaacgagcggaaaaaaaagagcccctaatagtgagctaggtgcaaaaaagatcctaatgccttttttcctcattcctccccagattgaaagtgatgagtgccagccctgcgggttaaagcgccatattttcctcaatatagggaatatttgttagtgtccccagacgaagttacattggttcaattttcggcgtgtgggagttttcgccactagcattcagcaccccagttttaaccgttaaagctaccgactccacatacaggaaatgcatcttaaaatttggaaaaaaaatccccaaaacactgacatccaaacactttaaagctgccaaggtggacggaacaccttgaattcccagacgcgctccactgagcatgcccagagcctcaggccaaaccccctcctacccgccaaggggaggtggggcagggctggccttctgtgctagtcacttcctcttccggtttcatatgaactctcccgccacccgggaacagtggctgccaccgtttgtgttttcccgagtttgaattcttgcaggtaggggaaacttccgcgaatttaggacagagagcaatcctgttattaaggcttgcaagtcgagagaaaggagagatggatcactttgcaggcagcagtagcagaaggacagacttggcgggttggttgtttggggcagacacccaggtaccagggaggagttggggagagataggtttgccagtggagtgaggaggggtgttggggatggaacttttgtaaggcacttgtggatgctcccgaaaaggagttccgaaagacagttgctctgtttcccagagtcataacagaggaagtgagtaactggacccagtccatcaagtaagaccctcatttagccagaacctacagcactttcctctaagttcaggattgcagaccacgtaaaaccttatgttaactcttgggatcgtaaagatccaagaacagtgacacacaggcctataatgagcaggcaacatcacctgactttcatgttgctgaaaattaggatcaccacctgcatctgctctagcgcctctcccacccccattacaaaattattataggtgtattgtagaaaatctggaaacgagagaaggacatcacccaggaattgccactgctaacattttgtgcatgccctcaaatccattttttttctgtgtttgtggaattattttttcgtgttttttcttttttttcccccaactttgttttccatcattttacgctttttgtgtacttccttctaaggtgaccaagatggagttttctggaagaaagtggaggaagctgaggttggcaggtgaccagaggaatgcttcctaccctcattgccttcagttttacttgcagccaccttctgaaaacatatctttaatagaatttgaaaacttggctattgatagagttaaatgtaagtactatttaaattagaatgtatatattcttgagaagctcacttaccctttgtgagaatgaatgaaggtaattcatttccttcattcagcaatccattcaacaagtatttattgaggtaattcatatccttcattcagcaatccattcaacaaatatttgttgagggtttggtactcattcatttatttattgtacaatgcatattattgagtgccattatgttctaggtggcagggattttgagatgaataatgttattttttgttgaagttttattctagtacatggagacagacatccaaaataatagtcataattcagtattttaactgctctagtagaagtaaatggtagtgctgttgaaacaaagaagtgggagtgactgacttagtcttattaaatgagcttcttagagaagttgaaatgtgatctggacatactgaagaatgagtagaaattttccagcagagaagaagtgaagagtttttccaagctgagataatggcctatgcaaaggcttggagcatgaaagagaatttcatatttgagctaacagtaacaagttcaggaattcagggtggatggagaagtatggagggcattttgtgccatgctaatgatatgatattggggtgtaagaaggatgtggccaccgtcctgggggcctacttaatcctcagtgtgttgctagagaaaagaatgggctagacatgaattgaaacagaaacactagcgttgtcttcagagtttatgttccaggatatccctgtggggaaatcagaaggaaaggtgagatactgttaatcattcttagaggagcagggtaagcactgctaatacagagaggaggcactcagtgcctgtgtgttgaatgaaagaatgaagacaagggagaaaagggttttagaaagcttagcagtgtcaatacttcatagggattaagatggtgattgaaaagtgtcccttgggtttggcacttgaggtgaaatgataagggcctgaactatgataatgacaatggcagtggtaggaagggagagagttaagggatactgaggagttagcattgataggatttggtgactggatatgaggagtgagggagcaggtgtggagtggctgcagttcctgcttggatgatctgatgcatggaaactctgctgctggagatgggcatggcaggacgaagagtaggaatgaggggaggataattaatttggatacccatacctgtgggacatggggtttatgttcaggagacaattagaagttcttcattcttgacttcaaaaatgcctccagagaataattcatctgaggaaagattgatatggtgctttaggaacctttgaacagtatgtagcatctgttcaggatggttcatttggctgtttggatggcctttcttcttcactgttgtgctctgtcctcggcttcatcaggaaaggaagggatgctttttttctgttgaatctacgccaagtaaatgatgcctactgcctaacaggcagctcccatacgaaggatgcaaacaaggagtgcctagtttttttttccatactgacatacttttctgttcctcaggaatgattattcaccatccatccctcttccctgattgagaatccctggtattaaattatgctgtgggacatggatattttctgcacatagatggacattatcctcttataagcatatgtagtttatatgatgtcgttacaggaaataaactggcaattacctgtcatgttctgtaaacaagtaattatggaattgccctccatagattttgtcttggatttagttttaaaacattatcttgcatttataccttttttcttttttttagtgttaaaatcagttgaaaatcttggagtgagctatgtgaaaggaactgaacaataccagagtaagttggagagtgagcttcggaagctcaagttttcctacagagtaagtaaaaaaggaaaaaaaagttccttcagtttctatgcatttatgtattgagtgtcacttgtgggaaagatattatattaggcactgggcttttataaagactaatgtatcattagcctgaaggttcttcagtgtattaggggtgattgacatgaagtcagatgattataatatggcagggtttctcaacctcaggactaacatcattttgggtctgataattccttgttgcagggattgttctgtgcactgtaggatgctcagtagcatctctggcttctacccctacatatttccagacatgccaaatgtatcccgtgcaatacaggatgatgactgtgtttatagatgcatgctccaggaactccaaaaacatacataattatgcagctcagattggggaggtttgggaaggctttccagaagaggtagtagtggagctgcatgttgacagatgtgattagattttcattttgggaagatgactgccagcagcagattgacagggtcatgtctgttaggagggaaaccagttagaagcccggaaatgatgagagtctgaattaaatgagagaaggggaccggttgaagagacattaagaaggtagaatcaaaaggttttagtgactgattgtagggggaatggagagagaagagttataaatgacacccaggtttctagttaggaaaattagtggatggtggtaatattttgagatgtgatatgcaggaggagaagcaagtcttggaagacgtagagtttagttcttaacatgaatttgaggtgcctgtggagatgtctagtggacaattggatatacaggtctgaatatacaggaagacatgtggtgggagtagatttagcagaaggttggaatcatcaggagtaggtaagagcaccctagaaaaatatttgagtgagaagagatgacggtggaagttaagacatgaggaataccaatattgaaggtaaagtggaattggaggaatttgggaaggagaatggaaaggagctttctcagaagtaggagatgaaccaggatagtagtgtcatagaagccaaggagggctagagtttcaataataatgatcatgatattaataatgataatagggaataacagcagatatttatattaatagtatgtttgctatgtaccagattttgttctaagtgcattacatatattaacccatgtatgtaattcatacagcagtcttatgaggtgggtattattatcatccctattttacagatacagcctatttattcacagactgaataacttgcccaagctcataagatggtaaatggtggagccaagatttgaatctgggtattttgtttctgtagtggtgcttttaaccacaatagtttcagaagcttaagatagattatgtaagatgaattgtacagtgtccattggatttagcagctggatgggcccttatagataggggcagagaccagaacaatgacagtggttggagaaggaaggtggagcggtggatatagaagatgtacttttttaaaatgtgtagctgaaaagagaagagaaatagggcagaatataggggttgttttagggaaaagagaagatatacaagcacacacttgtacatatatgacaggagatacttaaacatgtttataagctgagcagaagagctagaatagaatggggaagaggggagcttgaagttgaaactttgagagagcatttgataagtcagggtctttaagaggcacaagcaaatgggttgtggggtttaggtgcaggaattagcttttcatatggtttggctgtgtccccacccaaatctcatcttgaattgtagttcccataatccccatgtgtcatgggagggacccggtgggaggtaattgaatcatgggggtggttacccccatgctgctattctagatagtgagttctcacaagatctgatggttttataaggggcttttccctattttgctcagcacttctccttactgccaccatgtgaagaaggacgtgtttgtttccccttctgccatgattgtaagtttcctgaggtctccccagccctggggaactgtgagtcagttaaacctctttccttttatgggtttactcagtcttgggtatgtctttattagcagcatgagaatggactaatgtagctttacatgccaggaagaggagatgctttgtagagatgtatggaaggcaacacaacatgtgtatgcggaagcttgggactgaaggattctgcctggtagcctttattttctgtaaagtaggtgaagtcatctgttcagagagaagggaaaggtgctatagtaggggtcttgggacaactggtgaagactgacgattttctgagaagtgaggaaggagatgattttgtgtcgaatctcaacactgctgcttactctggacaagctttgtgaccctgaacaagttacataacttctctgtgcctcagtttccttatctgtaaaataagattatagtagtgcctccctcatagggttttttttttttttaaaggattaaatgggttcatgccttaaaaattcttagggcaccgcctggtacctagtgagtgctcaagacatgtttgttcttattattttggatccaactgttggtaaggatctagttgagattataggccacgaaattatattttccaaattcccatagttgtgttttttctccagaggttcttagcattttgagaataggactgcagagtgtagttgtagattaagaatctaggttttgccaaatggttgaaattaaagaagctgaggttggtgtaagaagtggttgaggtggtgagcaccttggatataggctggataagaagaaaattaaaagagaggggttggtgggaagaaaatagtgcggtccaaactcaaggggttttgtcaagattagtttacttctcggtttcatctgattgatagcttaaggtaaatgataattatcctgaaaagcatattaagaaatgttttggcaatgagaacacatggacacagggaggggaacaccccacaccagggcctgtcagggggttggggtcaaggggagagacagcattaggacaaatacctaatgcatgtggggcttaaaacctagatgacgggcagcaaaccaccatggcacacgtatacctatgtaacaaacctgcacattctgcacatgtatcccagaacttaaagtaaaaaggaaaaaaaaaaaagaaatgttttgggactgggtgtggtggctcatgcctgtaattctagtgctttgagggactagagtaggagtcttgaaaccaggagttcataaccagcctaggcaacatattgagactccatcatacagaagataaaaaattagcggggcatggtgggtgtcgcttgtagtcccagctgcttgggaggttgaggctggaggatcacttgagcccaggagtttgaagttacagtgagctgtgattgaccactactctccagtctgggtggtagagcaagaccccatctctaaaaaaagaaatgtttttgaaacttactttaccattggcttaggctggctcagtatttccttacacctcttaccattctaatgcatttattttattcatgtgtcattatttttaaggaaaacttagaagatgaatatgaaccacgaagaagagatcatatttctcattttattttgcggcttgcttattgccagtcgtaagtatatgtttatattctcacagtcaaatctggtgtcatgggttataaattggtgtgtggtaagttgatgtgttgtgctaaacataggaaaacccagaataacatcaggagccggttgatcatggggttgaacactgacagtaaattgtttggaagaaattgtttacttaaaaatattgaaaaaaattctatcgcagaattttgcctgatgaaacacttcttaagtttgtgagatagactcttcatttgggattttaaattggaaaggattttattgggaagaaggacttttgatatttttcctgcaaaaaaatggtaatatttataagaaacaattaatgaaacccacacttgaatttgatacaggtttttggaatttgagctctatgggccagttaaatcgaagatatttttgtttggtagttggtttcttttaagttaatagtgccacccagaggtagtaaagttagttgcttttataaaaattgtttttccctcacatgttaattttggtcacataatttagttatggctgtctttttttaaaattaataggcttatcaagtgagactctggaattgcttactatcccaagataataattgagaaattacttaccagttttggttctagagtttttcttctgtaaaaaagcatatgtagtttgtgaaatttatataataaatatgttgctgacaatctgtgaaaatctcctaaaaatgtgaaatcatattttgcatccagtagggtaattattttattatataacgataatgcccattagtatctgccttataaatgaacgttattgcttttaaatattgtggtatatatgtgcatattaaattttgtgaaattatcaattataaagccataagcaaagtttcctttgcaaagttaatctgatcaaagttgccttaaaaaatttggtgtcttttatttggcatttataaagacacctcaagccaaaggagtgccccatttccccattttcttttttttttctcttttctctctctctctttttttttttttgagctagggtctcatgccattacctaggctggagtacagtggtgtgatctcggctcactgcagcctcaacatccgtgggctcaggtgatcctcccacctcagcctcctgaggagctgggactataggcacatgctaccatgcctggctaatttttttgtagatatggggttttaccaacttgcccaggctggtctcaaacttctgggctcgagcaatctgcctgccttgacctcccaaggtgctgggattacgggcatgaaccacgacgcccagcccctattttctaacataaaatgaatattttgcagttacattaaatgcatgaagtattttatgttatttaaaaataatgcagctagtctcgaagcattcttgtatttaatctttttaatttttaacaccccctataccttgtacccaacccatccttagaagattgtgatatgtggtattgatattctccttaccgtgatagaggacttgcatgtttttaactgctgtccattggcatcttgctgatgtttgaatattgttttataaacatttcttagatttaataattactggatttttagtttgtactcataatttctgtcttcatttcagtgaagaacttagacgctggttcattcaacaagaaatggatctccttcgatttagatttagtattttacccaaggataaaattcaggatttcttaaaggatagccaattgcagtttgaggctgtaagtatatttttgtagttatttctaattgttctcaccattcatttttcccttctgtcttaagtgctggtactaatgtgtagtgtgttctctttacattctccaagtacctgcctgaaacagtagctaatagctttggataacaatatatctttccttctctatgactagaagaaaagggactccttaataacaaagtctcacacttacttgctctgttaaatgtgtgctttattaaagcacaagaaggtttagtttataaaggttcatctttaaccaaaattttgtcggccaaaataaagctaataatgtgttaaactagacaagtggtagtttcttatttatagtcgtgaaatttagaggaggtaatactttatttaaaagtcagttgtcaggcggggcgtggtgcctcacacctgtaatcccagcactttgggagtctgtggtgggcagatcacttgaggtcaaaagtgcgagaccatcttgaccaacatagtgaaacccccactctacaaaaaatacaaaaattagccaagcatggtgctgcgcgtccataattccagctagtcaggaggctaaggcatgaaaattgcttgaacccgggaggtggaggttgcaatgagctgagatcatgccgctgcactctagtctgggcgaaagagcaagactccgtctcaaaaaaaaaaataaaaaccataaatcaaaaatgtcagtaagatctgtatgaatagttttaaaaaataattttgcagacatatctgaatgatttacatattgtaattatataaaaaaagaagagatctttgggactcatttaatggggatgagtattggaaatagaatttgtatcttttttttttttttttttgagatggagcctcactctgtcatccaggctggaatatgcagtggcctgatctcggctcactgcaacctccaccttctgggttcaagcgattctcctgcctcagcctcctgagtagctgtgactacaggtgtgtgccaccatgcctggctaatttttgtatttttagagacgtagttttgccatgttggccagggtggtcttgaaccccctgacctcaggtgatacacccgcctcggcctcccaaagtgctgggattacaggtgtgagccaccgtgccgggcctagaatttatgtcttttaggtagatatatgccacaatgggaatgtagaaacattatgttttggaagttttagagcagtcagatggtagtaggactggcagagactctattttgttgttggaatgcgtggcttaaagccaaataaaataaaaaagtagaagttgcaataggtgaaagacattgtcctgtctgacaagtagaagacatatccactgtagcaaggaacactatggagtatatgagttagggaaaagagactgtgaagggaagtgaacaaacattttgtagacgtttagtgtcaaatatatgctaggtaggcagtttctatagtttctttcatttacttcatgaggtttctaagtcacatctacctttgcatagacagatgtcatgcatggtaccatctgaaccaaacccactgcatcttccactttgcttttaactttgatccttggtgaagtccattattgcaattatcaattacagttaatttatccattcctattagaaatagtttattttttgcttttgttgaaattactgatttttagtaggtcatagagagaggtgtccttgagaaggtctattatttattctagggcagccatctccaacctttttggcaccagggactggtttcatggaagacaatttttccacggactgaggtcgggggatggggaggggtgtggatggttttgggatgaacagatccacctcagatcatcagtcattagattatcataaggagtgcacatcttagatctctcacatgtgcagttcataatagggttcgcactcctataagaatctaatgcctccactaatctgacaggaagtggagttcaggtggtaatgctcgctcactgctcacctcctgtgcagcctggttcctaatgggccatgtgctggtgctggtattgtggcctgagagttggagaccccagttgtagagtgtctcagcgtcacatatacttttttaaataatagatttattgagctagaattcacaaatcttgacatgcacccttttacaatgtataattcattggtttttagtgtaattacagattgtgcaatcaacactactatgtaattttagaacattttcacctaaaaatgaaacctcttacccatttatggtcattccctattcttcctctcccaacccttggcaaccactaacctgctttctgtctctggatttgtctattctgaacatttcatataaatggagtcatacaatatgtggtcccttgtggttgacttcttttacttagcataatattttcaagtttcatctgtgctgtagaatgtatcagtattaattttttaattgccaaataatattttacctgttcagcattcgagggacatttggatggtttccatattttggctattatgaataacgctacagtgaatatttgtgtccaggtttttgtgtgaatatgttttcctttctctcaggtgtatacctaggagtagaattgctaggtcatagggtgattctgtgtttaaacttttgaggagctatcaaaatgttttccaaagtggctgtatcattatatatcttaccagcagtggatgagggttccactttctccatatcctcaccaaaaattgttaccttttaaaaaaatatagccatcatagtgagtatgaagtggtatgtaattgtggttttgatttgcatttctaatgaagctgaatatcttttcatatgcttattggtcatttgtatatcatctgtgaagagatgtctgttcaaatcctttgcctgttttgtagttgaattgtttggctttttattgttgagtgttctttacatattctggatacaagtccattatcagatatatgatttacaaatattttcccccactctgaaggttgtcttttcttgatggtattgtttgcaacaaaaaggtttttttttttcagatgaagtctaatttatctttttttcttgtcacttgtgcttttggtattgagtctaagaagtctttgtctaatgtgaggtcataaagatttactcctacagttttttctgtaagagttttgtagttttagctcttacgtttatatctgtggttcattttgtgttaatttctatacacggtgtgaagtaagggtccaacttcattcttttgcatgtagatatctagttgtcccagcatcatttgttgaaataaccattctttcctcattgaattgtcttggcacacttgtcaagtcagttgactgttgatatggtttgattgtgtccccacccaaatctcatcttgaattgtagttcccataatccccacgtgtcatggaaaggacttggtgggaggtaactgaatcatgggggcaatctcccccatggtagtctcatgataataagttctcactagatctgatggttttataaggggcctccccctttgcttggttctcattccctcccctgccgccctgtgaagaggtgccatctgccatgattgtaagtttcctgaggcctccccagacacgcagagggctcaggattaaacctctttcctttataaattacccagtctcaggcagttctttacagcagcgtgagaacagactaatacaactgtaaatgtaaacatttatttcagtactcttaattttattccattgatctgtctgcttatccttatgtcagtagtatgtggtcttgattattggttactgtggctttattgttaagatttaaaattgagaagtatgagttctccagctttgttcttttttaagattgttttggctgctctgggttccttgcattttttaatgaattttgggatcaacttgttaatttctaccaagaagctagctaggatttacactgggattacattgaatctgtagatcagtttgggaggtattcttttgtaatgatattaagtcttccaatccatgaacatgggatgtctttctatttatttagatcttctttaatttttttcaacaatgtcttgtaattttttgttacatttatacctaaatattcttcaatgttattgtaagtggagttgttttcttcatttcatttttggaatgttcattgctagtatataaaaatccaggtgatttttgtatattgatcttgtatcctgcaaccttgctgaacttgttttttttttttgtttttgtttttttgtttttttgtttttttttttttgagatggagtcttgcactgtagccgaggctggagtgcaagctccacctcctggattcatgccattctcctgcctcagcctcccgccggccaccacaccctgctaattttttgtattgaacttgttttttaattctaacagttttatagtggattcattatgagattatgtttactacagagatattctgactcctttctaatcaggatgctttttgtttctttatttttgcccaattgtccagctagaatctccagtacagtgttgaatagaagtggcaatagcagtgatcatgatctcaggggaaagcatttagtctttcactatgttgcatggttttagctgtgagttttttttatagatgccctttatcagattgaggagattttcttctaattctagttgaatattttcattaagaaaggatgttgtattttgtcagtgcttttcctgcaccaattgagatgatcatgtggtttctgtcctttattaatatggtgtgttgggccgggcgcggtggctcacacctgtaatcccagcactttgggaggccgaggtgggcggatcacaaggtcaggagtttgagaccggcctgaccaacatagtgaaaccccgtctctactaaaaaaaaaataccaaaaaattagccagacgtggtggtgcgtgcctgtagtcccagctactcaggaggctgaggcagtagaattgtttgaacccgggaggtggatgttgcagtgagccgagatcgtaccactgcactccagcttgggcaaaagagtgagactttgtctcagaaaaaaaaaaaaaaaagttctgttacattaattgatttttggatgttacaccaaccttgcaatcctggaataaatcccccttggtcatgttatataatcttttaatatgctgcttggtttggtttgctagtattttgttgaggatttttgcatctatattgataagggatactggtctgtaggttttttgtgatgtctatatctggttttggtattaggatcatattggcctcatagaatgagttgggaaatgtttcctcctcttccgttttttggaggaggttgtgaaggattggtttaaatgtttggtagaatttaccagtgaattaatctgggcctgggcttctctttgtgggtcattaaaattaccaattcattctctttacttattatgaatctatttaagttttatattactttttgagtcagttttagtaatttgtgtcttttttggaatttattcactttatctaagttatctaattgattcatgcagttattcatagttttctcttatccttttgatttctttaagaaaataaaaggattggtgatgatgtcttctctttccttcctgattttaacaattagagtcttctctttttttttgtcatctaggtagaggtttgtcagtgttactggatttgttcaaagaaccaacttttggtttcattgatttttctgtgttattctctagactctatttcactagtttttactacagtctttagtatttccttccttctgcttgctttggtttggtttgctcttttcttctagtttcttaaggtaggagtttagggtatttatctgagatattttttctttttatatgtagacatttacagctataaattttcctgtaagcactacttcagatgcaaaccatgagtttttgtatgctgtgttttctttttcatttatttcaaagtattcttttttactttgacacattgattagaagtgtttaatttccacgtttttgaatttcctgaacttctgttactggttttaatttaattccattttagtttgagaatatattttatatgactgcaatcttttaaaatttattgaattttattttatgacctagcatatggtctgttctggaggatgttccatgtgtgcttgtgaagaatgtgtatctgctattcttggttggagtgttctgtagatacagtctgtaagatctggttggtctatagtgcttttcaaagcttcggtttccttgttcatcttctgcctatttgttctatccattattgaaagtggggtactaaagtcttcaactgttattgtttatttattatctttaattctgtcaatttttgcttcatttattttggggctctcttgttagttgcatatatgtttataattgttaaatcttcttgatgggttgacccttttatcattatgaaatgttcctctctagtaacatttttttgttgttgttttaagttatgtttgtttgacattagcatagccattccagatcttttatggttgttgtttacgtgatatgtctttttctattctttttattttcatcctttatgtgtgtttgaatctaaagtgtgtttgttgtaaatatcatatagttggatcatcttcttttcttttttattcattttggaagtctctgacttttgcatggattgttttatccatttatgtttaattactgataacttagtatttccgtgtgccatctatgtgtttcctatgtcttaaggtttttttgtttctgtatttctccattactgccttctttgtattaaaatggtattttctagtgtaccattttaattcctttgctgtttattttactgtattttttgagttattttcttcgtggtttcccttagaattacaattatattttattttaaaacaatctagttgggattagcattaagttaatttcaatagtgtacaaacttttgttcccatatgctctgttccctactccctgccattgtcctagtatggtcatacaaattatttcttaatatatcaacagaggtaaactttttgtgttctagattgtatgaaaaatgtatttataatactgtcaaacttgagtgtagtttgccttggtatacaggcaaatacctgtatgttgggaatattttttattggcattttggagatattgcttgctgaaccttttagcttctagagttgctcttgagaagcctgatttcattttgacttcttattctttgcatgtaactttgtgtcctttgccagtcccactctcttgtgtagtgaactttcatggcgatgtctgcaccttttttcacttttttgggttgggaacttggtggactcttttaatctgaagatttgattcttcagttagaaaatttctttttattattgctttaataatttcttctatgttctctttttataacctcttgttaggtggaatttatattttctggattggtactcttattttcttttcggtcctgacattcaatctttgtgtttttattttattttctgaaaactttcatcaactgttttctcaattttctatttatttatttttccctcctgtgtttaatttttttcttttaaatttacttaaaaattgaatataaaattgtatgtattcactgtaaaatataatgttttgaagggtacattgtggaatgattacatctagctaattaacaaatgtattacatcaacagttatttttgtggtgaaaatacttaatatccactcacttagcatttttcatcaatacagtttgttgtcattaactgtagacatcatgttgtacaatgggtctcttgaacttaatactcttaactgtgattatgcatcctttaacagacatctccctaacctcttttcctccctaaccaccccagctactggtaatcactattttaccctctatttctatgagatcaacttttttagattccacatatgagtgagatcatgacatatttgtctttctgtgcctggctttatttacttaacgtaatatccctgtttcattcatggtgttgcaagtggcaggattttcatttttttttatgactcaatattattccgttatgtatatatattgcatttaaaaaaatccatgtatctatcggtggacacttaggttgattccgtatcttggctattgtgaatagtgctgcagtaaatatgggtgtgcagatgtcttcagcatactgatttcatttccttcagatacatacccagtaatagattttgctggaacatatggtggttctatttttaattttttgaggaactttcatattgtttttcatttctacaaaaaataaaaaatagctgggtgtagtggtgcacacctgtaatccagctacttgggaggctgaggtgggatgattacttgagcccaggtgttggaggctacagtggactatgatctgtagcccaccctgggctacagaacaagaccctgtctctcaaagaaataagaggataataacgattttcacctcacagattagtgaggtttaaatgaggtagtgcgtatagagtgcttagtactgtgcatggaatatatgctgggtagtaatattacggaggatacagaagcagcatatgcctgtattgtgaagaagttcggagtcaattagattgatatgtttttactgcaattaaaaaaatggttttggaataggaacagctccggtctacagctcccagcgtgagcgacacagaagatgggtgatttctgcatttccatctgaggtaccgggttcatctcactagggagtgccagacagtgggcgcaggtcagtgggtgcgcgcaccgtgcacgagccgaagcagggcgaggcattgcctcactcgggaagtgcaaggggtcagggagttccctttcctagtcaaagaaaggggtgacagatggcacctggaaaatcgggtcactcccacccgaatactgtgcttttccgacaggcttaaaaaacggcgcaccaggagattatatcccgcacctggctcggagggtcctacgcccacggagtctcgctgattgctagcacagcagtctgagatcaaactgcaaggcagcagcgaggctgggggaggggcgcccgccattgcccaggcttgcttaggtaaacaaagcagccaggaagctggaactgggtggagcccaccacagctcaaggaggcctgcctgcctctgtagg

SEQ ID NO: 571 - DNA, 546 bp, Homo sapiens
ggtttcatatgaactctcccgccacccgggaacagtggctgccaccgtttgtgttttcccgagtttgaattcttgcaggtgaccaagatggagttttctggaagaaagtggaggaagctgaggttggcaggtgaccagaggaatgcttcctaccctcattgccttcagttttacttgcagccaccttctgaaaacatatctttaatagaatttgaaaacttggctattgatagagttaaattgttaaaatcagttgaaaatcttggagtgagctatgtgaaaggaactgaacaataccagagtaagttggagagtgagcttcggaagctcaagttttcctacagagaaaacttagaagatgaatatgaaccacgaagaagagatcatatttctcattttattttgcggcttgcttattgccagtctgaagaacttagacgctggttcattcaacaagaaatggatctccttcgatttagatttagtattttacccaaggataaaattcaggatttcttaaaggatagccaattgcagtttgaggct

SEQ ID NO: 572 - protein, 151 aa, Homo sapiens
MEFSGRKWRKLRLAGDQRNASYPHCLQFYLQPPSENISLIEFENLAIDRVKLLKSVENLGVSYVKGTEQYQSKLESELRKLKFSYRENLEDEYEPRRRDHHFILRLAYCQSEELRRWFIQQEMDLLRFRFSILPKDKIQDFLKDSQLQFEA

SEQ ID NO: 573 - DNA, 90616 bp, Mus musculus
  misc_feature (1)...(90616): n = A,T,C or G
gcagttgacgagcctccaccagaagggtgcaagtcgtttctctcagtgcatggaaagcagacttgtgatctagacactctggagagccttctgctgactgccgctgacaggtcggttgtgttcttcactcaatgtggtacatgctttgtgcctttgctctatcacatgcactctgagttgagttttgttttcttccttgtttgtttgtgtgtttcagataccctcacttggtagtcctggcctagaactagaacagaccaggctggcctcaaactcataaagattggtctgcctttcctccgcggtgctgggataaaaggcatatgtctctattgacgcctggctgatttttgttgtttgttgagaaaaggcatgtgatacatgcctggtcctctgagttttttaccttaccatctgcacgtatttgagaatggctactagctagagactgaccagatgtgaacatcagctccattacttaaagtagtttgtaaaatgatgaaaattagtttgttttctcatgtttcaaaattagaagtacttgatattcctgttttattgggtgattttttttttctgagagatttaatggctttgttgttagcttatcaaagaatactgtctgtacaaaaagctggcgcctgaagtagcagagattaataataacgatctcttaggatattatgaccaacaacagacagtatttaagcgatattacaaacttgatttgaataatgaaagtacagttttttttgtgtgaggaggctgaggtttccaacagtggacacttagcacaagtatgcatctggctggctggagtagcagcctctctgtacctgctctaggccatgtgatgatgactctaccagaaacgttaatgggatttttggttatggaagtcttgtgtaatgacattgtcaaacccgtaacaaattctctgcccaacacatggcactagtctctctctctctctctctctctctctctctctctctctctctttcagagacagagtttctctgggcactagtgtctctaactcagaatgacaatagtaaagtcactgtattttcaggtagctcagcgtcagggtgtgggtggatatttgagaatggcagcatggtagagcaatgctttcctgggtggaatgtaattggaggcctggcagtggtggcacacgcctttaatcccagcacttgggaggcagaggcagtcggatttctgagttaaaggctagcctggtccagtttgtcttagtcagggtttctattcctgcacaaacatcatgaccaagaagcaagttggggaggaaagggtttattcagcttacacttccatactgctgttcatcaccaaaggaagtcaggactggaactcaagcaggagctaatgcagaggccatggagggatgttctttaatggcttgtttcccctggcttgctccctgctctcttatagaaccaagactaccagcccagagatggcaccacccacaaggggacctccccacttgatcactagttgagaaaatgccttacagttggatctcatggaggcatttccccaactgaagctcctttctctgtgataactccagctgtgtcaagttgacacaaaactagccagtgcaattgaccccttgtcaacttgacacacaaacacatcactagtaagcctcaacccttagttcttattcatcctcaagatcttaaataactttaaaagtccccacagtctttacatattaaaaagttcaatcctttttaaaatattccaatatcttttaaaatcccaannnnnnnnnnnnnnnnnnnnnnnnnnnnnnnnnnnnnnnnnnnnnnnnnnnnnnnnnnnnnnnnnnnnnnnnnnnnnnnnnnnnnnnnnnnnnnnnnnnnnnnnnnnnnnnnnnnnnnnnnnnnnnnnnnnnnnnnnnnnnnnnnnnnnnnnnnnnnnnnnnnnnnnnnnnnnnnnnnnnnnnnnnnnnnnnnnnnnnnnnnnnnnnnnnnnnnnnnnnnnnnnnnnnnnnnnnnnnnnnnnnnnnnnnnnnnnnnnnnnnnnntgctgttcttggtggtcatctcatggtactggcatctccaaaacgctgctgtcttccactgtaactaggcttcaccaatagcctctcataggctctcttcatggtgccaagcctcaactcctttgcatgacccctacagtcctgagccctcaattgcaactgaggctgcaccttcaccaatggccttccatggcccctcacagtgccaaacctcagctgctctgcctgaccccttcatgccttcaaaaccagtaccacctgggtaactcttatacattaccaagtccagccacagcacaaggtacaaccttggctatctctggaacacagcctctgtgctctcagaaaacttcccagaagatgccacctcaatgatgctggtctcttcttaatcacagctaatttcttagctccagctaaccagcatcaatagtcccagtaattcacagtttttgctttagtagttctggtatcttgttaatcacagctgatttttcagccccagctaaccagaaccacagaatcttcacaatcaaaacagcaatggccctgaaaagagtcttaatcttctctctgaaatttcacaagccaggcctccattttctgcagtgttctcaacattgtctttcaagctcctacacaacatctcacagagctcttaacgccgaatggatcttctggccgaaagttctaaagtccttccacagtcctccccaaaacatggtcaggttgtcacaggaataccccacgatgctggtaccaatttgtcttagtcaggatttctattcctggacaaaacatcatgaccaagaagcaagttggggaggaaagggtttattcaacttacacttccacattgctgttcatcaccaaggatgtcaggactggaactcaagcaggtcaggaagcaggagctgatgcacaggccatggaggaatgttctttactggcttgcccagtgagttccaggacagccagggctaaacacaaagaaaacctgtcttgaaaaaccaaaaaaaaaaaaaaagaaagaaagaaagaaagaaagaaagaggtaattggagacactgtggttcttttaaaactgtattgagtttgttagagcaactgtgtagacttgtgtggagtggtgtctcctcttctgagggtggaactgcttttaatagtctactgtgtatcatttttatggctttaagtttgcacaagtaggtaggtatatatctgttgagagacatcttcccactttatgcatgtaggtgtacttcagtatttttaacacccgcataaaaatgtcctgctgcaggtttttagagttgttttgaattttggaactttaccattatgaagaatatatttttcatatgtcattgccctctgttgcgtggtttattagaacagggattggtgggtgtgttagttcctttcttttgttgctgttactgaataacatggtgaaaggccacttaacttattttactgtaagatttctatctgtctttgctttttattgtgtgataacacactactattaaaagcaattttgggaaggaagggtttatttggattatagtctatcctcaggggaagacaaggcaggaatctggaagcaggggctggagtagaaaccatggaggcatgttgcgtgctagcttgtccagcctgctctcttgtagaaagaacccagaccatctatcctcgggtggccacgcccacagtggactcggctttctcccatcaatcaatagtcaagaaaatactgtacagactcacctacaggcgagtctcaccatgggggcattttctcagttgaggttccccttttccagatagctctaatttctgtcatgttgacaaaaaacctgagcagctcggtttcaggaggctagatgtccaccatggcagagcaagcaagtaggagggaacagggagctgaggatcatgcctcattctcacacagggagcagaaggaggaagaactggagtgtgccgaggctataaactctaaaagcctgtccccagtgagctcttcctctgtgttccagagtttcataacctccctccaaacagtaccacaactggggaccaagtattcaaatacaggagcctgtaggggacattttccattcagaccaccacagtagatcatattttaagaacttttaatgtcttttttttaaagattcatttatttattatatgtaagtacactgtagctgtcttcagacaatccagaagagggagtcagatcttgttacggatggttgtgagccaccgtgtggttgctgggatttgaactccgaaccttcggaagagcagttgggtgctcttaacccacagagccatctcaccagcccccaacttttaatgtcttgatgctgattttagaaagtatggtggttttttactcttttgagaagtttaaaaaaattaaggggcggtggcagcacactcctttaatcctagtgcttacaaggcagaggcgggctgatctcaggagttccaggccagccagcccatacagacagacagacaaaagcattgtaggaagatcacagtagcaaacatgccagagagggagacttgctgtagctcacaagttacttgcttaaagttttatctgctgctcgaattatttggccttaattttcagataaaattacagtcacactccacacagtacaaaaatatgctgtagatttagtgctgtgggatttggtatgcatcctggcttcccttctgttctttttaaagaattgatgatatttaatttaacttagtattttataattaatattcatgtaatatactttatttatatagccatgaacgagtaaaactcatacttgacagtattctaaatgcaaactgtttaagattgtgctgctcatgaagatacttaaaacctttactaagtttttaaagttgttgtcaaccagtgtcctggtttttctttaaaatttttcttaattgaatatttacttccagaccgaaaccattattgttcaaaggagatcacagatatccctcatcaaatcctgagagtccagtggtcatcctttattctgagattggccatgaagaattttctaatattcaccaccaacttatatcaaaaagcaacgaaggcaaaattaattatgtattccgacattatatatctgtaagtattgacttattttacaatttcttgaatattaatttgtttaaaatgacttttacaaataacttaattggaaattcttttttttttttttttagaaatccaatacttttatcagatctctctctctctctctgtactttctttcacttgtttctttctcccccccaatctcccttcctctctttaatttttttttttttttgaaacagggtcttactgtgttaccctggctagccttgaactcactctgtagagcagactgacctcaaagtcatagagacccccctgcttcccaagagctgggatcaaaggtggttacacagaacattcttaaattaattaatgttcttactttcttgattgctctccactcattcttctccattcactgagcagtctctcagttgaactgaacaagctgcacccagctagcctgcttgctcagggtttccttgtttccaccttccacaggttagaattacaagcaagctgccacagcagtctgggtgctaaggatttgagcgttggcctcttgcttgggtggcaagggcttacctgctacggcacttgcttggtctgcatcagatctcttacttgcacatgggtggtgccttccttgcttgcttttccaaagaaacgtcaaaaaaattacacttaaaaaatgggataatcaaattgttttgattttaaaatgaactgcagtgagctaggtatgatgagtgattcctataatctcagcacttgaaagtttgaagcaggaggattactgtgaattcaaggctatctggagctacgaactgagatcctatgtcctttaaaattaaaccaaaaaacagatactaggaattgtgcaaacttttgtatgttaacatttaagatagtcatccaactgtccatgaaccttaggctattgagtgttgagccctcatgtctcctggtaagtgagctcttagcctcctgagctgtgtcccctaggctctcccctaggggacctgtttggaagcacagtcttgttgagttgtctaggtattgttgagttatctgggtggctttggaatcctccaggaagactttgaacttgcagtccccctgcctcagctgtgaccacaggtccaattcaccaggcctagctagaagtgattattgagatctctgtgtgtatttgagcttatatgtttgtggggtgtgcgtgggcagctgtgttctcttctggggtccacattttccacatttccacattttctttttgagatcttttttttcctttaaagtgtcttgacaagaaaattttgactcttgttcaagagggtgtgctcctcccaagcagaagagcagcactctgggggcaggagatgcaccagattctaatgcactcatgaccgtgtctgttcccaatgcctgggctgccttgccgtctgtcacaggagactttaaatgttttaatagaatcagggcaaaaagacatggaaagggaaagcaggtcggccgcttttagtcacttaagttccaagaaagcagggctgatctgtaagcatgactggggtggaggggaagcaaattcaaacatttgcctcagagtcttacaaagtgggaagatactggtatcttctcccagacacagtgcagtgtctgatagcagagactaatactttatcttacaagtccctcctcttactgtacgtgttctgttgtttacactcattaggaagatgttggctctctctccatcctttcttagagtaagaaactgctataggaaggggtccttctttagtgatagctgacccagtaagtctgagttaggactctaatacaagaaagtaattattccatctctttcattggcatggcctccctgggggtatttggccagaggttgaccttgtcccattggagtgttaagcctccacccaggctgcttcatgaccaggaagaatttttcttagcaggccttcattattactttaatacccacaccccaagaggtaacctaagaatcatttaggaactagatggaaggtcagagccccagacacttggcctttctagtctctagcagggatgggcctgccagggctcccaaggatgtttctgggatttttgctannnnnnnnnnnnnnnnnnnnnnnnnnnnnnnnnnnnnnnnnnnnnnnnnnnnnnnnnnnnnnnnnnnnnnnnnnnnnnnnnnnnnnnnnnnnnnnnnnnnnnnnnnnnnnnnnnnnnnnnnnnnnnnnnnnnnnnnnnnnnnnnnnnnnnnnnnnnnnnnnnnnnnnnnnnnnnnnnnnnnnnnnnnnnttctctatctcctgttctcatcttccttcgctctgaagaggtaactctaatgccatcgtagcgttgggccaatgacccatctcagctgatttcatacagctgaatttggggtgtcagagtcacagttttggggtacccctccagggagcctatctaaaaaacctcaactgttagatgtagggaggaaagaatcattgactgctgtctggaaagatgtgagggagctgtgttaccctaggcagggagaagccagagacattgggctcacaagaacatccgtctgttgggtccttctcatggttctcttggcctccacggctgactggacagcgatgaaaccaagatctgttttcatgcactttgaaagctgttggacagactagaaacagtgcagagtctcccccggatccttccagagggacagagagaagacatttagctagcatttgattttttttttctctcttttttttaaaggttaaaacaatactgagcctttcttacttggatagtcattgaagtgtttaattgagccaaaatctgaggtcttatatctgggtagcttttttttttttttttttttttaattaagaagaaaatcactgggctggagagatggctcagtggttaagagcactgactgctcttctggaggttctgagttcaattgccagcaaccacatggtggctcacaaccatctgtaatgggatctgatgccctcttctggtgtgtctgaagacaagtacagtgtgcttacatataataaataaatctttaaaagaagaagaagaagaaactcaccaatgagacacaatctaggtaacagcccagatagttttaagtctaatgtctgggaactgtgagcctctggatagttacaaaacctaacaaacacacccatcattttagtttggggttgtacttttgtgatgggtgtttcagacaatgtaggtggccagaattatttttttcttctttttttatttttatgttttagtttttttcgtctttatactgtcaggttgagggtctagttcttgggtacccgtgcttgagagagacctctggttccttctctgccagtttctctgtgtgagcgtcagccggaggccggcgtgaccctgcctttgcttggaagcagtgaggaaatcctttacattgactctcctcttcgtagattggacactggttggtgtctcttcgggctccttgaacaagggaacaggaagttctccgtgtacttacaggccattttgaaagctgcccgccccataatcccctgggagctagttgttgactgatcttggagggcaacgggagtacattctccctgttagtctgtctggccacattagtgtagcttctgagtatggttattaaatatgcagaggattagctgcacccttttaactactggatagtagttcagaaactaggcgtgtctacataaatgttgatgagacattctttttaatgtgcttgttgaactttgaccttactcttttggtatctttttatttggtggaagtggagcgtttctaaagaggtagaataaagcagaattaatataaaattaaacgtgtatcatatcattgagtatttaaaatatggaagtctttaaagtttgtgtgtcatattgttcagtaattcagtaatggtaattgttaagtatgtgctaagagaataaaaattccaaaagaaaatttgatggagtagagacagatgtatttatcagtccccccctttttttttgttcttttatatttttgagaccagtttcaatatattctaggctagtctagaagtccaaattcttctgccccggtcccccccaaccccccattagagttaaagctttatgctaccacatctggccaaagtccagtttttgactactcctctcctgctgacatccccaggccttggattatgaccaggttcatagggatcaattgctccccctgtggagcaagacgtttgagtgcatgtctgagaaagcagtcgattagccctttgtaatagtcatgctatctattatagcaccagtagtgttgtcttgcctcgagatcagtgctgagtatatagctaataacattatatatatatatataaatataaagacaattaaaaagtgtttacagtggaattacatcattcccctttctctctccagcccctcctatgtactccgacttgacttcatttaaatttattccatttttcttgtgttgttaaacgcacgcatgcatataagcacacacatatccacacacacaacctgctcagtccatatgatgttacttgcacatacgtatttcagggctgaccattttgtattggacggccaattggtgtgcgcttctcatcagtgtggctgcctgcactgagcaggggcggcctcgagagccatgccagtaaggaggggccgctgtgcctcatgccgggccaggtggggatggtggaactcttgctctatttgcagaatcccagcaaggagccggtttacctttctggctatggagtggaactggcgatcaagagcacggagtacaaggccaaggatgatactcaggtgaaaggtgaatttgtaaaaataagaccatgctttctcttgcctttacgtatgagttcatggggaattggcttgtcacatctgggtaggaaccttcagcacattttctaggcctggatttttgtcctctgtaacatatgggcagtgataggttctttttcaaggaagataatgtatgtcgagaatttggggggtggatattgtggtgtgtgcttaacaatctcagtgctgaagcaggaggattatagctcaaggctgcctgtcctgtcccccaaacagtaaaaacaaggaagggtacaccgaaacaaaatgaagcccacgaggttgcgtgtggtgtttttacccaggtgatgtgatcagcagcagcaactgttgttgatgttgtgtgtgtcacagacaggccttactgtgactccggtacaaaactctaaatatcctaggcctcatgggtcatttttgtttttattatttttgtacttggaacagttttctttgggttcttcctcccatattatgatgtggttttttgtttttgttttgttgagacagattttttttttccatgtagccctggctgtcctggagctcactctgtagaccaggctggccttaactcactgagatcctcctgcctctgcttcccaagtactgagactaaagggatgagctgccatacccagccctgaagtaattttttttaaccacaagttttacttgctgtctttttttttctttaaaaatcactttattatatctttttgtactgtgtggtactgagttcagagccttgtgtgtgatgatgctcgtcctccgttatctcaccattgagctgcatctgcattctttttaatgttttcgtttgtttgtttgcttttcattaagttatccaggcacactaaactatctaggccagtcttgaacgtgagcctcctgtctcagcgggaattatggtgcatgccattacattctctgcactgcttttaaacatgaaatgatggatttgaatagtgaagcaaatggaaaatggtgtgctgctctctcagtgatggttaggattttttaaactgtaaattctttagaatttaactgtgaaaaaatatttcataatatttcaatctattaatttcaaattttttaatgtaaaattttctaaggcttgaaagaaaatttattcttgttcagaaacacaagaaatataaaaccaccatcggtttacaggcccacactgaagtgttacttgaagccttcgatatttcttttaatctccagtctgtggtggaacccttacttctattctgagctactagacatgcctctactatgtctttataggaactgaggtaaatgccacggtcatcggggagagcgaccctattgatgaagtgcagggattcctctttggaaaattaaggtatgttgattcatgttgctgtgcaccgccctttgttcctgtgtctttcccgttgctgtctgagttgcagctctacaggacgttctatacagagtccaccgcggagaaaccttctcacttgcagtcagcgtggccgttttgttctagtgaaacgcactgctcttggatggcactggagttacctgcccatgctgaagcgggtttcttttcctctcagttgatagcatacagttacagatccttgttttgagtagcggaaaagatcacattctattctcttcttcacatggttggaagtagtgaatggggttattttcttatgctgagcagaatctgaaaaaagaagccaaagtgtatagtaagtagacttaaaaacatgcaatagagatagtgttccatcagccaatgggaagttttttctttaatatatatttgtttgtttgtttagttttttttgagacagggtttctctgtgtagccccagttgtcctggaacttgattgtagaccaggttggcctcgaactcacagagatccacctgtctcttgagttctgggattaaaggcatgcaacaccatgcctggcctatgttattggtattgtttgagtgaggtcttcctttgtagtcctggttgttctggaattctctatgtagaccaggctaccctcagtcatgcagagatctgcctgctgctgcttcctagacgcagatcaaagacatgggtgatcatacctggcagaaaatgatttttttaattaacttatttactttttacttattcactttacatcccactcactgtccccctcctgataatcttctcccacaaccctttcccatgcctgctcccctctcctctgagtgggtggggctcccctgtatccctgaccctggcacttcaggtctctgcgaggctaggcgcctcctctcccactgaggccggaaaaggcagcccagctagaagagcatatcccacagataggaaacagcttttgggatagccctggttccagttgcttgggactcatgaagaccaagctgcacatcggctgcatatgtgcagagaggcctaggtccaacccgtgtgtgttctttggttggtaattcagactctgagactcccaagggtccaggttagttgattttgttggtcttcttgtgaatttcctatccccctggggcctgcaatcctacagaagattattttaatgatggaatttgtttcataattacacagatcattttgtgacaacatcataatttatagctgaacattattcttgactgtggtgacttgataaattttttaagagtctcaaattctgctgtgtgggaatttcagttagaaattttgcagtgtgttgcccttttaaaaaataaaataaaatggtttccagttccagctgcggtgtcttcttccctttgggtggattactgttggttgactccctgccgtggacacttgcctgtcatctctttcagctctggctatagtcaggtgccacttttatttgatcaagatttccagagtctcttttagtactctttctatgctttttaattatatttatttatttcgtgtgtgccatgggaacagtgcctgagtccaagatatgcacacggacctagttctctgattcccgcaccccagccctgggatctgagtcaggttgtcaggtttggtggcaagccttcactgctgagcccttttgttgttctctgggtgatgctgtggttttatgcgttcatagcacaaaagcttcatgtagaatatacaacactaatgtacttttagaggacagctgttgtgctttaaaatcttttgcccgtattgaggaaagtttcttaggtttgggagaggaaaattatgaagattaaattggagtccttggctaagtgcactatgagaacacagtgagaagagtcggttctgtttctgtagagaactgtaccccgccttggaaggacagctgaaagagttccggaagcaccttgtggagagcaccaacgagatggcccccctgaaagtctggcagctgcaaggtaatgggcactcagctcacctgagttgtggtgctgcgttctgtggtgttaaaagactgcagacctcgggctggggatgtagctcagttgttagagtgcttgccaagctgcacagagccctagatttgcctctcagcaccacactaaccgggatttgtactggatgcctgtaatcccagcactgtggctaagacaggatgagtgtcatgcgttccagaccaacttgtgctatagaatgaaaccttgtcttggggcaggggcagggggattggggagtgcagagcttgaataaaatctactagattctaaaagtaccatagatcatgacatgcacacccctacacacacacacacacacacacacacacacacacacacacttttaaaattgaaatatatttatcctctccccttataccttctcaaattcatggtctcttttctttttaattattattcatatatataatatatataatacatacattcatacacacatatatatgtgtatatatatatatgtacgtatatatatgtatgtgtgtatatgtgtgtgtgtgtgtgtgtgtgtgtgtgcatgaatagataatgtgctgaattgtgtagcgttgcttgtgtatgtataccttcagggctgactacctagtattggataaccaactaggggctcaccccctggtaagcccaaatctttactttttaacatgcttgttgttggtgtataaaatctattgatttttctaaattgatttcgtatcctgccattttgctgaaattgttgaccaacttttgaagttttctggttgactttgggatttcttttttttttttttatagattttaaatgtttttttttaaagatttatttatttatttatttatttatttattatatgtaagtacattgtagctgtcttcagacactccagaagagggcatcagatcttgttacggatggttgtgagccaccatgtggttgctgggatttgaactctggaccttcagaagagcagtcgggtgctctaacccactgagccatctcaccagcccgggatttcttatgcatcatatcatatcatgtcatctgcaaatagtttggcctcttttcttatcttgtccccttaatttcttacccttaccttattgctccagctaatgttgtgagtcctttattgaaaaggtgtggggataaaggacagccatgctcctttcctaattttaatgtgatttaagtttttcttcatttaggataatgtgggtttgtcatatatagtcttcattgtggtgaggcatggtccctctagggttactgcctctagacttttatcatgaagccatgttggagttttttcctaaatatattgagatgatcatatgatttttttttttatttgttttgagacaaggtcttatcatgtcctggctagcttggaactcactatatagaccaggctgacctcgaactcagaaatctgcctgcctctctttctgagtgctgggattaaaggcgtgtgccaccatgcgtgcctggctagcaatggttatatgattatctgtctatttatgatttattacattacctacttatttatgttgaactatccctgtaacatggggataaagttaactttgtcatggtgggtattttttgctatctgccttcatgggattcaagtattttagtaaggacttatgaatctatttccatcatggatattgccctggagtgttcttttcttgttgtgttttcattttgatattgaagtactggcttagtagaagtttggacatactccttctgtttctattattttaaaataaacttaagaaatattggctctagatcttctttgaaagtctgatagaattcagtgtgattccatctgggtcagaactcttccattggaaggctttaattgctgtttgaaatcttctcacttgttacaggtgttgatgtttttttttttttttttttttttttggtttaactttggtgttttgcatggatctagaaatttgtccatttcttttatatttttcagcttagaggaattcaggtttttaaagaatttccttatgtggctctgaatttcttgttgtaatgtttcactgttcatttctgattctgttcattttggctatctcattctttcttttggttaggtgggccaagggtttgtcagccttgtttagtttctcaaagaaccagctcttaagattcgctggttctttgtattgttttcttcatttctattttattacattctgctctgaattttaacatttttttgccatcttctggacatgggttttgctttgttcttgtttttcttgagttataccattaagccatttatccataccctttctaatgttttttaaagatttatttgtttattttatgtattgagtacactgtagctgtacagatggttgtgagccttcatgtgtgtggttgctgggaattgaatttaggacctctgctcactccggtcaatcctgcttgctcggttcctgcttgctccagcccaaagatttatttattattataaataagtacactattgccatcttcagacacaccagaagacggtgtcagatctcattacgggtggttgggatttgaactcaggaccttcagaggagcagtcagtgctcttacccgctgagccatctcgccagctcgtctttctaattttttgatgtaagcacctagaactctaagtctgattgatgttagtgtgccgcaggggtttgttgtactgtattttcatttttatttagttccaggaacttcttgagttcttcttcgattcattcatctttcggtaatgtgtctttgaatctccatgagtttgtgtactcactagagatttgtcggctgttcattttaactttcattgcgttgtggtcagataggatacgtggtggtgtttctgtttttctgagtttgttaagatttgctttgtgtcctaggatgtggtctgtttttgcaaagctcccatgggctcataatagaacgtgtattatattctctggtgtttatggaatagtttataatctgttaagatcacttgatgcatgacactgtgtaattctcttgctcctctgctaagtcttgtcattttgagagactattattactatcattaggttggtgctactctttgtctaagatttgtttatgaaattgggggtgccagaatgtcgtgtgtgtatgcttagttacaatgtcctctcggctcagtgtccctcgagtaggggaatcccctcctgctttgggttagtgtagtctggagtctcggagagccgtggctgcttgcttctcggcccttctgtctgcagtgcctctcctcatcctctcttgctgagatggtgcctgtgttcaaagctgataaagctgaggtgaccttagacacagcacagacatggattttgctttttcatccagtcagccggtctgcgtcttttgatttcatccattcagcccgtctgcgtcttttgattgggcaattgaggccattaatatttaaggttactattgaaaggtgtgtgttgattgcaatctttttttcctctgaaagttttgttctcagttgtgctttttgtttcattgattatagcatcatttgttctttctacagacttgcagatatatcattattcatcctttcagtctgacattactgcttgtagtagatattatcttgagggttgattttgtaaataggaattcttttaatccttttatgtcacagacagttttgctctctccttcaaccatggcagatacttttgctggacacagtcgtctagcttggcatccagggcctcttagaacttagtgggcgtcattccagggtcttctggctttcaaagcttctactgagaagacagctgttactctttctgtgggtttccctttatttgtcttgcatttttttctcttgtagctttcatactatgggagtgttttctggtcttgtctttggtgttctatgtacttcttatatccgtgtctatttctctccttagtttagggaagttttcttctatgatcttattgaagatcatctggtctatgccattgatctgggattcttctctgtcatctatgcctatgatttgaagattctagtacctcagattttaaagacagaatggctaagggaagaaatgaaatcctctgtaaacatagtactaggtaggctgcagtgatacacacacccctttttgggatcagatacataactttacaatacaagaaatatgtagctgtttttatgttcctctttgcatacgttttaaaaacccaagtgacagtttttaattttaggtttatatatttttttaaaaatagtgctgagggttagatctaggctctcacattgggcatacacactaccactgatctataaccatggtcttgcatgcattttacaatttattatcattgtgtttatgtaggctggtgtgctataatgcccatgtagtggttagaggacagctttgtagagtttggtttgtccatctttgttttggttccaagaaattgaactcagtcaatgaggcttgcattatatgtagcaagcacctgtactcactgagccttctagctggtctcctgtacgcatttgcacacgtcttcattgtgcatctatagaatgttaaaggcacggaagggcagaatatatgtgcacttttcttttctaaaggatattccaaaattttctcaagctatttcccctgaggtcattgggtaaataatcttaatgctctattttataatacattgtaaatctagacaacaacaggatttgggctcaagttcatctgctaggtgttagttaccacacagcctaggactttatggatggagtcatggacaacgtagtaaaagctccagggtccacctgaacgaggtctgagctaagcctgggacaccgtcgggaatagttccattctatggcgtcttcaccctcaatggattgtgggtagtgttggggacattgtctaccatcattaccatggattcctgtgctctaatgtcacatgtgccgttgtgcagatctcagcttccagactgctgcccgaatcttggctgcttctggggcattatctctggtggtgatgaaggacattagtcagaactttcctaccaaggccaggtatgtgctaaggttttggtacatccctctccttcacattgttccctgttgttttcatgtttgcacagaacatgatgtgactaaaatgtaaaaatgcttggatgtgaaacctatttgtaagtactgttgcgatcagtgtcttctttctaacacgtgacagctgttggctgtgtggttgaagagagagggatttagatgctcttggcactgccccacttaggccacatcagctaatccacagtctggtccatactgccatttttgaatccttatgaagaggggctttgcctagggctcagtgacagaacacttgcctcatgtgcacggggctccgggcttaatcctcagttcttctgaaaggaggaggaagagagaagagggattcagggtcctgacttagaaacagactcagggagactgacttgttcatagtaacagaatgaatttcctgacattgctgtctattctgtagtgttaatctctgactatgaatgtgaggcaaaattgtctaaaagccaaattcttagaaacttttccagatgttgtcttaaataactaaggttaaattcttggctaagagtttcctaagtaagcccctttttcaccgtggagtgcctatggaagatttcttaagccattacgcttaaagccattatgcttaaagccattacgcttctggaagacacacagggttcagcctccacgagaggatttaataggactagcagtcagccggagtacgtttctgctggctagttatctgagcagcaaatgtcacatcaggagtagggccacacagtcaagaaatcggaagccaccagacttgtcacgtcctgccaccatgcggcatctgcagggtgaacacgtttgccagttctgcagctgtgaggtttacttagttcttatttttataatttattgagtcatatggttcatgtctaaaaacaggaaaactgaagacctttatatggaatgctaagctaaacactgatcacacttttatccttttttagagcaataacgaaaacggctgtgagcgcgcagcttagagcggaagtggaagagaaccagaaggtattgctgactgttagaaagtactccactgttgtagaagacactcctgggctgtagctttaaaaaatggagagacttgaattaagttcgtagcatttagtagtattcctcttagtaatactattatcatacagtactttttatcagatttgtagcattttgtttaggagaggctcctgactggaggttgggggtgcggtcaacagggagtgtgggcctcctaagtctttaagcctttcgttcctgcctttggtgcattccacgtggaagctgggctcttgtcctcctttcctgtcagccccacatgtagttcctggaggctgccaggatgctcactgctccctcctatccctttgttccagaatccatccattggcctagagctgtgggtgtgttcagcttatccatctatctacctgtctgtctgtccatccatccgtcctccatccatccatccatccatccatccatccatccatccatccatccatccatccattcacttacggtttttcaagacagggcttctgtgttcctgatggtcttagaactctgtagatcaggttggccctgagattgacctccctctgcctcccaagtgctgagattaaaggcgtgcgccaccacacctggcctcaattagccgcttttacccctagatttcattatgggtaggacgttagttaattaagtagatttgagaaagaaagaaaccaaatacttcacacatatttactaaattaaaaacatcaccatgggtggtggtaactacacctgcaacctccaagtgtgagagtagaggtaggagaactggaacttcttggtccatccattcgtggctatgtagtgagtttgaagccagcttggggcacatcagtctctgtttcaaaaaaacaaaaaacaaataaaaacactcaatttagtaattgcatgtacatttattttccagaatagcagtgttaactatacctttgaatttacgatcccctgtttactgcactaagggtggtggggtctgagagaataaagcctgaaaatgaagtggactaaagtctcatgctaagccagccttactcagagtgtcagacagtttgtactctcagggttaagaagagtcacagagtaaagtatccagtcctaagggcaaaccacatgcggcaaagccatgtttttctagagaggtgagtaaacaaataacaatagccagctgtattgagcagcctgacgtgactcacccctatccaccacacctcagaggagcacagaaacaaggacaattctgtattttcgaaggaacggaggtcacaagactcttgttttgttttcttagagttttctcacaagcacttggaatttccctcacatgactccattcattcttggtccatgttctgacagttccacatgccagggaggcagaatattaacttatgtgagctatattggtatttcttggatttttaatgtttttgagtaaagcatgttatttaaaaatgcttaaatacatgcacacaaaattcttaaagatgaaacacaagtgtgcatgaaatcttaaatccagtgtgatgagttttctcactgtgaaatctcctctgtgtttcagatcttgatctacattgggttgtatgtacaagctcagaattagtctttcttaccatctcagaggcccaagcgagcagatttgaaactgtcctgtggagaaaattccaattcttttctattttattttaagtgtgtctgtgtgcgtgcgtgtgtgcgtgcacatataagtatatcatggctcactattgaggtcagaggacactttgaggagacattcttgtcttttcccttgctgaggcaggctctacttgtttctgacgctgtactgtatgctccaggctggttgtgctgtaggctgggttaacagatgtatgtacactgccacgtctggtgtctcacatgcactctgggaaatgacttgagctggcttgaaggctagtgcttctgcctgcctgcccttccctggtttggaattccagtccttagctgcttcagctttccatcatttctgtggttttgttgtttttgtttttaagcaaattttgttgtagttcatatttaaaaccttttatgtttttttttgaggttataatataattacatctttctttctcttccttccccctccccctctttattctttcagatatatagcctcttttgtcattgctgtatatgtagatgtgtgttttctatatttttgtgttctcatattgttttctgattgatgctgccgtgtctgtgaagcatgagacacaacagcttctcactgtttggttttcccatgcagtgctagaattcagaagtataccttttcctagtcctctgagtactggaaagtgaaggtgttctcagagttcatccaaaattctgttgttggaatctggtaactccttttgcacggcactctactgtctagcaatattgtatcactgtactgtctcgtgtactgtacctctgtcctgtctagagaactgtatcactgaactgtctagagaactgaatcactgcactgtctagagtactgcaccactgcactgtctagagtactgcaccgctgcactgtctagagtactgcaccactgcactgtctagagtactgcaccactgcactgtctaaagtactgcaccactgtctagagtacttcttccagtcctcgactttattaaggggcccttgtgttgcttgccagctcagctttgattggcatcacaatcaggaaaagcaacagaaacataaaaaagcaaagcttatgcactgtagtctagcatttgcagacagaggtagggggaattccagagcccatgtgacttgatagaagtgagaatcttcctgagacactgactgtagatagcgtctgccttcagtattaaggagataattgtaaagggctttctaaggcagtgaacaaacatgtacattccattggtgtcccgcataaggcagaactgtaagctttagttctttgtagtccagagaattattggaaaaggaactcaaaagaataaatatcttacttattgtgggccaagaagaaacatgttattttaaaaattaaatagagataatatttgttcagttcgtcctacttatattatgttgtgtgtgagggatgcatgtatgtatgtatgtgtttgagtgtttgtggaacacatttttgtgggtacgtatgtatttgggtggatgtgtacagagcctgggggttgatgttgggtgtctttctgatttgtgccctactttatttactaaggcagggtctctgactgaacctaggactcacacattcagcttatctagctagccagcttgtttttggggtcccatctctcccacagtgctgaggttacagatggatctccatgcctgcctacctggccttcccgtgggtagctctggggatttgaaccccaggcctccctcttgcatgggaagcactttctttatccactgagccacttcctggcccctctggtttctttcctgatacgtgacccttggtgttcctgctccgcgtgcccaatgttatagaaatcatcttgtcattatcagaatggagggaggaggggaggatgaaagatgaagacccagtaaggcagtgtctttgctcattgcagtaggtgctcaggaggggaggatgtgtggagaatatagaagccagtcttttgtttgttttgttttgtttttgtttttgttttttgaggcagggtttctctgtataaccctggttgtcctggaactcactttgtagaccaggctggcctggaactcagaaatccgcctgcctctgcctcccaagtgctgggattaaaggcgtgcaccaccatgcccggctagaagacagtcttaacctagcctaggaatgtcaagatttatgtgggcagtaaagcccaggaagagcaagctttgctaagtgtgctctccctgcctttgtgtgtgctttcagtatttcaagggaactataggattacagcctggagactcagcgctcttcatcaatggacttcatatcgatttagacacccaggatatattcaggtttggaaaatatttctattctctccctgccccctccctccctccttcctcctttttctctcctcccccctccctccctcttctctcccctcccttccttaggttttataactgacgtgctcaggttcatgtttctgctcagcgtggcatgagggaaggctcatagctcatgatgctcgctggagctgggctcatgctctgatggggtgtgcagcatgaatcttcctgtcttgtggatcagggcatgtgcaaggcttgagtgtttttaaggatatatctttggagttgtagttatctgatgtgaacctctattcttcacccacatatgcatgcatttgcaaacatgtaaactacatatgtacacatacatgtactgcatacaatatgaagtataaataaacaaaggcctgtgaaatatttcagcagttgacatcacatgacatctggcatgcaagcctgacagcctgagttcagttcctggaacccacatataggtggaaggggagaactgcatccacgcacatgcagacgcactcttttttttaaagatttatttatttattctatgtatatgagtacactgtaactgaacagatcgttgtgagccttcatgtggttgttgggaattgaatttcaggatctctgctctctctgatcaaccctgcttgctaagtccctgctcatttcatcccaaagattttatttattattatacataagtacactgtagctgttttcagacatgccagaagagcatcagatctcattatgggtgattgtgagccaccatgtgattgctgggatttgaactcaggacctttgtaagagcagtcagtgctcttacccactgagccatctcaccagtcccgcagacatactcttacacatcctacacaaagtacatgcaatatttagtaaataagtatatttactaaaacacaaaacgtggtgtagggctaggagatggcttagtcagagaaatgcttaggcctgcgatcctacttaataaagtctaggctttgtggtatacatctgtaattctgctgctggggcagtgagacggggatccatggggcattctgaccagctagtattgatggatcagtaaactccagggtcagtgagagactctgcctcagaaaataaggtggagagcaatgaagatcctgtcactgaccgctggcctccatgctcacacacaggggtacatgtgaacacgtgcatgggcacacactcctccactcacataccatgcagtataaactgagggctatttcattactcatacagaggtaatctaagtttatactgagagatgctctgcatgtccactgaggatttaaatgagcaggaccaggaaagcacatgaagccactgacctgcagcctctggccagatgaaacgagggaagaagaactccgtgtgtgtgtgtgtgtgtgtgtgtgtgtgtgtgtgtgtgtgtgtgtgtgtgtgttgactgttgtgaattgaatccatggcttcatatgctaggcaaatgctctactcttgacaagaaaccttgcttttcctgcagtctatttgatacattgaggaatgaagcccgtgtaatggagggtctgcacaggctgggaatagaaggcctttctctacataatattttgaagctgaacatccagccctctgagactgactacgcagtagacatcaggagtcctgctatttccgtgagtattcattctgagtggtcatgaggcattctggtcagtcactttacagctttttaatttgtgttttatcaaagatttacaagtgcttattatgtgagactgtatctctgcaataagatgggcatgcgctttcctgactgtctgtctgtatgtctgtctgtctgtctttctctgggtttaaaggcatgcactaccactctgggcagaagataggttttcacatgccctcagaagttgtcttccaaccattgtgaggaagaagcattctttccagggctggagagacgctcagtagttaaaccatacactgctctagcagagaccctgagttcagctcccagcatctgcatctggggttttacagtcacctgtgacttcaggtctgggatgatcagataactaaccccaggctggccctcatgtgcacatacccacacgaaaagtcaaataattaaaaaaccatgaaaataaatcttaaaaaaaaagaagaaaagcattctctgtcttgtgtattcataggatttacatgaatatcttgggaagagtatgtactttcccaattgtgactcagttttctgtgactctgtgacaacatgcatactttaaacctattagtacagcatatatttccagttagtagccttatttaaaaggaccttattatctgctgtgtgatctcgatgtcatcggtaaaaagaacgtggggatagtggtgccttgtctccctccttggcttctgtttgcatttattctggaggcattttattaaaagaaaggtgctatgctgtgcatcagacatgcccatcctacagcctttcagccgcatgtatcccaggacagccaccgctgcagcccagtgtatgcgtagatgttagcacttgggctgcatatgggtaaggtccttgtctgcattctgtcttggtgatagaaccattgcgtagtctgatgcacacataccgtttgatttgtgactaaaaggttttgcttataaaggataaggaaaataacatactatggagatcagtgaccacatgactgatcgccattcttatggaccactctctgtgtaatcattgctgtttctgttgaagctctctctctctgtgctccttcctagttacctcctccccttcaggcagcctcctccagaggctggggtgtgttcctctgtctctaattgtatatctttatttctttttaagggtttttaaagtatttttgacagtctggtgcttctgtgggtgtctcattccataaccccaattttatttttgtaaccacgcgtagggtctgttctccacactctctttatagatgccaagggcccagcatgtagcaagtaatacttaaaagtcttcttaaatcaggcaattaagaacattttaatggtggttttcaattattcatattgctgggtgtggaagcccacacctttaatcacagcactcaagaggcagaggcaagtagatctctgtgagtttgaagccatcctgacctgcatagtgagttccaggcaaagctacatagtgagaccctgtcttaaaaaataaagtaagcaatcaaattcgcatgggtaggtaatgtttttacttgacaagccttctctgtaaggactgagtgaggatggcatcatcagcactggagcattcggtggtctgcgaggtcttcagctgtgttaggttaactagacactgacattgtaggagcattcctgctccttgggtttttaacattttacttattttttaaaaaaaaagcatcattcagggggctgaagagatggcttagtgattaagagcactgactgctcttccagaggtcttgagttcaattcccagcaaccacgtggtggctcacaaccatctgtagtgggatccgatgccctcttctggtgtgtctgaagacagctacagtgtactcacatagataaagtcaataaatctttttcaaaaacaaaaaacatcactcatacttttacagatgaaaattgaagttatacagtggtgttttaggtatgatttctattctgagatgaaacaccatgactaaaagcaagctagggagaaaagggtttatttggcttatgtttccataacattgtcactgaaggaagtcaggacaggaactcaaacaggacaggaacctggaggcaggagctgatgcagaggccatggaggcatgctgcttactggcttgctctccctggcttgctcagcctctcttatagaacccaggaccaccagcccaaggatggccacacctacaatgggatgaacccttccccactggtcactaattaagaaaatgcctacagctggatctagtggaggcattttctcaattgaggttccttcctttcagataactctagcttgtatcaagttgacctaaaactagccagcacaggaggcatatggtaatagtctcctcaccagccatctttcctctcagagtggtgagcaggattgctgtgtgtccttccagagccctctgctcacataagcaggagcatgtcttgattttccctgctctccctcatccacacgacaggtgcttattgtctctgtgccttcttttctgccttcctgctgttggagattcttccatgttgggtctctgtgacctgtcttcctgcacacatgtgagaggtcggttgggatggatgcctggatgtggagtacttagtggttctagttagggcttaatgagtattgcagacaccactgtggctggagggctcctgtgtgctctgtatttttgcccagtcttaggcattgacgaactgttaactttttccatttccaatttaatgaatgtgtagtttccttgtgtatctgtttacatttcacaaatgtagttgtgaaatgtgtagttgtatgtcttgtgtttcctggctgcttatgattcctatatagacttactatgcttattcctgtctaatttcctgtggatttccttatttttttaagttgtatttgttgctaatggtctttagttgcttgtgttgattgcagctaagctcccctagttcttgaccgtgctatagttactcatttttctattccacctttgtgtatttgagaacagtctcgccttgtgtgcgtgtgtgttttctggacacaaggtcttgtatagctagtgttggcatcagtctcagtgtggtcatgacagatggttggatacccgattctcctgtctctgcctcccaagtgtggcattaaaggcctgtgccaccatgcccatgactgtgtgattcttagtctcattagttaccgtttttcatcagtgactaatgtgtatgtattatgttgtgtgttttgtttttgttttttatcattcaagtgggtcaacaacctagaggtcgatagccgatataactcatggccttcaagcttacaggagttactccgccccacgtttcctggcgtcatacggcagatcagaaagaacctgcataacatggtaagtagggcgcttgctgctgtcctgtagcactgaccggtagttggcttccagtagccgccattctgtgactgtcgctccccacagccctctctcttccatcacaagtagcatgttgacatttctccctatctgtgcacagagttcaagcacaaagggctttggaatgtgttcatgtttcagcaccgtgacagcgaagctcccaggcgaggattacagatatgcagcaccaagcctggtttatgtagtgctggagattgaatccagagcgtcttgtgtacttggtgaacatttcaccagatgagtcacagcccagtcctgagcgacttcattatgtgagagaacgtatacaagctgggtagcatatagtgatgatttaatacgtgatcactattgctccgacttaagagatgagttctaaattgactgttaattcagggagccttaggaacaaacacaactaaaaggcaggctccgtgtcccacggtgggagacctgatgacacagacatttgttggttattgtagaacaggcatcagcagttgggaacaccagtgaaatccatgagaggaaacatcacatctcttcccaccaccacggtctttgcatgttgtgggtggcagctgctgtttttatttataacccccttatttgtggttcagtggtattttgagaaagattagcttcatgtgtgacgattcctgtcatttttcttggcccaggaatacttgaatgtcatttcatgggttctttttccttttcctctgacaggttttcattatcgatcctgtacacgagaccacagccgagttgattagcatcgccgagatgttcctcagcaatcacataccgctaaggtaacactgcactcattagccaagcgttgccttgttgcttggattacatgtctggttccattgaattgtataattaatagtcagactcactaatgcagttttatcgtcttcgtggtaagacgcctatgccttttgggactgagaatttaattccaaacacatagaagcttaccgccattgaattattaacagctggctgtgtgaaaatagttcatggtcttcacttgcttcctattggaagggggcatttctagatacgtgcccacatagccaggccagctctaatttcagcaggtagtgctttgctaggggcttttgttaggttttcaagaactaaatgctttagaatgttaagtagccttctgtagatacagacagatacatctacgttagttgtattggcaggtctactcactgggcaccaggtagctaggtttccctgttcatttcatagacaataatatatgataatatatataaatatatataatatataaaacaatagtacatatacagggctctggaaggcctatacaaactaggctggccttgaactcagagatccacttgcctctgcctcccaagagctgggctcaaatgggtgtgcctctataccagctaagacgtgagtttgtaaaaatgaaggggttggagagatggctcagtggttaatagcacctgctactcttccagaggatctgagttcaagtcccagcactcatgtcaggtgtctctcttctgcctgaactccagcaggaggccgggtagaaatccccactccctggtctggcatccaccaccacatatacatgacataggctcataagacacatgcatatgactggataaataaaaaataagggtctgttttaaaaagtgaagaaactaaaggacaaaagagctcctagtaagcaaacattgctcagtgttcactgctcagccctcactgagttgtgctcggcttgtatgaacgctctgtcctctttgttgtctcttggaacagcttttgcaaaactttaatggctgtaagaatgtgtttgaccgagtgctttaggaaactgggagctctgtggggaggacccaggtttcccaggggctttgaagaaaaggattatcaagatcagaaaaagcagagctgattgagtgctgtgaaatcttcatttaaacacagcatgccatctgtatttaaacacatcttttaacacaactttccccatctgctgtgtttaaagggaatctgagaacatgtgagctggttcacagtacacagtggacactaactaaacttttgtgttgtactgagggccaggaagattgcagacgtagggaaagaaggcacctgagctgcgcattgaaggggagcctagaagataggctggcatttcactcttggtgagggcgatctgaccctgccccgtggaaagcaggaaggaagctaaggcagagactgtaggaatgcttcttactcgtgtgctttttgtggcttgctcagcttgcttttttatattagctagcccatttgcctagtgataaaccacccacagtgggatgggcctttctgaatcaatcaacaatcaagaaaagtcatacaagtctgtctacagtccagcctggcaggcagttcctcacttgaggctccctctttcttgtatcacatcaacaaccaagattagccatgtcttacacataggtatactcttatgcccctctacccctgtgtgtgtgtgtgtgtgtgtgtgtgtgtgtgttatataatcacacaatgaaatattacccaatgattaaaagaaattaggagactgggtttggttacacatgttttttctttcagtatttgggaggtagaagcaggtggaactcttgagtttgaagccagctggtctacagagtgagttccaggacagccagggtattcagttagacactggctcaaaatcaacaacaatgaaaaccaaagccccactagctgtgtctgctgacaccggattagattcccagcactcggaaggcacaggaagcagaatcctgagtttgagaccagcctggactttacaatgtggtcagtgtaggttacccatattctgtctcaaagaaacctgataaataaataaaaactaagtcatgttaattagggctggcaagatggctcagcgggtaagagcactgactgctcttctgaagatcctgagttcaaatcccagcaaccacatggtggctcacaaccatctgtagagctacagtgtactcatatacataaaatagataagtaaatctttaaaaaaaggtcatgttgattaaatagctagggctcagtggtagagcatttgatttacatgagtgagactctaggcttaccaaatctatgttgattgatacagtgtcattaagtaagctatcatagattgtggttcattgttgctgtggctcatgttacagtgcagtatcaactatttacattatagtgtccaccaaataaaactctcctctgcctcctgtttgcccttcccgccattaacttgaaccttcggacactactgactgttaactatgattataggtttttatccttttcaggatgtcatataattgcagctgtatactatgtagcactttaggaggacttgtttcagttagcaatgtgatacctaggttattaagttgtgagagttgacacataataagtccatctatccctgcatccatccatgtaatctaggctggtttagaactcctgactctcctgcctcagcttcctagatatagagattatagttgtgtgccactactgcagcctcctaatttcttttcatcaataggtaatatttcactatgtgattatactgcagattgtttacccttcacctatgaaggacattgttttagtctacttcctgttgctgtgattaaacagcatggcagaagcaacttgggcagaaaggagttgatttcatgtcacagttcccagtccatcatgaaactgaagtcagggcaggaactccaggcaggtacctggaggcggggactgagaaaagccatggaggaattttttctggcttgctcctggagtcttgctcagcttgctttcttatacacccaggatgacccaccaaggggtggtgctgcctaggctgggcccttcatatcagtcaaaaatcaaggctgtgctcacaggacagtctgatggagctacttcttcaactgagattctcttcccaggtctaactagatttctggcaaggtgacaaaaacttactggcctacctgatgtttagcttaacacacaaatatgtcactattaagtcaaaaccttcccttttttgtccccaagatctcatgttaatattaatattacagcacagtctaacttttaaaaattccagtctttgaaaattctgttatttaaaaattcagtcttggtattttctatgccgtgtgtgtgtgtgtgtgtgtgtgtgtgtgtgtgtgtgtgtgtgcgtgcgtgcatgcttatcctgaagcttatacatgtccagtacagatgtttgtgtgggcaaagttctgttgacaagatttgtagattgtgtgatgagtatatgcttggtttgtaaggagtagccacagtgactcacagggtgttgaaccattttgcttcttcactgacagtgacttggggacccctgttccttgtcagcagcacttggtttcttctgccatcctgtagatgtgcagccacaggtcatgtgcaactcatgattctaaaatggcatagggtcttagcattttattttgtgagtgtctatccagaaattgtctatatggaccttttgaaacaggaccttgctgtgtagcccaggctacctaaaactcaatatgtagcctggggtagcctcaaacacactgtcctgcctcagtactcccaagtgctgggagtataagtgtgtgctacccttcccagcgtcttcagcccgtttaaaacccttgttgttagatggatactgagttttaagagtcattgttatatctctcagatgggtgtttttcactagcctgccattttccctttccttcattggtagtctcctctcccccctccctcaaagcaggtatttcttgggttttttcaagatagggtatctctatatagctctgcttgtcttggaactatgtgtagatcaggctggccaagaactcacagagatccacctgcctctgctcagtgaacatcttcatactaacctgtctgtgtgatataagacaattgtttttcattttgctttccatttattattgttattattatttgtttatgtatttatttttggtttttcaaagtaggatttgccttagtttggttttattgctatgaagagacaccatgaccaaggcaagtcttataataaaggacaatatttaattggggctggcttacagtttcagaggttcagtttattatcatggtgggaagcatggcagtaggcagacatggggctggaggagtgagagttctacatgttgatttaaaagcagccaggagacttactttcttcattgggcagagcagagtatatatgaaaccctaaagccccgcctccacagtgacacacttccttcaacaaggccacatctccaataaggccatacctcttaatagtgctattccctatgtccaagcattcaaatatataagtctgtgggggccaaatctattcaaactattacagggtttctctgtgtaatagctttggctgtcctggaactcactttgtagatcaggcttactttgaactcacaaaaacccacctgcttctgtctcctgaatgctggggttaaaggtgtgcagcaccattcctggctgccttttgtattgctttagttatagttcacttttcttcagttgctaggttttgttttgttttgtttttcgagacagggtttctctgtatagccctgactgtcctggaactcactttgtagatcaggctggcctcgaactcagaaatccgtctgcctctgcctcccgagtcctgggattaaagaaactcccgtgcctgccaccatgcccggcagtttctaggtttttaaaatgaatttatttattctcagtgtgattgtgcctgcttgtctttatgtgcaccacctatgcacaatatgtacaaaggctggagttggacatcacatgccctaaaactggagttagaggtgctgctgagccatcgttgtggatgctgggaatagatcccaggtgctctgcaagagcaggcagcactcctaataattagttgagatctttctccagccctccaatttaaaagcagagcagaattactacctacaatagtggtattctttgtgttagtaaagaaatctattcaggattctgaaacagacataaactgtggaaaagcctaacctgtcctgtgacctgactcttgtgttctgtaaacaaagcatgtgtactgttgctggtcctgcttagagtgggaagtgagctgtgcttcttggttggggatggacactggggctctgcccacctcaagcgggttgccttataagatgcccctttttctgctcccctctgcaggattggttttatctttgtggtcaatgactctgaagatgttgatgggatgcaagatgctggagtcgctgttctgagagcgtataattatgtggctcaggaagtggatggctatcacgccttccagactctcacacaggtatgtttttaccccaaatggcaaatgcttagtttaactgactctggtttgtggtaggagaagaagtagattctcatatatactctggtgctttatacttcagggttccttatgctttattgtgtcactggtgagaatgtatagattgctatggttttctttttcttttgtatgcttggaatttattattatgtggggcttggcggagtcaggggtgtggaggctgcagtactggtgggaggttgagtacaaccttcagaatgggtcctcgccttctgtcacaggatctagggatcaagcttgctgagccttaatgctggccgttagatgctgttctttaggggccttctgggatattatagaatgccctctgcttatatgaaatcaccacttaatgcctttgggcaatgtgatgttctctccttgtttttaaaactacccagtcttttctcttttgagactatcttatgctttcttttctcccttccccctcttcttcttctcttttttttttaataaagatttatttatttattttatgtatgtgagtatactgtagctgtatttagacacaccagaagagggcattggatctcattacaggtggttgtgagccaccatgtggttgttgggaattgaactcaggacctctggaagagcaattggtgctcttaactactgagccatctctctagcccccaccttccccctcttcttttcttcctctctctcttttgaagacagtcagtcttctatagccagggctaaccttgagctcttgactctcctgtcttctctccagggctggcctgtcaggtgtgcagcaccacacctgcttgcttggttttttgttttttccttttgagataataaggtctttctgtatctgtgccggctgtctcagacatgttctagtacacctggcttctattcttaaacattgttagcccctgcacttagggtccaaagtgtttatgaactgatgggaccatttcaagaaatctttagttcctgcaatcaggtggagtggcatctctgagttcaaggtcagtttcatctatatagcatgttccaggcgagccagggcttcatggtgagacactgtcatgaaaaaggaaggaaggagggaagggagagaggaaggaaggaaggtaggtaggttggtcggtcttcagtttctaattataggcatcttgtgagagatattgaaatggtaatgttgctaagaagtttccatttgacttttaagaaaagtggtcttatttttctaatgtgtttagagatttcatcacattttaaatgtggatttgaaggtgtggttggttccctgcttttctttccttagatctataacaaggtgaggactggagagacagtgaaagtggagcacgtggtcagtgtcttggagaagaagtacccgtacgtggaagtgaatagcattctgggaattgattctgcttacgatcagaatcggaaggtaacatgttctttggaacttcttatagccgtggtattgttaacttgactgcagcctcagactctccttcttgggctatgtggtgtctatactggggtgttgatgcgacagaccactttttaatcttggagacaggatgtcactgtgcagcccttggctggccttgagctggcagagatgagctgcctctaccttgtgtatgctgggattaaaggcaagctgctaccacacctggcctcacttgtcagtctttggaaagtgagtctatttcagaaaatagtacttaacaacttgtatgttaactttaaatcagaaaacaattactttttcataaattataattgtgcttgtataatgtgtgttctggataaaacctattggaagtatagagccaggaggtggtacagggaatcatatgtattgtagtaattttacatcattgctcagcctccagatgggtatgttctaagaaatgtaataactagccggatgtggtgaacgccttcaatcccagcacttggaggccaaggcagaagagaagccttcaactttttgtgaggtgacagaaacccaagtactttgtgaccagttagtacatatttacatacctataatgaaaaagacatttatttttacatcgtgagaggcgttagaaaacactttgctgtattttggctttagaaaacagtaattataactacaaaaggtcttggaggttggcaagcactacaagactcagttccctttagcagcctgcctggtgtgggaagagtctctctgcacaccgctggtcactgatgcctaagaggcccatttcattcagcccttggagtttattttcttttttaactgctactgtgttacagttctctggggacccctttgccttcttgacttgactccgctggctgtcagtaagctctctattgtaaagaggaatgtactttcaacaattgcaaatatattttagaagcctggagggaccttcctcacatatagataaacatgtacacactccatagtctgtaaagtttttgcttcttagaatttagtcatttaattccacacttatcaagtaaggtattaactatgataccactttcttaagaattaacgtacaaagtagaaggcttccctaccacttaaaaaaataagaaatagctttagtcatttctttttgttatgtttctgttttttgttggtggtggctttttaaaataatatttatttgttgtgtgtatattggtgagtacatgtgttccgtgtgtgtgccggggtccctgcgctaacagaggggtctgacgcacaggagctgcagttctaggtagtgagccaccgtgtgagccaccgtgtgagcgtgtgctggggacagaagaggggctctgcaggaccagcgagtgcgcctaatgactgagttgtctctctagcccttcttttgttcttttttaaagttcatttttctttcttagtattgtgcgcatatggacgttagatgacaactttgtagtgtctgttacatgagttctggagatcaaattcaatctgtgggcttacaccaaaagtgtctttacctactaagttatcttaatcaccctgctaattttattttttttaaatctaagatggcatgtaagaatatatgtttttgttctatgtgtgtcatgagggggaaatgtgtgctctctctttttcttgtcctttgttttctaggaagcaagaggctactatgagcagactggagtaggccccctgcctgttgtcctgttcaatggaatgccctttgaaaaggagcagttagacccggatgagctggaaaccatcacaatgcacaagatcttggagacaaccaccttcttccaaagagctgtgtacttggtgagtgatattctcacatgagctttgaaagccagtggcttatgctagcttatgtagcaggcagtaaaattctgtatgatgacaagggtttatttcattcatgtctttacttgccgtgctgggaatggaactcagggcctcatgcacactagtttagttaagtctaccactgataccccccatgctctaggttaacttcttgagatgtgtgagctgatgattctgacaacatacatagtcatcaccatcacctctgattacatatgacatcaccagtgccagaaggagccacagcacattttgtccctctctttgccactggcatttgacttgctacatctgtgggctttctcttccgaccgtttctgtagatggaagtgcaggggtctgactgctcctagattgctacgatgctccttcacattccagtcctccatctcaaacccgagttactgtgttagcgtaaactaagactggctgtgcattcccttatgtttggtgtgatctgagaggccactgagtagcaaggatgcttctgtcactgcctgagagttacatcccaggttctagggactaaaatcacccagattatttgctatctactatcctctttcttagggagggctggacggacacacacacacacacacacacacacacacacacacgattgaatgagagagagaaaaagaccctcataggatgcatttcttagttaaataatcttactagggcatggttatactacttttaattctatcacttaggaggcaagagtcatatgcaggccgatgagtttgggaatagcctggtccacatagtgactttcaggctagttggggtcatatagtagacccaatatctgtccgtccatctgtccatccatccatccatccatccatccatccatgtatctatatacatacatgcaggtggtggtggcccacacctttggtcccagcattcagtaggcagaggcagacagatctctgagtttgaagccaacctggtctacagagagagttgcagtacagccaggactacacagagaaaccctgtatcaaagaaaaaagaggaggggaaaaaccccccacaaaaacaaaagtcaaaatcttacttgaaatatctttgtgttcattgtctatctgtttttatcctgtcagctaacatctgctaatgaacccttcggggactgtgtcaattattatgtgtattttctttccttgcctcctttctttcctccttgactgcccacctatacctccatcaatcattttatgtgtatgtgtgcacatgtttgtgtgcatgcatgtgtgagtgcacactgtatgtgtgtacatgtgtgtgtgttgatagagcttttttgttaggttaggctgggctccacttgccagtcttcagcctcagtcttctgaggaccactagatctgctttttttgtttgtttgtttgagaccaggtctctacatgtactccagactgtgtttgaactggcaatcctcctcttctgctgccagagagtaataggactataggtgtgtgccaccagctatttttaactccaattttttaattggttcttttacttattttatgtttttattgactgtatttatttggcaatcttgagttttacacttcgttcatggccatggctgctgctgctgttggagtatactaatacagattatgtaagttctttgtgttttaggtctactgtttgggtttttccaagcatggtatatattggccacttggattttgttgatattttgattttgtgtgtattttttttctttgattgttgtagtatttttcttgttctaattggacatgtcagctataataactctttgaatctgagtcttcaccctatgagggagacgttcattcttgtgctgttcgttgttgttacagctgttgcttggtttataatgactttcttaaatagattctttgttgtgtgtgaactctgccaatatctacttagcatattaatttgctagtaagtgaacatatttttcacttattaggtgaaaattagatggaaaatatttccccaagtatctcagttggttcacattgggacgtgacttgaatcctcagctgatcttaaccgccttttgtgtctgtgtttggtggtaggggttgaatcctgggccttgtgtatgctaaggaaacactcactctgccacaccccagcggcagccttcagttactgcttgtctagattagttatcagagtcgagggctccctgtgggttttcctggccatttgtggtcccctggatatcgtgcttgagatctggagaacatcagaaaatggaacttccctttttccaactgtttatttgaccagcttcattttagcccatctgatgtgtaataatttctcctaattgtgtttgcaaatatcccagggaaaagctactgagacattactcagctcaaataaagagaaccctgggatttcccagaacctatgtaaaggtggaaaaagagaaatgactccacacagtggctgtgtgcctcccaccatgggaaagctggcctggctgtcttgttccgagcctcctggcaccccagtgtttcaatagagttagaggcactgtgtgtgtccatccatactctgcttgttcctgggctcacatgaacatctgtccttgactgttaacatctagccagctgttacaaagctactaactttctatttctagtgaatttcattgctgatactccttaaacacttctgccccttttcttttttcatacagggtgagctgtcccatgatcaagatgtggtagagtacatcatgaatcagccaaatgttgttccaagaatcaactctaggattctgacagctaagcgagagtatctggacctaacagcaagcagtaaggaacatttcagtagcaactcttggcttttggatttgtgcttcacattcttaaatttattagattataatattaagaagatagctcaaaattatggcctgtccttctaaactcacaagcatttccttctagaaaagataaatctgggggctgaagagatggctcggtggtgagaagtccttgttgcttttgcagagtacttggatatggggtccagctccctctctggtctccagaagcaccagactcaaacatacatacatgcagtcaaaccactcatacacataaaatacacataaaatacacataaaataaaaatcttaaaatggcagtctagctgggtacagtatatgatggtctgtccccagtgggaaggctgcagctgtgcaggtggctgtaggagctagagcctgggtgacactctcaggagtttaaggtggggtgggaggctgccggaggagcagtgtaatggctgtgatggccagcatgggcttgtgacgcttgctgagatggagatctgggtgctggagactacttacagagccatgagaatttaattcctcattgaccttcaattcagttccaaggacttcaacgatagttctgcctttccaacattttagtctgtcaaaattcccataaaacagtccctcactcagcaaagtctcttaactttaacttctccctgtcacatgtgagcttagctcggagggcagctttgatggaagtctccagccctggagccacccagctcaactgcttcacacttaacacaggataaattccctgtacaagaaacaactcccgtagccgggcgtggtggcgcatgcctttaatcccagcacttgggaggcagaggcaggcggatttctgagttccaggccagcctggtctacaaagtgagttccaggacagccagggctacacagagaaaccctgtctcgaaaaaccaaaaaaaaaaaaagaaaaaaaaaaaagaaaaagaaacgactcccatgtgatgacacaagaaagaatggcccgggcacaggagaatcccattgtcagagcacaagcaccaccaaccgtctggactgtatgcagggaaattgctcaagccgtctcagatgccgtgcccaagaggaaatgtcagtcccatgaggcctgcaaatacagttcaaaagatacaaacttgttggcaacagtgcttctcctcgctgtttagggacagggtcactcacctactggagctaaaggcttacaacaaagccgagctgcttgctcagctttggaaaaatggtgtcaatcgcaaacccagctcctttggagcagttctgcaacaggtggctgctctgcgtcctaaggccctcctccccttgccttcaagggtcatgtgtttaaggagattcagtgaaactgaccaggatgcagccagccagccagacagacagacagacagacagtcagtcattgagctgatgccctgtagaaagcttagagctctggcacaagcctttcagaatctcctgtatgctccagcagagatgctgctgcgccttctcctggaaatgcgtccttgcattcagatttcattgatgatttattgaactagaaagcttgactatctcacttgacaaaagagtcccaccaacattaagtggccatttgaatcccaccagtgaaaaatctttgcaggcttccactcttccctgcagctgctgccgtccccacgcacctgacccaggccttcagtccccctgcctgcctcagatccgcctgagactatacagtacagctcctgttccccaagcactccagacggtcagggcacaagaccttccggttgacagttttagtcaaagtggcagcatctttgagggccagcgagacgacctctaggacttgtctggaacctgccgttgttaattatctgtcagtttcagtttttcctgttttcccaccagataatttttatgtggatgactttgccagattttctgccttggactctcggggcaagacggctgctattgccaacagtatgaactatctgacgaaaaaaggtaacccacttgggcttgatttggtccctcatgtttattctttatttagtatttacaaataaactccatctgcaactgtaggaaaaaaaacatttaaaatataattctgtatatgtctctaaaaattcaactattttctttaaattttatgcttatcattaaaattgataggaaaagcccttcatgattcaaaatggagaacattatatcaaaatggttttgtctgacttcagtatcatcctaggtttacttttattgtagaacttagaaactggattctagaaagcctcgtgtgactcgttagagtgattttatgcagttacttagttaagctacccttgtccacagtcactgctttcatctgcagcaggtccttccctagagggtagggggtggttgacaattagtatccgtccagagtggttctagcaaagcttgctgctctccaaagcaccggttgtcattaagagagataattttgtccagctgtggtcttccttcagagcctttggtttcctgaggacttataagcttatgcaattagtccactgtgcttctcaaagattttgtctccgaggggttctagagcagcttgaacatggcgggagccagagcaggaagtagcacagtcctccatctgccttgattgctaagtgtacaaatgaccttctcttctcttctgctttttttttctttttttttttttgcctttgtccaggaatgtcctccaaggaaatctatggtaactcacaactccagaatgttcccttcattttcataattaatttatatggtttcaggaccactgttattcagaatgtattgacattccttgtgttgtttctgaaacctgtgggtaacagtagataaacaatgtgaatgtttgcagacccttcggaaagttgtaaactaacgcgattggagactgcattgcgttgcccacatgtttcattgtatatgctaacagatcgcagggcagttaatcaatgcatgctcctagtttctcactgagccacttggaaggtccctctgcttcatgttagtagagacattttgctattttttgttttctgtctctatcgtttctctttgtgcatgtttttcagaaatcctctggcctgattttaatgtttcgacatagactatctttctttgcttctagtgagtttgttgtccttgtttctctacagatgattcttttattagaccagtgactttttggattgttggagattttgatagcccttctgggcggcagctactatatgatgccattaaacatcaggcaagtgtctcagatttcattctgggggggggggggattgtggagcgcctgagcacccctgtgctagtgtggttattttagtgtttctagtatttctttgtgtgctgaggaaaaggaacataggaaaaggagtcttcagagggtgtcagctcctaagaaaaggcgtctaagcctggagagcccagccccacttgaggggaatagatcctttaagagcaaatataatcaaatcctgaatgtagaattttctgcatgactgcatgttcctgctgcagggatcttgccatgtactgtgacatgaagagaggctcacacgtgagactgagccaccctatagctccagatctctgtttcttctcttatacatgcttgcttgcatacgtacatacttacatacatacatatataaatacatacacatatttatttatttatttatttatttatttatttatttatgggaaaagacatatacatggtacggtgcatatatggagatcagaacacatcttagggaaagtacttcccttccaccctatgggtcatagggattgaactcaggtctcaattggtagcaagcagtgcctttactggctgagccatctcactgtccagcttacattctcaatataagtcctccatcttcttctctgtagagtctgttttgttagatagttggcctttacccaggcattgctgcctgccggcatgtagaaagaccatgtgaatgaaggtggatgcacaggaacccgaagaaaagatggaatacagagtattaaatgtgctgaggaaagactaactcttgttagtctctggtgtctgctgtattttatagaatgaagctggaaaggaaggctggggccagtttatacaggatttagcagagttgaccatatattatcatctgaattttattttgaatacagacaactactgaagatgtttagaagagacattactattatggaacataactaatgtaaattcgctctggttgtatagcccaggctggccttgacctttcagccatctgcctgcctctgcctcctgagtgctaagatgaaggtgtgcaccagcatgcctggtcagtgttacctttaaggttcataccatatagcatataactcttatctcccctgttttaaatagaaaaccagtaacaatgttaggataagtatgatcaacaatcccagccaagagatcagtgactcaagcacccccatcttcagagccatctgggcagctctgcaaacacaggcctccagctctgctaagaacttcatcaccaagatggccaaagaggagacggcagaggccctggccgcaggagtggacattgcggaattctctgtcggggtaaggctcgcaggttccgaggctagcctggtcattcacgtttctcccctgggctggtagatcctcttcatgattgggtttctaatagcttctgcgtctcagggtatttttgttgttgttgaattagagtcttagtaagaaataattttgtcctgttacagtttacttttaaacttgctttggtttcagtatgcccgtttaaaatgtttgttccattttgtctactctttaaagacaatatttaatgtatttgtaaagtaaaaagcaggtttaagatgcaatgggttagaaagtcagctgttcctttttccattattcattggtttaatgttacttgatttttgtgctttttatagtttgaaattatctgataaaatcacaaatatattgagtttccgttagaggaaatgactgtcacttcaagttaacagatttaaaaatgaaaaaaaaaaagttgctgagagtagactggcaggtaaacagatccgcagaaacacaggaaacgggatgagcagtttatgaggagggaggaaaggcgagcaaatgaagaactaaggtgttgcgttaatcgggggacttagctcttactctttgcaaaagcacattgcagtttactcgttgttagcacttggtcatgtggtttgcttaataacagtgactttccttaaaaatgattacttcctagggcatggatgtcagtctttttaaagaggtctttgagtcttccagaatggatttcattttgtctcatgccctgtactgcagggatgttctgaagctgaagaagggacagcgagtggtgatcagcaacggaagggtgagcacttgctgggctgtgagcctgccttcacaggtctctgcctctcgggcgcctttgagcctcccttgggctgcactggagctgcccttctgatggctgatgaggcctctcagtgcagctgcatgggatcctgcctgacgcttatttgtgtttagacactgggagatagtgaatgtggggctctcagatcaggagtcaggatggctgcttacagagtaggtctcactgctgtttgctgagaaccgatgcagacaatactgtatctcatgtcagcctgcttagaaaggaaggtatcgggaaacacacaggctctgggttctgagggattttaagtaaacattagccgcatctccttaggccttatttttcttcttagtcattttactaaggatatgcttcagggcaggagtcataaggtgcttgctggcttaggtcccagcctggcagaggctttccggcagccggcgaccgctgccctgcagctctgccctcccccttcttacctcacagatcattgggcctctggaggacaatgagctcttcaaccaagatgatttccacctcctggaaaatatcatcctgaaaacatcgggacagaaaataaagtctcatatccaacagcttcgagtagaagaagacgtgtaagttttatacctagtaacgagttagataataagtgataaaactggcgttccgattagaagctagttcatgtcacagggtttttattaatttttcttcactggtcaaagtgagggctacatattatcagttatatgtccacgtcggtggggttatttcccgttttacttaatactgctcacgtcacttaggtttctgaattatttctccacttcaaatctggaaccgttgagacagctgcagaagcagaaggctgagtgcttcctgctagatgcagtgtagacacagtctggtgctctgctggttcacagtctccttgtggtgggggaggaaatgcacgccgagagcttcttccctctgtctgtctgtctgtctgtctgtctgtctgacaaagttggttctcttgtgggggatgatgagttgggtgtggctgacttatgattttcagcactttagtattgcttatcaactgctgccttggaatatgtttcacttctgtgtatttgctacataacaaaagccatgcttatgtgctgtcgtttctgcgttagatgtcacacagatgtgtcctttaggatgccttgtttaatgtttaaggacctgctgtgatgttgtccacggtagctgcaacatctccattcttaccaacatggctcctgggttcagtctctctcctcccaccagcccttctggtttgcaggtttgcttgtttctgtctttacacagtagccatccatcctcacgtgagtggagtggaatctccttacagttcagtggtgccccagaggctgttcttatgcacagcattggccactgcatgtctgtgggaaatggctattctagtcttttcatcattttaatcaggttgttggggttttttgtttaattgtgggcactccttatattctggatgtcagtcccttgtcagatacttgacagtgttttccctattaccttagtttccgatttactctgtgcaatagtacagagtatttggacaatataaaaaattcaagttctttttttcctttatttttgtctcgtgttgtcacactgcatctttttgtaatgtgttatctttgatagctgtcacagtagcccttttgccctgtgatatcggaagatttgggggccatggctggtggtgctatgaatggcggaacctatatcctcaccacactaggaaagttgtctaccactgagctgcttctctagactgagagaacgctcttttcatttgactcaatgctgaggacaagataaagtggcctcctcttccttcagcagctcatgagtggtgcccctttgcctgcctgtgaaacatttccagtgtccccagggccactgtatttggagtagtccccctgttccggttgtagctttctaaggcttggctgcatacactttgatcttagtgcttggtgatgtactggaaattgcttgttctgtgtgccacaagtattcactgttgatactgggaagttgaacagatagatggttaacgatgggattatttggttcaaagaggaaatgtgcaaccttggttgtagttaagtctagcacagctgcttttgaatggcttacctggcaggccagtgagatagtcactgagtacaggtacctgctgccaaacctgacaaccttagttgactcctgggacccatatagttggaagggagaatggacttatggagttgttctctgacctctgcacacatgcaagagcccatgaacatgcatacaaataaatgtaattaaattttttaaatagaaggggtaggtaaaacagggagtgttgtttcattttgttttatttatctttcatcccttgtagtttgtggttcctggcccatctgtagtgtgtctggtgtgtgtgtgtgtgtgtgtgtgtgtgtgtgnnnnnnnnnnnnnnnnnnnnnnnnnnnnnnnnnnnnnnnnnnnnnnnnnnnnnnnnnnnnnnnnnnnnnnnnnnnnnnnnnnnnnnnnnnnnnnnnnnnnnnnnnnnnnnnnnnnnnnnnnnnnnnnnnntgctctgtatttattaagcaacacagaaaagtattgcatgggaaagaataagagcttctttacagagttttacaagggaagaagtatgtttcctgacccagggtagaaaactacaaccaggtgttatcaacctatagacacatgttgcttctaacagttatggtgcgtacttgtagtataaggttgcttccaatctgttaggtgtttcagcaaacacacacacacacacacacacacacacacacacacacatctatttatgtacctacctttgggtcaggggcgcagaagggtaaagttatatattagctatataaaagttgcttgcagaggaaatccaaggcaattaagattacactgttctaccagggtgtggcggtgcacacctttaatcccagcactcggaggcagaggcaggtggatttctgagttcgaggccagtctggtctacaaagtgagttccaggacagccagggctacacagagaaaccctgtcttgaaaaacaaacaaacaaaaagattacatcgttctcttaaaggcaggttaaacttaaagggctgagtgcacagttgaatggcagcgtaggcacctcttcttagatgatctcaaggggtattgttaactttgctgtgaggtttgccaaaagtccagtcttggaggtcaagagataaaaacatatcactacagtttttgtttcttcccctgctaggaacaaacccaaaaatactagataggcactcacaaatactagacagctgctgtcaaccccagcttacaggtttgtcttttttttttttaattggacactgtaatggtgcttctgatattgaattcataaccaacatagatgttggatggctggttagattagtggattttgacgcagcagtcctgagagcaatcgcattctttaagctaggccctgagccgggtgccagcatggttggccagtacagtgtgtacaacagccttgcagagtaggccgttcctgtccttcacccacagagaaaagtgccatcccagagatgatcaagctaaccacagaatcatgccctttggaactcagttcatgcctctttgaaaccgccttgttagcatgatgctattctatgtttaggctgatgctattcagcaatggttagaaaatctgcagataaagtaatgctaaaatttcgtaacttcatcttttagggccagtgatttggtaatgaaggtggatgctctcctgtcagcacaacccaaaggagaggcgaggatcgagtaccagttctttgaggataaacacaggtacagttgttgctgcactaacgcacagtcctgaactcttaggctttcattctttgtctcacagcctttaccttcccagataaggtttctattcacgttgttagaaaagtgaaatgaagtttcatatataaaactacattttgtgagagttggtatttctaaataaacctgaagtaattgtatatattcccttttaatgaaagtagcatttaatgaaatagaccagatataattttctgatattcaggagtaattggattgcttgactataccacttaaatacttgtttcttgtttttttattattattatttaaaaaaaactactgtttccaaagggaaaactacatttaagatatgaaaatgtctttgcctctttatccttcagttttttgttttgaagtttgaacacggatgaagttggaaaactcacaaagaataaccatgtgtctgtaactatattcaccattattggagtgcctcctgtctgtaacctacaagtctataggccagatttaccagctattggtgtgtcatgttcagtattttctatctgtgtgtgcaatgtgcatatgcacactgcatctatttatctgtatatttgtacacacacacatggcactcacatctctttttctagcatttgaaaattcattgctaacatgttataaactctctaaagtgttagcatgtggagatttggtccccactactgtgatcatatgtgatcttcatccagtaatggtaatacaaacctctgctcgaattctctgatgtcccagaccacacattccagttattcatatgtcttgaatctcctttaatctaaaagagtcttctgtgccccacccctttcttttatggtactgactgtttaaagagcccaggcagattgtctttggatctccacagggtaggttattcccttaatagtggactagtttgtttttctggagttctggctccttatttaaaatatttacttgtattatttttaattatgtagatatgtgcacttgtgtgcactgcctgttggaggcccagatagttagttctccctggtactggaataataggtggttgtgagatagctgatataggggctgggaactgaactcaggtcctctgcaaaagcagtatgcactcttaactgtggagccatcgctccaagcctgtatctcctcgtttgttaatatcttgctgtctctttctttaccctctcacccctctcccgctttttagcctagggcctgtgtatcataagcagccactctcactgtgctgtcaccagtaggcagagcctcagtggcccaggatatcccttctggtagcttgccgtgggcactgtgctgcgcacatgcccgtcttctctttcagcatcacgctggtaagaagtaactcgttatctcggtcgggagcagcacaggagacagtgactaacctgctctcctttctgcctccgcagccagcacagtaggtcctccatgaagacggagtcctccagagcattctttctccatgagcttgtggattctgcagagtcaaaattgccctagttacaaactctgttactatacaatagaaattcttactggagtgctgttagccaaggatttgatacaaggatttctcatttctgtttttaaaaaaagttttatccatttagtttaacatggatcttttttgtttccagtttttcaatatgcctgaaacttgctttaatcaaataggtcccatttaattattacataaaagtagttattatttctgcttcaaataaaaataaccacaccatcagttctatgattccttggtgtgagacttaggcagccagcagcaggttgtcgcctgggagcctgcttctttgtctttggcctagagcagacctatagcatcagtgtctgccttttagcaagattcctcagtcactcccctgaacgtaatttgggagagcagtgttcttggacttttgctgtattcatctaaagggaatatatgatcttctgtcctgtttgggacattctagaattttctctcaccggtacttcaggtgcctttctctgtgacttacttccttgagtcttttgcccctcactatagaatgtaggtgtgattatttttttgaaaaatcttaatttaaatttttgagttgtttcgccatgtgtatgcctgagcacccatgttcagtgtccctggagagcaggtaacctcttgttcttgctctgtaaaattttcatcagatcaaaaaagcaatatatgattttggacaaggaggtggtgttttaagcctttgagagtcactacttttcttcgctttgcctttttgtttgtaagagtgttcactgggcgcgctgctgcaacactagtggtggtgagcaggagaggtctattccagactcacctcagaaggtggcagagtgtgcttataagttcagatgggagctctggcttgcttgtgctcgtggcttccagttccaccagccacaaacctcacaagtctgattatttccttttccccagtgtacagttacccttgtaaaaagccgtaggtccctctggggaagaactggagaaagggtaacagcaaaacctttgggtgtcttatcaggatccttcctcagcggaacctggccaccccttcattcaaggggttccggatctgcaaactggctcaagtctggaaattgattcactggccgagattgctgtttaccacaatctaatgtagcctttctttcatttatttgagaatttttctgcttatacagatcaaacaaatatgcagtaggcttcctatgtatttcattcatgggtatagctccttctgcccatcagtaacttttttgccgattccttattcttagtgccgtagaagatcctgagtcactgagattcagagagaggcactgtaccaggaagccttatgggagtaaacagatgctggtcctctcttgtgaagagcaggagcaacaactgccattcagaagtactggacaagcaagcctgtctcaataagtaaaatgaaaaggaaaccagttagcaggttgacttggcagattaaagtggttggcatgtaaacttggtgactgaaatttgatcctagaacccatgggaagatggagagaattgactccaccaagtcatccaaaagaactgcacacatatgccatggtgcatacacactgtggcttctaagtgacccgtaatactaataggatagaattaaaatgaataaaaatttgaaatatatataactgaatcctctcagtgataaggcagaattctgtatgcctttctcatctgtaagttgttttaggttctgaggaaattgaattgacattgtgtaccagccccaacaattctctactctcatgcctaactcttctgagattttaaagagactgtatatggagaaggctggatgcacaaactgtttaaaggtcaaaagccatctaaatgtctagcagtaaaagataatttcagtaatagatttatagatagattataacagatttacttggtaaacataagacatttcttattcagggtgctgggtgtataggaacatgtatacatgtttatattgaaatagtgagagaagcggcacttgatttatttttttcatgcagatggtagtgatagggccatgtataggtgatgcacatgtgaaggtcagaggacaacttgtaggaattggtcctctccaaacatgggggagccagggatcaaactcagtttaccatgttctgtaacaaagttcttttatcctctgagacatcttgtggcccaagaaattgtttttaagaataactaacttttatacagcatctaaaaagaatcatatatgtatacagtgaagtgactgtaatagtgagattgtgagattgttttagatgctttcttttttctgttttacaggttttctaggttgttatgtttggttaattgatggttggttgattacactcttaaagattgaacccagagcattctaccactgagctacatcctagacacattatcattaatttgattaatgattgttttttgttttgtgcttttcttgcctggaaataaaattagcatcatgctcagtaaacatgagaagtaaacatccagtatatttagtagttggctttgtggtgcaagaatgtactaggtacttgggaggctgaggcaagagaattgcaggttcaaggccagcctgggcaacatagtaagagcatctcaaataaaaagtcaaatagaactggtgatgtagcttggtagtagtgctcttgcctaggaaaggaacaaaaagaaagcaaaaacaaaaagcagaactctgcagtgtttaagtgcaatgtgatctagctttcctgtcttcacacatggttccgatccctcgtgttcaaggatttgcagcgtaggctgtagctttagtctcatggttgaatcgcattttagtttgttggttctcatcgacagatttggaatgctaagatgtctgaattgttgataacctatgctggtatgctccaccccaacctcactgttttcctgtttcctcagtgctaatgtttggttcttttgattttttttttctctcagtgcaattaagctgaagcccaaagaaggagagacatactatgatgtggtagccgttgttgaccctgtcacacgagaagcacagaggctcgcccccttgctcttggtaggcctgctgtggaggtgttcacacctttaaccaaagtagtcatgggtcctacgattttctgggcatttcctttgtccatttaacatcttctagaggagatcgacaacagtgttttcatagggattgattaaggctcatttttctttatgaattgtgtcatggctttaaatatgtataagattctacacttttatatatgcttaaaaaaacccaactaaccaatacagtaccctaacatttcatttaagtgtgtgtgtggggtgtgtgtgtgtgtacatgtgtgcacatgcttatatgtccatgtactaggggctagacttagagccttacacgtgctatgtgggcactctgccaatggggtgtatctctagccctagctgggattttttttaggatagtaagatcatctaatcttctctgtaaatgttaatctacatgcttcttactgtgaactgaagcagcaagctcttgttttcctttgtagctaaattctcatggtttaccttctgtttcctcacaagagagtgttaaactttgtgtgaggagcagtgatctgcaatagcctttttaaaaagatacatatattcattcattcattcactcattcattcattctgtctgtctgtctgtgagtacacatgtcacagtatgtgggtagagatcagagggcatcttgcaagagtcagttcttgccgtttgagtcctgggaatcacacttgggttgtaaggcttggcagcaagcaccttgacttcctgagccgtttcattgcctctcctgcccctctttggaaccaggccttctatctgtggttgactctacgttggagctctgatgcccaaaacttctttaatgcagatgctgcaacagctgttttgtttgtgtatgttcctgagatgttaaaagtgctttgtctcctaagtaattgtgaaacaattctgaagagaaaacctaaatattttgtcatctggtttgctgttttaggttttgactcagctgataaacatgaatctaagagtatttatgaattgccaatccaagctttccgacatgcctttaaaaaggtaaaatgccatttaaggaacactgttccatagcggtactaaacctaaaagttagccctgcgtgggaagactcgggtgcatggacaggctcagtgtgtgtgtgaaaggatgtgtactgacagtccccgctctgctttggttagctgttctgagaacacagcagggtttagacttagacgacatcagtacaagttgctggcacatttacagctcactttaaaagaacggtagctattaggtctcatgtaggaagcttactctacttattctcgtgcatcttgggggagggacagacttggctgtgggatggctgtttgtggaagtcacagtgactatagtagcttagcacatgctctggccatgggtgatgtcttccttggccatgggtgatgtcttccttggtgaggggcagagttctatacttagattcttaatggattccaactgtcttgctgaggactgagcgagctgcagctcccactgtttttttttttttaaagatttatttatttatttattatatgtaagtacactgtagctatcttcagacactccataagagggcgtcagatctcattacagatggttgtgagccaccatgtggttgcttggaattgaactcaggactttcagaagagcagtcagtgctcttaactgctgagccatctctccagccccagctcccactgttaactgcatgtttatcacacaccgtgttctcagtgctggcatgagggcacaagcatcacttagggctcatattataagacaaaggtttctcctcagaggccagtgctcaggataaagtgcttgtgaccccgatggccatagtgtgaaggggtggtctcctacatgcctccctctcccttcccttgactttacagcagccctgggaggcagcattagaccagcagaaggcttggcttattgtcctgatttggaaggctactgtccaagcctagggttttgttcactgtgtggacgctgagactgcatcaagaaatacctaactaacacttgcgtttcttttcagcttttaccgttacgtcttagagccggagatttctttcactgcagacagcagctttgctaagggaccgatagcaaagtttctggatatgccacagtctccgctgtttactttgaatctgaacacacctgagagttggatggtagaatctgtcagaacaccatatgatctggataatatttatctagaagaggtagggatgtaattgttctcgactatcgcatcatgtataagttaaatctatccatcattcagtcagtggcgattcctgaactgagtggtggagatggcgctcacatcacacatcagtgctcccttacgttgatgctcccttacggcagctgctttattcagatgccttcccgctcagaagttgcggtgtgtgcatggactgctgctcccacccttgctctctcagcttagtcagctttggttgtcctcagagttggtcggttccacatcagtgtcagtcactcctctcatcctctcctgattgacaggaagcagtgctagggaggggcattcattagggctcctaagaatgcagcctgtggtgctagggaggaagtggcctgatctgggtgccaaccaggaagcaaagagaggagagtcccaagggcttccgcctttttcttgtctaactcatttcaggatccccagcccatggagcagtgctgcacatttagtgtgggtctttcctcctgaattgatcctctctgaaaggccctcacacatgcccagaggtgtgcttccaagcctagtcagatctggtcatcacagtcctcaaatacccactcccagttgtccccggcagttaggaactgtttctgatctgacactgtgtctaaatcattacccaacgggtggtctttgtggttgtagtgggtggtttgtgacacattccttctgtcatagaatccaggatggagctctagcctcggtggcagccagtgctttccccctcgtgattgttgccctgacctggcagattacatgtgtaacagtaattacatgtgtcatgtgctttaactctggtctttcaggtggacagtatagtggctgctgagtatgagctggaatatctgttactagaaggtcattgttacgacatcaccacaggccagccccctcgaggactacagttcactttaggaacttcagccaacccaacaattgtggacacaattgtgatggccaatctggtaagtaatcagtttatcgatagtacaacttccgtgatggttatttagacactgtaatttatgacagaacagttagcattctgaaccttggtgtgaaatagaactaacaatggactgctgtgtaaagtccctgcttgctctccgtggagcactgcaggcgccactgcactgccctgctgaggctctttgcctcttagcttattggttggtagttttttggtttggtttgttttacttacctctggtttgttaattatcttttaaactttctttaattatcatggtaataagaccctgagttcagtacctagttcatgagaggggatggggtagataggctgtcatatacacatacatgatctgcatgtaaatgaaaatgtaagcattcattagaaacatttaaatgtaaagagacctgagcctgtactctgtttgtgtcctagggatattttcagctcaaagccaatccgggagcctggattctgagactgaggaaggggcgctcagatgacatttataggatctacaggtaggacaaggagacggcttcattgtagagactgagctttaattgcgcattatctgggcttaccccaggcatcgtgcgttatagtcgagttcatgataaagccaagcttctcagaagagtaagtgtgggagaagttgtaggggatgggttggttagcaaggggtctaagtgctgatcagagcgaggtctgttctccattgctttccctgtcagctcttatcagaaggatgcagatagcaggcaggagctctgaccacttgatgagagctgactggaaacagcagggtcggtcctgttcagtacgctgatgggaggtgtttatcatgaccccggctgttttgtacatgcacagaacacatgagctttgactgtgtagtctgactgtcggtcctggtccctgggctgcagttgtgtaggcgtactcctacaccagcctgtcagtgacaggaattgtcttaaagttcaaacgaaccccagaacaccattttaaaaatgtggtctctatcctgtttaacacagtttaaactcgtccttagttctgtgccagtttgtgtagggaatggttttcattatggtttctgtgaacagcctaatgtgtgtatttgctttggcttcatggccttttacttgacatggagaagcagtgtggtttagtgggtttggttttggtttttctctcacccacgcttgaactggactcaagtgagtcttctgccttagtctcctgtagctgagacctcaggcgtgtgcctccatacctagcttgtgcagatttcttattcaataacttagaattttgtgctatagtaatgtccttattgtaaatagtaggcttttccctgattcagttattttcccaagaaggcttcacagaatgtttcttctatgggccctgtccatcttcttccttgcctggggctgtggtgccgtcctctctgctgtctagggttcctgtcttccgaggcttcccaaatggacagcctgtgattctggaatcttctgtgcgccagctttctcctctccttttgctgcctgctgagtgacagcacatgcagtggcttcctcacattgctgcctggagagtgagatgaggaggaagcgagtactcacagtcgtcctgctctgccttgtgggcctcggaccagagcggctgcactgtgggcttcctaccagacacagaattgagtctgtgctctaaacttggctggttgtgccgcctctcacactgtagcctaggctggctttgatcgcagttgatctccctgctgcttcctgttggggttacaggtgtgagtcaccacactctgccaagagttaaacagcagaagcggctccagggatgggcctgagtgtgcagactgtgagcggacaagctttgtcatgatctgaccagtgcttgtcctgcctgagagcccattgatgtttgcctgctgtaggaaggaagtcagctcacgtccctagcctagagatggagatttccaggaacacttctttgtcctgtaaaggtgtttctttcagactgtgaggaaactgttggttttaaaaagtgtttctacaatgaagatgggcaagcacagcccatcttgttgtctgagtatttaccgcattttgggattgtgatttctttctctgtcttacttgtctctaagccatgatggtacagattcccctcctgatgcaaacgacgttgttgtcatcctcaataacttcaagagcaagatcatcaaagtgaaggtgagtctgctcggctttgtcagggaacagacagcagtcccccccctgtggccgtggccagccactgtcagggaacagacagcagtccccccctgtggccgtggccagccactgtcagggaacagacagcagtccccccctgtggccgtggccagccactgtcagggaacagacagcagtcccccgtggcagccgctgtcggaggtactaacacttgtgaccgtgctaggagagccctctcgcggtagttcattaagacactgttttaatgttctgttttgtgttaattactgttgtgatttttaccttgcctaacttaccaattaagcattagtacaaatagagtgaacaaagctgtaatatgtatacagggttctctactcttagagttcatgcatccagtaggggcttggaatgtctccattagatgaagtaggactgctgcatttggaagtcattttggtattccatttggaagtggcttttggttggttggttggcttttggattttgttgttgtttgttttaatagttctagggatgctgcttaagaaaaatgtcttagtgaagataagattctagctttcttcagccaacagattgtcacttttggtaatctcagagtcccattttgtgcaaaatgtccccacagagactttgtgtactcccctctccattctgattgagacagggtctcactatttagccctgaagccctgattgacctgggacttgctatgtagaccaggttggcctcgaactcacagatatgtttgactgcctcccaagtatcaggattaaaggcattgcacctggctcagctttgccatgtttttttttttaagttttatttatttatacacatgtaaatgtgtttatgtgaatatatgacactcgtatacctgtgaagggcacaagagagcattggtatctcttagaaatggagttacaggttgttgtgaactattcagtatagttgctgggaactgaactcaggtcctctgggggagctgtatgagtgtgctctgaaccactgagctatctctccagctctggcttgggcgctttcatacccacaattcatagagttagtattttagtctcagaagactgtgggaaattccactggcaattcaacagtaagattatagtttttataggcaggatggtgcacacctgtagtctcagaactggggagttagaggcaggaggatcaggaatttaaggtcagcctagactgcatagtgagtttgaggccatcttgaatgatatgagacactgcctacaaaaccaaacacagaatacaaacaggtgattttatttagtcttttcttactctctttctcttcagcattttgaaatcctaaagtaaaatgattgtaggataagtaactgttacacatggtaaaacctaaagtcagccattgcgaggctgaacaggagggtgattgctgcagggaatcttttgtggtagaagtcctgagcatggaccacctgatgcgcctctctcaatggttcctgtgggccgcattcttcccttgaagttgtcagctagagaagttgtcttctgggttactccctctgtttctatgagcttggtctttggctctttgtacaattcaaagagatggctggcttgcccctgaaggctttaacgtgagtgttctgatgaacgcactgccacagtcctgagagtctgggtggggtcccctttaggagaattggttgattgtttcctgttgccagtgcacttcaggtttgcgcctgtcagacctgtcacatacaattgcaggttcagaagaaggcagacatggctaatgaagacttgctgagtgatgggacaaatgagaacgagtctggattctgggactcattcaagtggtaagtcggcatcatggtgaacagcttacatgtacagggagggccagaggtgtgaaccatgcatcctttgcaatatggtaattttttctgggcttccaaaccacttcatgcagctagattaagccctttcagttggagaagaggaatgcttccctttcggttaagagaaggaaagtgttcttccacggagggagcttctggtgtgctctcttcccttgtggttggtggggcccactgctggcagaggtgacggtcattggacggctgtgttctttggagtagcttgtgttctgtgtattcctcaatgacctggtgcctttggggagcatcctccttattacctccttttccttgtgccccacctagcatcccctggtgctcccacccagcatcccctggtgctctcacccagcatcccctggtgctctcacccagcatctcctggtgctcccacccagcatcccctggtgctcccacccagcatcccctggtgctcccacccagtatcccctggtgctcccaccaagtcttacctctggagcaggaaggctcaggcactgtccctttcctctcctgaaaggttgtgtcagccccacatgtaagtgctgtttttaattatgtcatcacaggggcttctcaggacagaaggctgaagaagtgaagcaagataaagatgacataatcaatattttctctgttgcatctggtcatctctacgaaagatttcttcggttagttttcactatttgttatgtaaatggatttgttatagtattctttgagtgaaaggatttgcttgctatggtgtgtgtgtgtatgtgtgtgtgtgtgtgtgtgtgtacacacaaagtactctgagggctgtgggtagcctaccacatacagttctatttgttgtatgcacaccttatagactgttgttgatttttttggccatcaaatattgcataaaccagaagctagagaattggcatagaaagtacagaaactgtgtaacacttggccatcttctgtagagccacaggcctttaaagccagaccttaggtttatgtgagaacagctttgcttgcaaactgagattaaaatggaaggagtttgtctaggtcatgcaactggaagcaggacggatcattgcttgacattgttgatgtggttaagaggggagggctttcgggatccctttgtggaatcctgaggtctcagggtgtctgggagctcagcgttgaagacatattacttgaaagccattgtcccaatttcacagctgtttgtccttttagttttcattataaatctgatatagaaaataataaaaacaatgtcatttggttaatttctagtcctttttccaataaatatctgctctaaactaatgacagtggcaatgactttcctgagcccataccctccccttactgactccagtctctccaggctctcgacagaggctgtgcatgtgtgcaccgtttgctcagtaccagatgttgctgtgcctgagcactggtttggagagtgctgtagtcctgactatgatctccagtgctagctaactcaccgtcagttgatgagatgggtcatttaaatgtacagcataattagagtttgcctctatctgttggggtatacttacagggaattccttgtccctctctcttccagggacatctttatgtacgtatatgtatactttcccattagtgaaggtctctgcctaactgaacaatgggttggctctgctgtcaatcttgtgagttccttctgcttaatgttgctgaggttaaaaagcattgagaaataattatttgttttgtttggcagcatcatgatgctctcagtcctgaagaataccaagactcctgtgaagttctggttcttgaagaactacttgtcccccacatttaaggtttgttcatagggaaaaggaaaaccttgttaagggaatatttacactgtaacatattcttttctacctttgttttatctatactcttaatttttatccctttcattaggatattttaattttgttgtctgtttctatattgtttttttttccaggtttctctatttggggtaatagtgtttatgaatctaaacccaaaattatggcctgtttgaagctgggtaacataggaggaaagtctttgtcttttctgagacagtgttgtagcaaactaacagtccttgccctgggaggtttgctgtctccccttagcttaggaagcacagtgagtggggtttgggaatggtttgcgaatgaatactcttctcatgaggaaggggaggggctacttcccctgtgtgcctcgtagtgggttggcccgactttcctgcggtcacttttcctgtagtatttacaagacaactttgtattcagtgtggctcatctcagatgagggctttccttacttctgatctcctgagagctggtgtctgaacacagaagactacctgtcaacgccaagagcctgctcagagttctggctctgccgtgtgatagcccgggttagactcagccttgagaagaccttaatatcaagctcaagagtgttttactaaagtcaaatgtagataagtaaacctggagcttgtgtgccttacacacacacatgcacaagttgtataaagttgtaaatctaaaagccttcacctgcagatttccttcatttcttgtggtgagtagatgtcatcaaaaagtagggattggaccagagtttagatgtgacttccgtgagtcaggtgaattaaaccagattgtgccagaccttgtttcagtgcgagtgttttagttgtactgtaatactggctaacttaaagtaaggatcagtctttttaatcagagtgaatgattgttgttccctgtgtctaaactaggagtttataccttacatggccaaaaaatacaatttccagtatgagcttgttcagtacaaatggccaaggtggcttcaccagcagacggagaagcagcgaatcatctggggctacaagatcctcttcctggacgtgcttttcccgctggttgttgacaagttcctctttgtggatgctgatcaggtgagctcgctcgggtgggggtaacgtgagtctcagatggcagagcacctgtgtttgcatcagtagttcaggaacatgggaagagatcactcagatgtcatcaccttttgtatttaagttccattaacacatctccttttctgtaaaagctttatgtttgtatacaatacaatgaataacccactgcgtccagttggagcagcccgtgggtgcatgggcacagagccatccactggagcatgggatcctattggtgttgatgaatctccttccctcgagtccccactgccagggatgcctcagtaacgggggtccagtcatctgcacagcgcctggttggtcttggatggtcttgtgtaggtacccacagctgctctgagtttaggagtgagatgagcagtcatgtccagaggacagcatccacagcattcctccccatccttcccagctcactgtcctcagtggtccccgagccttgggatgcagatccccattcagctctgagcatcagtctcctcctctttttattttgactagtttgtgtctctgcttcccactgcacaaagaagcttctctgaccaaggccaagggcagcgtgggtcataagtaatcagaaggttttaacataattatttagaaggtaccttgagagtatcactatttcagaaaataaaatagcaggttctgctctgtggccatgacctctgcagtcctgggcttttgccatgatttcaatactaggcatgaagtttccctcctgtggagcaagcctcagatccagtcagaaagccactagtcatcccataatagtcaccctactgcactagtgccagcgcttttctcctactctgtgggctgtttacacacacacctttttctctagatttggacattttcttctataattttattaaaaatactgtctgttctgtgcctttggagtaggcttcttatctgctaggattagacgattcagtagtttggtctttccatggtgtcccacctctcttccatgtgcccatgccctctcctccagctgcttcttgttgcccttctctgtatgattcgaatcccttctcttcctgccctgatactctgttttccacatgcttcgttctgtgtgcgagctttccaactgagctttaatttggctacctgaatttttctttccagcatcatctctggtttttcttcagtttttttttctctctctcttttgaatttaatttttatatcatgggttgatttccgtattcatccagctcttgttttgttttgttctcaggatatactcatgcctttaagttgttgaacatagttataattattcttttaagttctctggctgcaagttcttccaagccattttcattaggagccagagtaatggggttagtcgtctctgaaggagacatgctaccttcttttggttttgtttctgctctgaacttgcacatctggagttagtttattggttgagtttttctttcttttgtacttttcattttttaaaatccaaatcatctcttcttgtcttttagtggtggtggttgcagcattcaggagaggactaaattgtaacagagttgaggtgctatttgttctgtgggactggtttgtagggacaaggtgtctccctcatgccttcctttgagggaaccatctcgtgcaagtgtggttatcccacttgggtctgcagctttctctgagttgtggaacttcccatacctgtgggtcttaaccagagtcaaatcgagttcctgttgtgggtccacggctgtcatggaagccactccaggatgtggaactgcgtaatccccagacagtccatccctaccctgggtctgcagcttcttcagaagctgggggtgttgttgatcaaatctccatgcctctgacttactctttgcatcgctatacaataaagctatctcataagaagtatgcactgacccctcacagtctgaccagatagtgctcagattctactttgaggaggtagcttgttgacagggaaagcgcttgtttattgcagccatgagaaaagccttaggcatttagatttttttcccttatgatagggaagcctcaaccatcattgggacattatagagtcccaaggatatcaacatgaagcatcagctatcagactctttaccagactccagagtttttgcttatgtctttaaaaaaaaaaattttcattttctcatttcaagtcagttaaatattctgggggaaacaaatcactcattgcctctgaccttttagaaaaaaatgctgtgttgaaatactgtatgcaggcttggtctgagtttgcgtggactatgcttcagtatatttataaatgacgagcttggattctgaaattaaactttttatttgcaattttcaaaaaacaaacaaacaaacaacaaaaaaaagaagctggaagcatgagcctccctatacaccaataggtagggctcacgaaattcagggtcgaccctgggtctgcagcagctctacagtgtgtgcagtcctatatcttagtattaattcacttaccgtaaatacctgagttacaaaagaaatgcttaatattacttggtcactgtgtccactatctgcccaaatgttagctacttcattgttcatttatttacagttcattcattgatttttgaaacagagcctttctctgtcatccaaattgttcttttgtctctgtctctagaatactaggactccaggcccagccaggacaggtgttgctggcatggggggtaattgatgttcaggggcacgcgtggttctgatgacaaggaacgctgcagaccactctgtcagtcggtgcagagttcataccttctccacagtgatggtcttctcttatagtacagctgctgtcttcacactgctaaactgtgtgctttttgattgatatctttctcctctcctgttgatcctgttcactgtacatacatctgacatacaggctgcagcatggatagtaagcacggagcttattaaacatgataataatacactcttgaaatttccctgttaaaatcagttcaatacttttgaattaaacagtcttcagaatagcaccactcagtgaaaaacatgagtgtgtgggatcatttcaggttacgtgcaacactgggggaactcggcttgtgttctaagcctgtgctgtcacccagtgtgctgcccttcctgctgcctggtgaaggatcatgccacagggaaactacctgtgcgctggttaacaaaccgtttgttttctttactgcagattgtacggacagatctgaaggagttaagagatttcaatttggatggtgcgccttacggttacactcccttctgcgacagcaggagagagatggatggctaccgcttctggaagtcagggtactgggccagtcatttggctggacgaaagtatcacatcaggtactgagagggtgccctgcttatgcctcttatactacatataaagagagacttagtttatttgtttagctgcatatactgcagtatgttcttcatagttttcctgtgagtgtgtcctgatgtataatctactaagtacattgttttgcctatttcaagcatattcgtaacctttgggtggcacatgcctttaatcccagcacttgggagacagaggccggggatctctgtgagtttaaagctagcatggtctacaaagtgagaccctgtctaaaaaacaaaaaacaccaaacaaacaaaacccacaaccagtataccagtatatgcatttattacttcaaatggacactccatgtcttctggaagaaggtgatttggagcctaggacatatacaagaaatattatcgagctggagagatgttctctgagatgaggaccactggctacttttccatagcaccaacacccacacccacatgggtgctcacacctgcctataagcccaggtccagggcaccttttggcctgtgtaggcactgtttgcatgtgatatacagacatagatgcaggtaaaacacccatacacatttacaaaaaaaaaaaacaaaaaatacatctttttttaaaaaagaaaagattgacttattttatgtgtatgagtattttgcctgcatgaaggccagaagatgtcagagtccctgaaactggagttacagaagatggtgagccactgtgtgcatgaagggaaccaaactctgatcctctagaagggtagccagggctcctaacctctgcgacaatcctcagggccctaagtaactccttgttaaaatgagcacacacagagatgaatgatggctgcggtgacttcagttttattccgtgtttcttggctgcagagaattggaaccctgcctgctcctctcctgttatcttaagatgtcgtcaggatagtggtggcaaattgttatcatttatcagtttcagtgatctttatcactggatcttttgagttagccagatttctttttgtctttcttatatttattttatgtgtgtgaatatactgttgctctcttcagacacaccagaagagggcatcagaccccattacagatggttgtgagccaccatgtggctgctgggaattgaactcaggttctctggaagagcagtcagtgctcttaaccaccaagccatctctccagcccctagatagaaatcttgcctcagaaattagtttccttgtaagacaacaaaataaaaagctggccaaagtgagccgtcagagcaggccatagcctgcaggtgtgtgatcctcttggccatgtgcatgcgccctctgcggcatcttccactctctctctgggacactggcctgttccatccatgacctctcccaccattcagttgggttcattgttgacatcaattgatggtttgtctgtaacaagtgtctcctctccactcagtgcgctgtatgtcgtggatctgaagaagtttaggaaaatagctgctggagacagactcaggggacagtaccaaggtctgagccaggatcccaacagtctttcaaatcttgatcaagtaagtgaccgttgacattacacatacaagtatgccatttgtgtctgaaaatgaagtagtgtttgtgtgctttctcagaactgaactatttcttcatggaaagtatgtgagtgtgagtgtgagtgagtgtgtgtgtgtgtgtgtgtgtgtggtgtggtagagagagagagagagtgtgtgtgtggaaagagagagagacttgtctgatcccaaaggctctgagactgtcaaaaagctcagaatttacactaaaaagtagtaaaattttctagccctgactgccctccatgtcagaactttcaggaaggcttgctgaataacttttccaataacaagcattttcagaagtaaaattacaggtttgtttcgtttgggtttgtgttctgtttatttgtctttatgtgcatgggtgttttgcctgcatgtaggtctatgcactgtatgtgcagtgctcccagagaccaggagagggagtctcaatcaccctgagctggagtgacagacaggtgttagagcagccagggctcctaccctcacccttctcctcagccccagttgtagctttaagtgttttagatatctactgtcaatctgctgctgcagctgctgttttgagaccaggtagcacttagtagccttggctggcctggaactctctttgtagacagggctggtctagagatccaccagcctctgcctccgtagtgctgagattaaaggcatgagccacaatacccagcttgtttaaagtctttcttaaaatatgttgttgtttattgtgatatgtagcatccattaaaagaatccatcttcaggtgtatcaaggagtcactacaaagccaaggctataaccagagccccgtgcgtcaggagcatgtcactcctgatagcagactgctgccctgctccctgactgtggcaggcaggaggcagcccacttgccgctctgtagactctactgagcctgctgtctagcctggacaccatgcttctatttagcctcttggcctctgctgacctggggatgtgttccctctactcactttcctttgtagttttgtgcccttcaccagccgttccccattctatctcttccttcctgtagagcttcctgcagctaaccaccttcactcagctcgcccccccaccctgctcaatcttagtagtttattattttagtcttttgtcctttgttctttgtgtttcctgtctagttagtttagtcttctgtttgtccttcattttaattaacatatttgcttccattttagtattttttgttttcagtctgtgctggaatcctctgtcctttatctttagcagctgtctcatgcagagtgacagtttgcactgccaggtctttgacccacctgctggctctcatctcatgacctctgagcatatgactgcttttgttcatgttttctctcagctgtttcttttctttatttttttccttttattgaaaataattttccccctcacataatatatcccgattccagtttcccgttccttcccctcctcacattggattcacctgctttctgtctctcagtagaaaatagcatctaagggataataatagaatacagaataaaaagataaaacaaaagctaacacattcagaattgaacaaaacaaacaggaggaaaagaaaaggcacaagaatcagaaacccactcatttatttgcacactcaggaatcacataaagaccctaaactgggagccatgatatgtatggctgtaggaatgtgttatattataaagtatattatgtataattattatcttcctgcagagtagaaagtgcaggttcagcagtatctaaagtttattttgttgacggtttgatgaaggaaattgtctcagttacttttcattcctatttctgtgagaaaacactatgcccaaggccattgataaagcctttaactgcgcctatggtttcagagagttagaggccttgatggcagggcaaaaaaaccacggcagcagaaacagctgagcgctcacatctttactataagtgggagatggagagagataccaggaatggtgtaggtcttttgaaatgtcgcagtctgcccccagtgacacccttcctccaactaggccatacctcctaacctgtccccatacagaaagacggttgtgagctgctgtgtggttgatgggaatagtttcaccaactggggatcaagtgttcaaacctatgacctgttctcattcagaccaccattgtgcacaagactggagtgattgttgcttgcataactgacctggtcatggttctcagacaggatctcacatcgccacgctggcctggaactcagtgactgtgaacactcctgcctttgctcccagagtgctgggattgcagcgcatagcactatactcggctgactacactacatcatttttacaagcgtcacagtcagtcagttctgtttatttattccagtggtatattgggtttttttctccccagagtgttaggacaatggaacattttattgtgagagaaatttgggctccatcatttgggagcgggagagtcggtgcttctcctctggaaaactataaagtgttaaggcccacctcttctccctgcagaagtgagcagagactgcatggtgactcctctgtagtctcagcacgtgcgtgcgaggccaggcaggaggacaagtcccaggccagcgtgggcaacagtctcaacagagcaaaagacaacaacgggaagttttagaatttactttcatgcagtgaaatgtagttgaatcttgtttgtgttggttttgtctctttttatatgtatatgtgtttgcctgtgtgtgtgtgtgtgtgtgtgtgtgtgtgtgtgtgtgtgtgtgtgtgtgtgagcccagtgctggaggagcccataaaagggcaccagaccccctggcactggagataaagatggttgtgagctgccgtatggtggggacctactgggttccctgtaagaggtgctaatgcccttaatttcatagtcacccccttgggtccccagttgagggagtattgttgtttgtttttctaagttttaaatatgtgtacacatgtctatgtgtgggtatgtgcacatgtgtgtaggtgtctgcagaggccagaaaggggcatcagatccctggagttgcaggtgtttgtgatctgcccatgtgggttacatgggttctggggactgaactcaggtcctctgggagaacaatatatactcttaaatgctgagctgtctctccagcactctagttgaattttaagcctacactggttgcttatttaaatttctttctgagttttaaatccttgtgtttcattttctttaccaaacaggatttgcccaataacatgatccatcaggtgccaatcaaatcgctccctcaggaatggctttggtgtgaaacgtggtgtgatgacgcctctaagaagcgggcaaagaccatcgacctggtgagctgccctccctaccctgggacctgacagagcctggtggtcctccctgccctgggacagagaacctggtggctgctggtgctgttcaaattggctttcgctgaattatggttggagctgcagagcatgtcctggtcacttcagcagggctcttcctcacttgcccaggacgccagatcacatgcagcggtctaagagttgatttctgctgtgtcacccgtgtcttccacttcaaccctgtgcctggacaggtgtctgcttagcctgtaactttgtttcctttggttttgagaggtttactgtgtaacccaggctagccctgaaatcccgatctcccatacttagtctcacacatgcctgctggaggcctgtggcaatctgtacatagggtgtacctttcttatagctccactgaggtgtgcttgtgtgcttgcagtgtaataatcccatgactaaggagcccaaactggaggctgccgtgcggatcgtccctgagtggcaagactacgaccaggagatcaagcagctgcagaccctcttccaagaggagaaggagctgggaaccctgcatacagaggagacgcaggaaggtcagtgtgaagctgactgaggatgagtcagtcctggctactaatttgttgctgaaacaatgtaggggtccatttccctagatcttgatctcatccagggtctatttcccattgtgcccttcagccagtcttctaaatagcacattcaatgtagttttgtagtcctccccccaacacttgtttgtttagtcagaagaagaagagatgtgtgtgtgtgtgtgtgtgtgtgtgtggtggggtgcacacaagtgttcatatgtaccaccgcatgcctgtagacgtcaggacagcttgctttcagcagccagtgctctcctcctaccatgggcgtctgtatacttacaataaccttatagactactggtcaaattaggtgatttgtggtcttttattttcaaagccactaaagcttacaaataaacgtctagtatctttgtctgtccatgaaagtctggacggtttatgccaggctgggaatcaagaggaccaggtgttaaactcacttccacctacagagtgcatttgagaccagcctacaagaacagtgaataaattggagtctcgattaaatatttctcctcctttaaactcatcctaagaagcaagtgcagggacctggagagacttgaaagtctgttctggagactgcaggctagaaagtgtcatagctagtaggttatagtcacacactcactaaagatttggagcaggagagccggcttagctttaaaagcactgtctataactccagttccaggggatctgatgccctcttctggcctctgtgtgcttagcatgcatgtgatattcagagacataagggcaaaatacccatacacataaaaaaatgaaaataaatactgttttaagaagttaaattcattatgtaattacttatagataaatggacaaagaatatgaacagactattcaaaagaagagccatatatgaggaataaggatacagtgatgaaattagagtcaccattaatatctgatatgtcaaaaaaatacaggtggagaggtagtgccatgcattaggggtcaggggtgagactggtgagtgagccttgccgaaactgtccatgtgtctggaaagccttgctttaaaagcagcaggtctcttacaaggagccttgaaaatgctgcaccaatgggccagagaggtggctcagcaggagaagtgcttacttcatgacacgagtcctcattcccacgtctcttgtcagagcaaaggagagaactcactccacagagctgctgtgagcacgcatgcgcaccatagcatgtgcacacagtcatggtaaagtgcaagtgcattgtgcaagaatgcctctactgaggctgcatcttagataactccaggaaaagcaatacacacggagagatgtactttactgttacgtaccgatcagcaaccttaaaacagtttaaggatcaaagaacagctgccctggctcacagaaagaatgtgtaagtgcagaagatttctgcacacagcagtgtgtggcccagagccagctctgccctgctggagaccccgagagccagcgctgccctggtggaggccgtgtatagcccaagggcgtgtcagttcttagagctaaaaatgtcttcttctcttaggttcgctttcaacccttaatacagaaatagccaacaccaagcttctacagaccatctgaagctacagtgctgtgctgggggcagtgtcacacgctgttttatgacgtaagtctcacggtctgtgttcttcccccaggctctcagaagcatgaggaattatgatctctggaggaagatgggaaacccaccttgacagtttggactaactgctgttttctctgatctttcgatacgactgctgatgaacggattgggcaggtgtaccacacctattgatctgagcattgatttagactactgcaccctagtgggtgctagatccttggggctaaggctctgttggatttgtacctcagaggaagacaagtggctggtcttctgggactcttcttctcaccagagggagaaatgccggcagcaactgcaagaagcccagtccttcggtgcccacagcccagagcacacactgctgtgctggcccagaagctgggcagaaaggtcaccatgttcttccttacctcagtttacctgcagcccttgctgcagtgcagatgcccaccctgtaccaggtcaggccggcagatgcttcatccatgcctcaaggtctacgccaacatgcttctcacgtctcttcccctccccaccccccttcccaagcactaggcttgttgtttaatggagcccaaccaataatcatgtgtcttcagggttggctcagtgcagttgctaagcaaatcagtcttcaggagaaacggggtggtgtggataaggctggaagaaatggcaggtagtggagagtgttggggtgttcgatggaagacaaaaacatgggccgttctcttcagtctagtacccagtgaactgtccaggtaattgttttgtaaacaatttttctatttatgaaaatgtgtgctttttcttcttactttctaaaaagctgttggttatcagtttcctggctgggcacaggcgtcctgagtccctcggtgaccgctctcagcgtgctcagcctccgtctggatgcaccatactgtctgccctttcccttgtagagttttctctcagacccaggggataactttgggtgtttcttcccccaaatgctctcagacctgtgaccaggaatgactctgtctctggaactcggtttcctacactctgtctttcccttgtgctttggctctgagggtcccctttggctttcgagacttgccgaggtctggtccagttctaaggtactgctgctgtctgaagcagcacccttcactgctttgtgttcacagccacagcccagcatcacctcgggagcagcctgggctgaggagccttccacgtgttgttaacctggctggacaggtgtgggtgtgtggtgtcatctctgcccaggactcagggatctacagcagagtgttagtgttgctgggcacagggtgtggctcagtggcagacagagtgcttgtctagcaagcccaaggccttctgtctggtactgtatctccccagcccccccccccccaaaaaaaaagactgaatatgaggaatgagtactgtgggtaactaagttcttgcctgtccaagctaggtaatatgtgtgttaccatggaagaatggcctacaggagccgtggttagggatttgagtgggcaattgttaagtaataagtagagacagaaaactggattgggaattcagagaaccagcattaacccccttacctcgtcagctggagctcccactgagagtcctgggcagagcacaagtgtcccctcaggtcaggaatccacataagagaacaaagagcagcactaaaaacaacatcatttagttcggtgctcacgacaccccagaaacgagctggggggctgctaccatcggtcggtcagcagggttttctccctctccctctgcaggcgcttgggtagcaaggacaggctgtagcgagccctctgaccttggaaaggtgtctgggaataaattacttcccagctgtttcaagcgatgtattttgactcttggattatcaaagtgttttgtcatttgtcataaagtcagggaaggggcacacatccccagacaaagggccatggaggatacgtttgagacaaacatgttccatagcttcttagcttaactagcccttgacatttattgatacagtgtatattacaacatgaatttcaaaaaataaaaaaattaccacacatatatcaagtaatatctcccccccccccattttcaaatctaaaagttagcttaagagccagcctttgttcaggcttcatgtccaccctggattaagctctcagggctgctgcgcccgactgtgagcggaagctgtcttcccagtgccctgggagcctggagtgttgagcaggaatagtcagtgctctgagatgctggcccggtggccagggtccttctcttaccaaattatgtgtgcctcctctgaggaagaggaaggcatgggtctcctatggccctttagtccctcgtgggtcactacactgacataagtcatattcagagctgatgctggctaggccagaccctaaactaaacccttctaaagctgtccaggccccccctttcctggtccttccttgcatcctgtggattaaatcatctctacaaactaagccactgccacaaatgggctgctgccggcaagtggccctggaagggtgtccctgtcagatttcacctgacattctcaccacgaaaaagcatgttgtgactgaaaagagagatgagctattctccaagaagcaggaagtgactgagcagacaggttattgaggctcctggagagctcaccgccattcttggcctgcgaataaatggttctttgacctcctgtcatatagcagtagagtgtttcctttctgaatcactagggtagtgtgacctgtgacaagtcagactgtgccgatgtgaatccatgaaaagcggcccttgactggacctggggctgtggggcacagctctccagagtcctgggttagaagtatcctggatgcacccatgtcgagagtggtaatgtgctggtttcataagatagttggcgttgttacccgggcagaggttacatttctggttgagcatggtcgtctcggggcgtgcatgtgtgcaccgtgcagggcctgtctggtcaggagcagacttcatggcaggtatgttacctggctctcgtctgagttgctgaaagatgagctgagagcccagtgctaaagaaggaagaaaagaacaagcaaacaaacaaacaaaaaacaggaaacaaacttgactggcatagtttaggactggtcagatttggtcaccagtatgaagtcaactcctcttgtccgcgtgtcctccattaaattacccttctaaaattacccttcctagttagacccgcatgcttcaaggaaatgatgcacctgaggcgttgggaaggcgctcactcccatgcacttttctggggagagttcatggaaggctgcctagagggacacgtgctggcagtacggagcacgacttcttaagagagttgttgagtccgtggctttatgggatattgtatgatgatcagagtcaatcaaacggctcctcacgttcttgtttactaagtaggggagcagttttctgttgaaatttcatgaactcccattttctctgccttaaggtaatgaggacttctcaaatgctggatcaagctcaagcacattaaacattgtcactcaggaagtcactaaaatttccaagtgtctggaagggtctcacccctccctcattgctggtgttttgtgtctccgtgtaataacagaaagctcttctgtgttacatagccatggtgggttggcggatccttctcgtggagtcattgcatgctgactgccaagagcagctgagcgtcggtgccaggcatcagcgtggcacagggaagtccatcaggtcggggacagaaagcgggaggcctcttcctagtctcccgggtccttagcagtgtggagggtccgtgaccgaccgtatgagcagggcgtggagccgtggactttcccagcctgtgctttctgcttgccttacttgaccccggtgggctcaacaaagaagtgggcaccattcccttagccagatgcaaactctactcacccaaggtcggcagtgcaacagagactaccaagcactctgttttcctacccaaaaaaaggggaaatggagagagagcttaggggttttaaagaaactgtgtcctactctgtccattcaaaccaacacctcacttggcgatgaggttaaactctgtggatgtcttagtccacgcgggtttcaccgtgagagtaagatctgtccaacacaataaaattcctcctctcttcttacagctgtctgcttgttcattctctctctctctctctctctctctctctctctctctctgtgtgtgtgtgtgtgtgtgtgtgagtgaagggcagactgatagaagatagtcttacccttcacctctcagaagtcacgaagcctgagaggttgggaggtcccagggtctggccacagtgagtcctacagatcttgggccaacagccaggcccccaactctgggacccgcccccaactgagcctgggtgaccaatgtggtgatgaccttgagaggcagcagagcaaagcctccaagtgtgctgcagacccctcacggggttcctccagaggcctgcaggttctgccctccccttgtctgagctgcacgagtggagctgaacagtttggccgctccaggatcagtgcacacttgagactgatgtgcccttgctgaggtggcagtcaaggcctggtgcctgtggggtggaggagcttagtgggcagcagaagcttctacagggaaatgaagcttaaatacaacctggcaaagaagcgggagctctgtgtcgctgtgtgtttggttttgcttaggggggggactggttgtgtgtgtgtgtgtgtgtgtgtgtgtgtgtgtgtgtgtgtgtgtgtgcatgcacctactcttcaggtgtcctctcctctgtttgagacaagtcttctctgatagaacccagcaaataaactaacgagcaatcccagagatctcccgtctctgactcttaaatttcgcttgttaattccttattgctcttaatgtgtcccacatttatatctttattctcaagttttaattataaatgtatgagtactcaaggctcacagcatgaaagcttgaaatataaatctctcagtgatgatcacaatgagtataccatacctgtcaccttagacatccgagatggttttctagctggaaggtcatctgggcggtgtccaccattaccccaattcagctccagctcagagcttctcaaacctttctcatcctaggctccttctgcctgaagaattgtttttttaaagatttatttatttcatgtatgtttgtgcactatcaccgtcttcgggcacacctgaagagggcatccggtccccattacagagggttgtgagccaccatgtggttgctgggaattgaactcaggacctctggaagaacagtcagtactcttaaccactgagccatctctccagcccctgaagaatttttatgtgtccctgagtatagaaaataggtacacacactagacatttattgatagtaaatcattgtattttaaaacattgtctggtataaacataattttatcatttgtattagttacctttatattgctgggataaatcatgatgaccaggccagcctggtctacagggtgagttccaggacatccagggccacacagagaaaccctgtctcaaaacaaaactaaactaaacaacccacaatgaccgaggcagctttcttttatttgcgcttatggttccagaggagtcagagcctgtcatgagagggaagcatggcagcagcctggagcagaagctgagggctcacattttgagctgcagacaggaaacagaaaactagcaatggggcaagtgaaacccagaaagcctccctcagtgacaggcaggtgctccgacatgaccacacaccctacgactccccacacagcatcgccaactgcagagaaagcaatcaaatgtgtcaggttgtcggtggtgtctcattccaacacccgcattccattccctggcctcccccatagtcttgtgacctcataaaaatgcaaagttcgtgaagttgaacatcaaatgtctcttctgagactcagggcgatgtgtaaaaccgaaaagcaaataacagacttcccccatacagtggtacaggacatatatcactgttctgaaaggaaggagtccgcacagagaacatactgaaccagaaaggaagaccgaagcccagcaggatgaactcagttctctagccccatgtcctgtgtcaaagggcttaggtgcctctgcccctccaggcttgccgtctgcagcatacgtgcatctggtgggctggctccacttcgtgtgtgcagctctcttggacagccatttcacagccccaacatcttccaacatctcatcaagccaccacagcactcatttaagacaaaaagcaaagttgtgtactaataaggcccatgtgctagtttatctagttaaatgttagctaaatatttgatgctatgggctgaaggtagctgtcggtattcacttcacataatgcataatacaaatggtagatgtgttagagccattttcagaaacccctggaaattctattctaattttgtgtgtctctgtctctctctctctctctctctctctctctgtgtgtgtgtgtgtgtgtgtgtgtgtgtgtgtgtgtgtgtgtgtgtgtctgactctcagtacacaatgtggaagtcagtgggctgacggtcctcaccttccactttgagattgggtctcattctccactgtatttgccaggctccattgggagctgctggaaagtctcctgttccccatttccctgtcaatgctggggtaacagatagataccctttgacatctcccttttctgtaatgtggcttatagagatctcaactaggttgtccgtcttgtgcaagaagtactttaaccattgagccagttcccaagccccatcttttctttctgaattttaaaagatgcaacttgagcagcagttttaaaatatttttaagcttgtgtgtatatgtgtgcgttgtgagcctgtgtgagtttatgtgtactgtgtgtataggtacaaccagaggagggtagatcccctgtactgcagttacaagcaattgcaagccccctgatatgagtgctgggtcctttgccagaggaggcactgttaagccaacaaagaaccaacacatccaaccaatacaatacaaagatgggttgatgcatgctgggaaataggggtagacatgtgttaaaggtgcattttctgtacgtaaatcattaagtttcatatgcagtgttcattggctctgttcggtgtcgccagtgcacggttcgattgttgtgtagaactaaggctgcagtgagcagaggccatgtcaccagagacatcctgaattcatcacactggtttgagaatgccttataggagttagctttcctctcagaaattgaactcaagtcattaggcctaacggcagctctgtgatagcttttctttttaacacccatttgattcaaacaggaggctctgactagaggtctgccctctagggttgcctgttaaggtcaaattaatccctcagccacttctctcttgggctcacactccagaccaccgaccatatcacccttgagcctcgtctggacacagaatggcaactaatgtcctgtgtttgctgaaaccattcaaatgatgtcaggttaaacctgcccaccctgcctcacctcctccttcccgtgagcctcagtggagaggtcaccccgtttcctgccgcttagtcagctgttcctcccagaacagtaatacaaaactagattctctgtctctgtgtctccccatcccaccccagactaacctcagagtctctgtcgcccggatggccttaaactcctaatcttgtccccttactcctcaagtgctggaacccagggctccacacatgctaagcaagctctccaccaaccttagttctccccaggacccacacccatcactaatcctggttttgctttttctggggtttccccccacagtgctgggacttgaactcagaacctctgccatgccgagaacatgccctgccatgacctatgcccccagcacactgtctttttagaaacatataaagaaggtcatagccacacactaacacttttctcatcgctgcaacaaatgacaagagccacctaaggttttactttggctcccagttgtgcatccacggtaggcagtgaggttgtgcagacaggagcttgccgcagctagttacattgtagtttggtagagtacgtcatactgagtgcctcttcacatagtgcatcttactctaatcatatttacgcgcaactatatacaggcagaagatggtaaaggtctacctccaaggtctctcaacagacacaatgtgcctccgcgtgtataccccagaaaccggcgcttctcttcttcctactggatacattgggaggaaagttaagtagaaacggtctaatgtgattgtcattaggagtgagaaatctgtactactcttcagagagtacacacagtgcttggaaggcaggggtttgaggaggttctgaggaagccagatccactgtttggagagggatgagtgtgcgcgtagtcagtgcagaaggcagtaggctactgtgcattgtcagaaggggagtgggtctcactcagtccaagtgaagctgggttacttagtctctgtgtgtcctcgtggtaggtctcttccctcagtttcctcagcaactggatcttcaggatactgaagtgcctggatggcaacatcaaattcttctccaatgaatcaaagaaaaaaaatcaaaagggaaatttggaaatactgtggtatatttaaagtgaaaatacaccacgtgaaactcctgaaatgtaactgggaaatgtctagctgttaatggccatgttataaaccaagagggctgtgagcatctgcgtggtagagcataagtctctgaagtcagtcctcagcatggaggagaaagcctcaagttcactgccagctgaatgtcttaatgaaatgcaagagtgtgctaattattaaatgccaaaagggaaggataagtatcaatgaaactgaaattacttcctagaaaatgtcaacaaaattgagaagccctcagtagactgattggagggggggtgacgagggagggagggagggagagggagagagagggagnnnnnnnnnnnnnnnnnnnnnnnnnnnnnnnnnnnnnnnnnnnnnngagagagagagagagagagagaatgaaaatattcaaataatcaaaagtagaaaaagttattactacctattcctcaaagagctatggtagtggatacattgcagtaccggtgaaagccacaagagggcatcagcgcccctgaagccagcgctataaggagtagctctgctactgtgcagtgtagatgctgggaccagaactctagtcctgtggaagttgcagcaagtgctcttcactgagccactctccagcccctgccacctacttttgaaagaactatatacactgacaattgcagggcctgtaaatgtgaaaactatcaaaactgacacaaagagacaaaaataaaatcatgcaggaccaagaacaaaggagattgaaccggtgcttataataatgcaaaaacccacaacaaagtgaatgcctttgcagaagttaattttgtcaacttgattaagaagtatgcaggagggtccatgagttggctcagtgagggacacactgttaggcgagcctgactcctgagtttgatccctggaacccatggaaagatgaaagaccctttcctttatgaaccgcttcataaagctgttctctgatgcccctttccctgcaacacccttgagtctctatatgtgcacatgtgcaaacacacacacacacatgcacacatttttaaaaagcacctagtatgtggtgagttttaatagtctacttgacacaaccaggaatacctgggaggggcttctcaagggattctgggggattacgtagcttacattagccggtgggcatgcttgtgagggagtttcttaattcagtgaactgaggtgggaaggccaccctgaatgtgggggacaactacaaaaatattaatttcagggctgaggtggaggtcctccactgaatgagacagagtgagctcagaacaagcatgggtgaatactctctacccctgccacctcgatgggctgtgacctggggttttgagccaaatcaacattttcttccttaagttgcttttgacagggtgtctttatcacagcaacaggaaaagaaaccaagactcctgggagattagagaagcacagatttccgttcactggtgaatgcagaagttggggcctgttggaggaaggtcactagaggtacatccttggctatatcttcccatgaccccttttgattctcctctgttttttcttggtaagaaacagagaatcagaaagtaaactctgaaattcataattagttgacatgtgttttgtgtgtgggtacgcgtatgtgtgggagtgcattgtctcatggtctgtgtgtcaccaggacaacttgtgggaatcaattctcccctgatatgggctctgggctttaaagtccagttgtcaggctgctgtgtgacagacttttcctggggaggcacaacatatgcacatccacccatcccagaaagggagccaacaacaacaacaacaacaacaacaacggcaaaacccaaagacataaagtacacaccaaagggcatcaactcagagtgacaactggatcagaagaaacacttatggtcctgtaggtgatacagctgtccaggctgatgtcccttctttgccgttactgttgtgtgcacatgtggtgagtgtgtgaacacaggcacgcggtgccacccacgggaggggaagtgtgtggagagcagctgtctgaagcggttctttccttccacggcgacatcagggagcagtcagcttttcattcttgtccaggaagcccttcacctgctgaggatccagctgctcctccttgtaggcgtccaccattgccccctactagaacttagtgtaatgcagacaactaccaaaataataaattagaggtctggagagccagctcagtggtttagagtgctggctaccctcccagaggactagggttcaaatcccagcacccacgtggtggctcaccaccgcctgcaacttcagttccaggggatcaaacaccctctctggcattcgtggacactgcacacaagtagtacacaggcatacctgcaaacagaagattcataacgtaagataagaacttaagaaatcaatttaaaattgaagtgacatttctgtgaggggtagcgtgtgtgtccctgccattcatcccggcatgcatgtgaaggtcagagaacagcttgccaaagctggctctttagcttctttatgtggctctcaggaattgaactcagggttgtcagacctggtagcaagtactggctgagccctgtcacaaactcacatagacagacagacagacagacaaacaaacaaacaaacaagctcctatttgtcttgagttctgtgtgaggctatctttccctgatatctccttatccccactcccactcagctcactgagccctaaagtgtgtccccaaggcccctcctaaggtccatgtctcctactggtacttagagatgtctccatcgtttccatggtcccagcccactgcctcagtgcagctggcagcttccagcatcctactgaccacggaccacaaggcaagggcggaccacatctgcggccaggcatggtctcacccagcattgttttttgccaggttaccttggagtctgtctggcctgctcctcatttcacagtgggttctaccctctgggttttattgctgattgcagatcaccctggcagccactgaggcccagagggcacttctttcctccccagccccaggtcttttgcagtctccatttggctgactgctacctctatgggtcgatttggctccgctctgtctggaagtattcttgttcagagatccttcatgcgtcaggtatcttagttctctttcagctatgcccaagctttctcccgcacctaatgcaacaatgttattagcttatcagtgttcactaagtacagtggaccaaactacttaacatatgagcctggtcgctttctgggtcctaaagcctgacattttctgagatactagatagtgacagtgagagtggggtacccggctcccatccctagtgggactcgccctttccccagcacatataaaaagcaatatttgtgttcaggactgggtgcatacctgtggctaggccatccctgttggagaagcgggaatcacacaggcagacagctatggtgcaactccctgcctcaccatgctagaactagcaaaggaaattcactcgagattctttttagacttaagcagtgctgatgggtcctgaagtttagctgagccagtggaagagacaggggcaagtgactgtattgtgggcattgcactgagctgtgctgagtgcccagagcacacagggtcctggcaactagaaacggccttagcctaagtcttaccttggctggatgtggatgctctggcaagggtcctgttaaaatttgacacctgttaaatttgaaggtgctatgcttacacttaacagccccagcagggcagctgcttatagatataaagatgaaggaggcacggcaggagggacttccggcaggaaggaagctgtgtcaaagacagttggctgtctctctctacctttaactatcagattggtaagagaatgggttccaagaaactgacatttctttggctgagccctgctgggagaaggaaaaggctgaggcccggggccagccaaagagttacaattttgcaagactttgcaacagagactgttccccagacagtgataaagggttgggtggacagggacaattgtggctccccatacctcttgctctctatttaaccctaagctttgtgtctggaccacacacacggacatggaagtactgtcacagagcctctttgctcctcttccaatgcatatattgaataaatctcaattttccgggttttttccccctttttcttcagtactcttagtcatttaattgcctccctgagaacacatggccagacctgacatactggggaggctgtcagggtttgagttcagggaaaaagcaggtttgtcaatgtaagttacca

SEQ ID NO: 574 - DNA, 7000 bp, Mus musculus
aatcccagcaaggagccggtttacctttctggctatggagtggaactggcgatcaagagcacggagtacaaggccaaggatgatactcaggtgaaaggaactgaggtaaatgccacggtcatcggggagagcgaccctattgatgaagtgcagggattcctctttggaaaattaagagaactgtaccccgccttggaaggacagctgaaagagttccggaagcaccttgtggagagcaccaacgagatggcccccctgaaagtctggcagctgcaagatctcagcttccagactgctgcccgaatcttggctgcttctggggcattatctctggtggtgatgaaggacattagtcagaactttcctaccaaggccagagcaataacgaaaacggctgtgagcgcgcagcttagagcggaagtggaagagaaccagaagtgggtcaacaacctagaggtcgatagccgatataactcatggccttcaagcttacaggagttactccgccccacgtttcctggcgtcatacggcagatcagaaagaacctgcataacatggttttcattatcgatcctgtacacgagaccacagccgagttgattagcatcgccgagatgttcctcagcaatcacataccgctaaggattggttttatctttgtggtcaatgactctgaagatgttgatgggatgcaagatgctggagtcgctgttctgagagcgtataattatgtggctcaggaagtggatggctatcacgccttccagactctcacacagatctataacaaggtgaggactggagagacagtgaaagtggagcacgtggtcagtgtcttggagaagaagtacccgtacgtggaagtgaatagcattctgggaattgattctgcttacgatcagaatcggaaggaagcaagaggctactatgagcagactggagtaggccccctgcctgttgtcctgttcaatggaatgccctttgaaaaggagcagttagacccggatgagctggaaaccatcacaatgcacaagatcttggagacaaccaccttcttccaaagagctgtgtacttgggtgagctgtcccatgatcaagatgtggtagagtacatcatgaatcagccaaatgttgttccaagaatcaactctaggattctgacagctaagcgagagtatctggacctaacagcaagcaataatttttatgtggatgactttgccagattttctgccttggactctcggggcaagacggctgctattgccaacagtatgaactatctgacgaaaaaagatgattcttttattagaccagtgactttttggattgttggagattttgatagcccttctgggcggcagctactatatgatgccattaaacatcaggcaagtgtctcagatttcattctgggggggggggggattgtggagcgcctgagcacccctgtgctaaaaaccagtaacaatgttaggataagtatgatcaacaatcccagccaagagatcagtgactcaagcacccccatcttcagagccatctgggcagctctgcaaacacaggcctccagctctgctaagaacttcatcaccaagatggccaaagaggagacggcagaggccctggccgcaggagtggacattgcggaattctctgtcgggggcatggatgtcagtctttttaaagaggtctttgagtcttccagaatggatttcattttgtctcatgccctgtactgcagggatgttctgaagctgaagaagggacagcgagtggtgatcagcaacggaaggatcattgggcctctggaggacaatgagctcttcaaccaagatgatttccacctcctggaaaatatcatcctgaaaacatcgggacagaaaataaagtctcatatccaacagcttcgagtagaagaagacgtggccagtgatttggtaatgaaggtggatgctctcctgtcagcacaacccaaaggagaggcgaggatcgagtaccagttctttgaggataaacacagtgcaattaagctgaagcccaaagaaggagagacatactatgatgtggtagccgttgttgaccctgtcacacgagaagcacagaggctcgcccccttgctcttggttttgactcagctgataaacatgaatctaagagtatttatgaattgccaatccaagctttccgacatgcctttaaaaagcttttaccgttacgtcttagagccggagatttctttcactgcagacagcagctttgctaagggaccgatagcaaagtttctggatatgccacagtctccgctgtttactttgaatctgaacacacctgagagttggatggtagaatctgtcagaacaccatatgatctggataatatttatctagaagaggtggacagtatagtggctgctgagtatgagctggaatatctgttactagaaggtcattgttacgacatcaccacaggccagccccctcgaggactacagttcactttaggaacttcagccaacccaacaattgtggacacaattgtgatggccaatctgggatattttcagctcaaagccaatccgggagcctggattctgagactgaggaaggggcgctcagatgacatttataggatctacagccatgatggtacagattcccctcctgatgcaaacgacgttgttgtcatcctcaataacttcaagagcaagatcatcaaagtgaaggttcagaagaaggcagacatggctaatgaagacttgctgagtgatgggacaaatgagaacgagtctggattctgggactcattcaagtggggcttctcaggacagaaggctgaagaagtgaagcaagataaagatgacataatcaatattttctctgttgcatctggtcatctctacgaaagatttcttcgcatcatgatgctctcagtcctgaagaataccaagactcctgtgaagttctggttcttgaagaactacttgtcccccacatttaaggagtttataccttacatggccaaaaaatacaatttccagtatgagcttgttcagtacaaatggccaaggtggcttcaccagcagacggagaagcagcgaatcatctggggctacaagatcctcttcctggacgtgcttttcccgctggttgttgacaagttcctctttgtggatgctgatcagattgtacggacagatctgaaggagttaagagatttcaatttggatggtgcgccttacggttacactcccttctgcgacagcaggagagagatggatggctaccgcttctggaagtcagggtactgggccagtcatttggctggacgaaagtatcacatcagtgcgctgtatgtcgtggatctgaagaagtttaggaaaatagctgctggagacagactcaggggacagtaccaaggtctgagccaggatcccaacagtctttcaaatcttgatcaagatttgcccaataacatgatccatcaggtgccaatcaaatcgctccctcaggaatggctttggtgtgaaacgtggtgtgatgacgcctctaagaagcgggcaaagaccatcgacctgtgtaataatcccatgactaaggagcccaaactggaggctgccgtgcggatcgtccctgagtggcaagactacgaccaggagatcaagcagctgcagaccctcttccaagaggagaaggagctgggaaccctgcatacagaggagacgcaggaaggctctcagaagcatgaggaattatgatctctggaggaagatgggaaacccaccttgacagtttggactaactgctgttttctctgatctttcgatacgactgctgatgaacggattgggcaggtgtaccacacctattgatctgagcattgatttagactactgcaccctagtgggtgctagatccttggggctaaggctctgttggatttgtacctcagaggaagacaagtggctggtcttctgggactcttcttctcaccagagggagaaatgccggcagcaactgcaagaagcccagtccttcggtgcccacagcccagagcacacactgctgtgctggcccagaagctgggcagaaaggtcaccatgttcttccttacctcagtttacctgcagcccttgctgcagtgcagatgcccaccctgtaccaggtcaggccggcagatgcttcatccatgcctcaaggtctacgccaacatgcttctcacgtctcttcccctccccaccccccttcccaagcactaggcttgttgtttaatggagcccaaccaataatcatgtgtcttcagggttggctcagtgcagttgctaagcaaatcagtcttcaggagaaacggggtggtgtggataaggctggaagaaatggcaggtagtggagagtgttggggtgttcgatggaagacaaaaacatgggccgttctcttcagtctagtacccagtgaactgtccaggtaattgttttgtaaacaatttttctatttatgaaaatgtgtgctttttcttcttactttctaaaaagctgttggttatcagtttcctggctgggcacaggcgtcctgagtccctcggtgaccgctctcagcgtgctcagcctccgtctggatgcaccatactgtctgccctttcccttgtagagttttctctcagacccaggggataactttgggtgtttcttcccccaaatgctctcagacctgtgaccaggaatgactctgtctctggaactcggtttcctacactctgtctttcccttgtgctttggctctgagggtcccctttggctttcgagacttgccgaggtctggtccagttctaaggtactgctgctgtctgaagcagcacccttcactgctttgtgttcacagccacagcccagcatcacctcgggagcagcctgggctgaggagccttccacgtgttgttaacctggctggacaggtgtgggtgtgtggtgtcatctctgcccaggactcagggatctacagcagagtgttagtgttgctgggcacagggtgtggctcagtggcagacagagtgcttgtctagcaagcccaaggccttctgtctggtactgtatctccccagcccccccccccccaaaaaaaaagactgaatatgaggaatgagtactgtgggtaactaagttcttgcctgtccaagctaggtaatatgtgtgttaccatggaagaatggcctacaggagccgtggttagggatttgagtgggcaattgttaagtaataagtagagacagaaaactggattgggaattcagagaaccagcattaacccccttacctcgtcagctggagctcccactgagagtcctgggcagagcacaagtgtcccctcaggtcaggaatccacataagagaacaaagagcagcactaaaaacaacatcatttagttcggtgctcacgacaccccagaaacgagctggggggctgctaccatcggtcggtcagcagggttttctccctctccctctgcaggcgcttgggtagcaaggacaggctgtagcgagccctctgaccttggaaaggtgtctgggaataaattacttcccagctgtttcaagcgatgtattttgactcttggattatcaaagtgttttgtcatttgtcataaagtcagggaaggggcacacatccccagacaaagggccatggaggatacgtttgagacaaacatgttccatagcttcttagcttaactagcccttgacatttattgatacagtgtatattacaacatgaatttcaaaaaataaaaaaattaccacacatatatcaagtaatatctcccccccccccattttcaaatctaaaagttagcttaagagccagcctttgttcaggcttcatgtccaccctggattaagctctcagggctgctgcgcccgactgtgagcggaagctgtcttcccagtgccctgggagcctggagtgttgagcaggaatagtcagtgctctgagatgctggcccggtggccagggtccttctcttaccaaattatgtgtgcctcctctgaggaagaggaaggcatgggtctcctatggccctttagtccctcgtgggtcactacactgacataagtcatattcagagctgatgctggctaggccagaccctaaactaaacccttctaaagctgtccaggccccccctttcctggtccttccttgcatcctgtggattaaatcatctctacaaactaagccactgccacaaatgggctgctgccggcaagtggccctggaagggtgtccctgtcagatttcacctgacattctcaccacgaaaaagcatgttgtgactgaaaagagagatgagctattctccaagaagcaggaagtgactgagcagacaggttattgaggctcctggagagctcaccgccattcttggcctgcgaataaatggttctttgacctcctgtcatatagcagtagagtgtttcctttctgaatcactagggtagtgtgacctgtgacaagtcagactgtgccgatgtgaatccatgaaaagcggcccttgactggacctggggctgtggggcacagctctccagagtcctgggttagaagtatcctggatgcacccatgtcgagagtggtaatgtgctggtttcataagatagttggcgttgttacccgggcagaggttacatttctggttgagcatggtcgtctcggggcgtgcatgtgtgcaccgtgcagggcctgtctggtcaggagcagacttcatggcaggtatgttacctggctctcgtctgagttgctgaaagatgagctgagagcccagtgctaaagaaggaagaaaagaacaagcaaacaaacaaacaaaaaacaggaaacaaacttgactggcatagtttaggactggtcagatttggtcaccagtatgaagtcaactcctcttgtccgcgtgtcctccattaaattacccttctaaaattacccttcctagttagacccgcatgctt

SEQ ID NO: 575 - protein, 1242 aa, Mus musculus
NPSKEPVYLSGYGVELAIKSTEYKAKDDTQVKGTEVNATVIGESDPIDEVQGFLFGKLRELYPALEGQLKEFRKHLVESTNEMAPLKVWQLQDLSFQTAARILAASGALSLVVMKDISQNFPTKARAITKTAVSAQLRAEVEENQKWVNNLEVDSRYNSWPSSLQELLRPTFPGVIRQIRKNLHNMVFIIDPVHETTAELISIAEMFLSNHIPLRIGFIFVVNDSEDVDGMQDAGVAVLRAYNYVAQEVDGYHAFQTLTQIYNKVRTGETVKVEHVVSVLEKKYPYVEVNSILGIDSAYDQNRKERYYEQTGVGPLPVVLFNGMPFEKEQLDPDELETITMHKITTTFFQRAVYLGELSHDQDVVEYIMNQPNVVPRINSRILTAKREYLDLTNNFYVDDFARFSALDSRGKTAAIANSMNYLTKKDDSFIRPVTFWIVGDFDSPSGRQLLYDAIKHQASVSDFILGGGGIVERLSTPVLKTSNNVRISMINNPSQEISDSSTPIFRAIWAALQTQASSSAKNFITKMAKEETAEAAGVDIAEFSVGGMDVSLFKEVFESSRMDFILSHALYCRDVLKLKKGQRVVISNGRIIGPLEDNELFNQDDFHLLENIILKTSGQKIKSHIQQLRVEEDVASDLVMKVDALLSAQPKGEARIEYQFFEDKHSAIKLKPKEGETYYDVVAVVDPVTREAQRLAPLLLVLTQLINMNLRVFMNCQSKLSDMPLKSFYRYVLEPEISFTADSSFAKGPIAKFLDMPQSPLFTLNLNTPESWMVESVRTPYDLDNIYLEEVDSIVAAEYELEYLLLEGHCYDITTGQPPRGLQFTLGTSANPTIVDTIVMANLGYFQLKANPGAWILRLRKGRSDDIYRIYSHDGTDSPPDANDVVVILNNFKSKIIKVKVQKKADMANEDLLSDGTNENESGFWDSFKWGFSGQKAEEVKQDKDDIINIFSVASGHLYERFLRIMMLSVLKNTKTPVKFWFLKNYLSPTFKEFIPYMAKKYNFQYELVQYKWPRWLHQQTEKQRIIWGYKILFLDVLFPLVVDKFLFVDADQIVRTDLKELRDFNLDGAPYGYTPFCDSRREMDGYRFWKSGYWASHLAGRKYHALYVVDLKKFRKIAAGDRLRGQYQGLSQDPNSLSNLDQDLPNNMIHQVPIKSLPQEWLWCETWCDDASKKRAKTIDLCNNPMTKEPKLEAAVRIVPEWQDYDQEIKQLQTLFQEEKELGTLHTEETQEGSQKHEEL

SEQ ID NO: 576 - DNA, 106130 bp, Homo sapiens
  misc_feature (1)...(106130): n = A,T,C or G
nnnnnnnnnnnnnnnnnnnnnnnnnnnnnnnnnnnnnnnnnnnnnnnnnnnnnnnnnnnnnnnnnnnnnnnnnnnnnnnnnnnnnnnnnnnnnnnnnnnnnnnnnnnnnnnnnnnnnnnnnnnnnnnnnnnnnnnnnnnnnnnnnnnnnnnnnnnnnnnnnnnnnnnnnnnnnnnnnnnnnnnnnnnnnnnnnnnnnnnnnnnnnnnnnnnnnnnnnnnnnnnnnnnnnnnnnnnnnnnnnnnnnnnnnnnnnnnnnnnnnnnnnnnnnnnnnnnnnnnnnnnnnnnnnnnnnnnnnnnnnnnnnnnnnnnnnnnnnnnnnnnnnnnnnnnnnnnnnnnnnnnnnnnnnnnnnnnnnnnnnnnnnnnnnnnnnnnnnnnnnnnnnnnnnnnnnnnnnnnnnnnnnnnnnnnnnnnnnnnnnnnnnnnnnnnnnnnnnnnnnnnnnnnnnnnnnnnnnnnnnnnnnnnnnnnnnnnnnnnnnnnnnnnnnnnnnnnnnnnnnnnnnnnnnnnnnnnnnnnnnnnnnnnnnnnnnnnnnnnnnnnnnnnnnnnnnnnnnnnnnnnnnnnnnnnnnnnnnnnnnnnnnnnnnnnnnnnnnnnnnnnnnnnnnnnnnnnnnnnnnnnnnnnnnnnnnnnnnnnnnnnnnnnnnnnnnnnnnnnnnnnnnnnnnnnnnnnnnnnnnnnnnnnnnnnnnnnnnnnnnnnnnnnnnnnnnnnnnnnnnnnnnnnnnnnnnnnnnnnnnnnnnnnnnnnnnnnnnnnnnnnnnnnnnnnnnnnnnnnnnnnnnnnnnnnnnnnnnnnnnnnnnnnnnnnnnnnnnnnnnnnnnnnnnnnnnnnnnnnnnnnnnnnnnnnnnnnnnnnnnnnnnnnnnnnnnnnnnnnnnnnnnnnnnnnnnnnnnnnnnnnnnnnnnnnnnnnnnnnnnnnnnnnnnnnnnnnnnnnnnnnnnnnnnnnnnnnnnnnnnnnnnnnnnnnnnnnnnnnnnnnnnnnnnnnnnnnnnnnnnnnnnnnnnnnnnnnnnnnnnnnnnnnnnnnnnnnnnnnnnnnnnnnnnnnnnnnnnnnnnnnnnnnnnnnnnnnnnnnnnnnnnnnnnnnnnnnnnnnnnnnnnnnnnnnnnnnnnnnnnnnnnnnnnnnnnnnnnnnnnnnnnnnnnnnnnnnnnnnnnnnnnnnnnnnnnnnnnnnnnnnnnnnnnnnnnnnnnnnnnnnnnnnnnnnnnnnnnnnnnnnnnnnnnnnnnnnnnnnnnnnnnnnnnnnnnnnnnnnnnnnnnnnnnnnnnnnnnnnnnnnnnnnnnnnnnnnnnnnnnnnnnnnnnnnnnnnnnnnnnnnnnnnnnnnnnnnnnnnnnnnnnnnnnnnnnnnnnnnnnnnnnnnnnnnnnnnnnnnnnnnnnnnnnnnnnnnnnnnnnnnnnnnnnnnnnnnnnnnnnnnnnnnnnnnnnnnnnnnnnnnnnnnnnnnnnnnnnnnnnnnnnnnnnnnnnnnnnnnnnnnnnnnnnnnnnnnnnnnnnnnnnnnnnnnnnnnnnnnnnnnnnnnnnnnnnnnnnnnnnnnnnnnnnnnnnnnnnnnnnnnnnnnnnnnnnnnnnnnnnnnnnnnnnnnnnnnnnnnnnnnnnnnnnnnnnnnnnnnnnnnnnnnnnnnnnnnnnnnnnnnnnnnnnnnnnnnnnnnnnnnnnnnnnnnnnnnnnnnnnnnnnnnnnnnnnnnnnnnnnnnnnnnnnnnnnnnnnnnnnnnnnnnnnnnnnnnnnnnnnnnnnnnnnnnnnnnnnnnnnnnnnnnnnnnnnnnnnnnnnnnnnnnnnnnnnnnnnnnnnnnnnnnnnnnnnnnnnnnnnnnnnnnnnnnnnnnnnnnnnnnnnnnnnnnnnnnnnnnnnnnnnnnnnnnnnnnnnnnnnnnnnnnnnnnnnnnnnnnnnnnnnnnnnnnnnnnnnnnnnnnnnnnnnnnnnnnnnnnnnnnnnnnnnnnnnnnnnnnnnnnnnnnnnnnnnnnnnnnnnnnnnnnnnnnnnnnnnnnnnnnnnnnnnnnnnnnnnnnnnnnnnnnnnnnnnnnnnnnnnnnnnnnnnnnnnnnnnnnnnnnnnnnnnnnnnnnnnnnnnnnnnnnnnnnnnnnnnnnnnnnnnnnnnnnnnnnnnnnnnnnnnnnnnnnnnnnnnnnnnnnnnnnnnnnnnnnnnnnnnnnnnnnnnnnnnnnnnnnnnnnnnnnnnnnnnnnnnnnnnnnnnnnnnnnnnnnnnnnnnnnnnnnnnnnnnnnnnnnnnnnnnnnnnnnnnnnnnnnnnnnnnnnnnnnnnnnnnnnnnnnnnnnnnnnnnnnnnnnnnnnnnnnnnnnnnnnnnnnnnnnnnnnnnnnnnnnnnnnnnnnnnnnnnnnnnnnnnnnnnnnnnnnnnnnnnnnnnnnnnnnnnnnnnnnnnnnnnnnnnnnnnnnnnnnnnnnnnnnnnnnnnnnnnnnnnnnnnnnnnnnnnnnnnnnnnnnnnnnnnnnnnnnnnnnnnnnnnnnnnnnnnnnnnnnnnnnnnnnnnnnnnnnnnnnnnnnnnnnnnnnnnnnnnnnnnnnnnnnnnnnnnnnnnnnnnnnnnnnnnnnnnnnnnnnnnnnnnnnnnnnnnnnnnnnnnnnnnnnnnnnnnnnnnnnnnnnnnnnnnnnnnnnnnnnnnnnnnnnnnnnnnnnnnnnnnnnnnnnnnnnnnnnnnnnnnnnnnnnnnnnnnnnnnnnnnnnnnnnnnnnnnnnnnnnnnnnnnnnnnnnnnnnnnnnnnnnnnnnnnnnnnnnnnnnnnnnnnnnnnnnnnnnnnnnnnnnnnnnnnnnnnnnnnnnnnnnnnnnnnnnnnnnnnnnnnnnnnnnnnnnnnnnnnnnnnnnnnnnnnnnnnnnnnnnnnnnnnnnnnnnnnnnnnnnnnnnnnnnnnnnnnnnnnnnnnnnnnnnnnnnnnnnnnnnnnnnnnnnnnnnnnnnnnnnnnnnnnnnnnnnnnnnnnnnnnnnnnnnnnnnnnnnnnnnnnnnnnnnnnnnnnnnnnnnnnnnnnnnnnnnnnnnnnnnnnnnnnnnnnnnnnnnnnnnnnnnnnnnnnnnnnnnnnnnnnnnnnnnnnnnnnnnnnnnnnnnnnnnnnnnnnnnnnnnnnnnnnnnnnnnnnnnnnnnnnnnnnnnnnnnnnnnnnnnnnnnnnnnnnnnnnnnnnnnnnnnnnnnnnnnnnnnnnnnnnnnnnnnnnnnnnnnnnnnnnnnnnnnnnnnnnnnnnnnnnnnnnnnnnnnnnnnnnnnnnnnnnnnnnnnnnnnnnnnnnnnnnnnnnnnnnnnnnnnnnnnnnnnnnnnnnnnnnnnnnnnnnnnnnnnnnnnnnnnnnnnnnnnnnnnnnnnnnnnnnnnnnnnnnnnnnnnnnnnnnnnnnnnnnnnnnnnnnnnnnnnnnnnnnnnnnnnnnnnnnnnnnnnnnnnnnnnnnnnnnnnnnnnnnnnnnnnnnnnnnnnnnnnnnnnnnnnnnnnnnnnnnnnnnnnnnnnnnnnnnnnnnnnnnnnnnnnnnnnnnnnnnnnnnnnnnnnnnnnnnnnnnnnnnnnnnnnnnnnnnnnnnnnnnnnnnnnnnnnnnnnnnnnnnnnnnnnnnnnnnnnnnnnnnnnnnnnnnnnnnnnnnnnnnnnnnnnnnnnnnnnnnnnnnnnnnnnnnnnnnnnnnnnnnnnnnnnnnnnnnnnnnnnnnnnnnnnnnnnnnnnnnnnnnnnnnnnnnnnnnnnnnnnnnnnnnnnnnnnnnnnnnnnnnnnnnnnnnnnnnnnnnnnnnnnnnnnnnnnnnnnnnnnnnnnnnnnnnnnnnnnnnnnnnnnnnnnnnnnnnnnnnnnnnnnnnnnnnnnnnnnnnnnnnnnnnnnnnnnnnnnnnnnnnnnnnnnnnnnnnnnnnnnnnnnnnnnnnnnnnnnnnnnnnnnnnnnnnnnnnnnnnnnnnnnnnnnnnnnnnnnnnnnnnnnnnnnnnnnnnnnnnnnnnnnnnnnnnnnnnnnnnnnnnnnnnnnnnnnnnnnnnnnnnnnnnnnnnnnnnnnnnnnnnnnnnnnnnnnnnnnnnnnnnnnnnnnnnnnnnnnnnnnnnnnnnnnnnnnnnnnnnnnnnnnnnnnnnnnnnnnnnnnnnnnnnnnnnnnnnnnnnnnnnnnnnnnnnnnnnnnnnnnnnnnnnnnnnnnnnnnnnnnnnnnnnnnnnnnnnnnnnnnnnnnnnnnnnnnnnnnnnnnnnnnnnnnnnnnnnnnnnnnnnnnnnnnnnnnnnnnnnnnnnnnnnnnnnnnnnnnnnnnnnnnnnnnnnnnnnnnnnnnnnnnnnnnnnnnnnnnnnnnnnnnnnnnnnnnnnnnnnnnnnnnnnnnnnnnnnnnnnnnnnnnnnnnnnnnnnnnnnnnnnnnnnnnnnnnnnnnnnnnnnnnnnnnnnnnnnnnnnnnnnnnnnnnnnnnnnnnnnnnnnnnnnnnnnnnnnnnnnnnnnnnnnnnnnnnnnnnnnnnnnnnnnnnnnnnnnnnnnnnnnnnnnnnnnnnnnnnnnnnnnnnnnnnnnnnnnnnnnnnnnnnnnnnnnnnnnnnnnnnnnnnnnnnnnnnnnnnnnnnnnnnnnnnnnnnnnnnnnnnnnnnnnnnnnnnnnnnnnnnnnnnnnnnnnnnnnnnnnnnnnnnnnnnnnnnnnnnnnnnnnnnnnnnnnnnnnnnnnnnnnnnnnnnnnnnnnnnnnnnnnnnnnnnnnnnnnnnnnnnnnnnnnnnnnnnnnnnnnnnnnnnnnnnnnnnnnnnnnnnnnnnnnnnnnnnnnnnnnnnnnnnnnnnnnnnnnnnnnnnnnnnnnnnnnnnnnnnnnnnnnnnnnnnnnnnnnnnnnnnnnnnnnnnnnnnnnnnnnnnnnnnnnnnnnnnnnnnnnnnnnnnnnnnnnnnnnnnnnnnnnnnnnnnnnnnnnnnnnnnnnnnnnnnnnnnnnnnnnnnnnnnnnnnnnnnnnnnnnnnnnnnnnnnnnnnnnnnnnnnnnnnnnnnnnnnnnnnnnnnnnnnnnnnnnnnnnnnnnnnnnnnnnnnnnnnnnnnnnnnnnnnnnnnnnnnnnnnnnnnnnnnnnnnnnnnnnnnnnnnnnnnnnnnnnnnnnnnnnnnnnnnnnnnnnnnnnnnnnnnnnnnnnnnnnnnnnnnnnnnnnnnnnnnnnnnnnnnnnnnnnnnnnnnnnnnnnnnnnnnnnnnnnnnnnnnnnnnnnnnnnnnnnnnnnnnnnnnnnnnnnnnnnnnnnnnnnnnnnnnnnnnnnnnnnnnnnnnnnnnnnnnnnnnnnnnnnnnnnnnnnnnnnnnnnnnnnnnnnnnnnnnnnnnnnnnnnnnnnnnnnnnnnnnnnnnnnnnnnnnnnnnnnnnnnnnnnnnnnnnnnnnnnnnnnnnnnnnnnnnnnnnnnnnnnnnnnnnnnnnnnnnnnnnnnnnnnnnnnnnnnnnnnnnnnnnnnnnnnnnnnnnnnnnnnnnnnnnnnnnnnnnnnnnnnnnnnnnnnnnnnnnnnnnnnnnnnnnnnnnnnnnnnnnnnnnnnnnnnnnnnnnnnnnnnnnnnnnnnnnnnnnnnnnnnnnnnnnnnnnnnnnnnnnnnnnnnnnnnnnnnnnnnnnnnnnnnnnnnnnnnnnnnnnnnnnnnnnnnnnnnnnnnnnnnnnnnnnnnnnnnnnnnnnnnnnnnnnnnnnnnnnnnnnnnnnnnnnnnnnnnnnnnnnnnnnnnnnnnnnnnnnnnnnnnnnnnnnnnnnnnnnnnnnnnnnnnnnnnnnnnnnnnnnnnnnnnnnnnnnnnnnnnnnnnnnnnnnnnnnnnnnnnnnnnnnnnnnnnnnnnnnnnnnnnnnnnnnnnnnnnnnnnnnnnnnnnnnnnnnnnnnnnnnnnnnnnnnnnnnnnnnnnnnnnnnnnnnnnnnnnnnnnnnnnnnnnnnnnnnnnnnnnnnnnnnnnnnnnnnnnnnnnnnnnnnnnnnnnnnnnnnnnnnnnnnnnnnnnnnnnnnnnnnnnnnnnnnnnnnnnnnnnnnnnnnnnnnnnnnnnnnnnnnnnnnnnnnnnnnnnnnnnnnnnnnnnnnnnnnnnnnnnnnnnnnnnnnnnnnnnnnnnnnnnnnnnnnnnnnnnnnnnnnnnnnnnnnnnnnnnnnnnnnnnnnnnnnnnnnnnnnnnnnnnnnnnnnnnnnnnnnnnnnnnnnnnnnnnnnnnnnnnnnnnnnnnnnnnnnnnnnnnnnnnnnnnnnnnnnnnnnnatcttggctcactgcaacctctgcctcccaggttcaagacccattctcattctcctgccttagcctcccaagtagctgggattaccggcgtgtgccagcatgcctggctaatttttatattttcagtagagatggggttttaccatgttggccgccaggctggtctgaactcctgacctcaggtgatctgctctccttggcctcccaaagtgctgggattacaggcgtgagccaccgggcctggccaagatttactatcactttctgaatcattttgtacaattaactgtaacaggtgtttttgtgatattctgtttaacattctttttttgagatggagtttcgctcttgttgcccaggctggagtgcaatggcgtgatctcggctcaccgcaacctctgcctcccaggttcaagcgattctcttgcctcagcctcctgagtagctgggattacaggcatgcaccaccaagtccggctaattttgtatttttttttttttttttttttagtagcgatggagtttctctatgttggtcaggctggtctggaactccccacctcaggtgatccacccatctcggcctcccaaagtgctgggattgcaggtgtgagccaccgcgccaggcctctgtttaacattcttaccctgaattacattttgttactttcacttttatttacactaatttcttgatagttgtacattcttgatcattgtcctagaagattcttacagcataaaactatggacttttgagaaagaatgctaaaattgccagccctaattgctcaatattttcagtttctttgatcactgtgaagtggacagggtatactgttttcttcaccaacttccttatcacagacatctccccctttcatgatatccctggtcatttgccattttgttttatttttattaatttttttccttggcatgtgaagtaagagctacatttgcccttttggtttactatttttaggccccttctcctgtggctatttgtatacagtttcccaaggtaatacgacatgtaggcaactcatagaaatgagctatgcttattagaatccacttagtattcacctccagagctagcagagcccaccattcttccttcttatgtctgtgggagaccctgatgttggatcaaggtactgtgtccatctggttaaggatgaagggtcaaaatattttactacactttatggcatgccaccaccacagatcttttgccttccttgcatctatcccttagggactaaaaatattcctgttgtgtatttttagattggacctgatgtttgtgaaggagttgtagctttgtgattgtctatgaagtgatatttatctttaattgaagtaaaacactaaatatgttttctgcagctgtagctacagaaatattatataaggaggtattattaaaatcaaaaccaataatcatttactgagtgctaaattttgtaatgacccaagaatgtagcatgttagaggtataaattaaataggcatgaatttatattccagcttttccattgactaactctatgtccctaagaaagtcagtagcatctctgaatggcagcttctttatttgaaaaacggttatatctgagggtggctgtgtgggtttgcggacacgagtaaatatgccaagcttagtgactgtaacatcgtagagcctccttaaatattagtttcttccctcctagttccacatagaaggaagaccaatgctgatctcccgcaatagctttggaaatctaagaaaacaagttgtcacctgatttgtactatcttgtgggcattcattctggttgtttgtagttttttttgtgttgtagattaaaaacttgtcctggattatggcatttcaaaacatttatatatggagagaatggtataatgtactctctctgtacccatcatcctgttttaacaattatcaatttaagtacaataaccaccatcaccacccccttctctcctcccgcactagaatattttaaagcaaatcccagacatcatatagtttgtaaaatcataattttttttttttttgggatggagtttcactcttgttgcccaggctggagtgcaatggcacgatcttggctcactgcaacctccacctcctgggttcaagcgattctcctgcctcagcctcctgagtagctgagactacaggcgcccgccaccaccctcgactaattttttgtatttttagtagagatggggtttcaccatgttggccaggctggtctggaactactgacctcaggtggtccacccacctcagcctcccaaagtgctgggattacaggcgtgagccacggcgcctggcctgtaaaatcataatttatgctcagtggaataagtattatataagaagctaaaaaaacaaaaagcaacaaaaatatgctgtaaaaaaaggcagcatttctttaataatatcttgtattgttattctctcctctgggttgtttcagtggatctagtaagtaatattaggacttttccaagtttagaccttgtaagaccttatgtatgcagtggggtgaaaagaatgtatgtttcaagaagtttccctgtaattgtatgaaaagcatgtatttattcgtgtgtggcctttactgggagagtcttagtctgattgaatcttagttctcaccacactggtgagtgtgtcaccttgcccctctctgcttatcttgtgaatgtgcctttaattaattaatttagtgtttatttgcacatcctgatgtatctgtcttaggacttgttttcttagactataagctatgccaagcttggtgtggtgtctatgtcagttactagaaagcctagaaaaatactactttcaaggaggcattgagaaatttaatatattatgataatgggtattttcagaaacctatttttagagaagctgtgcattaccaggaaatgtttcttatttttcccatatttctgtgtctagctgtggagtagagtgagattgtacaccccagtgttcacaagtaatgggaaagtcttcctttggctaggtaagctgagatccagatctgtagtttgctttaagacagtgaaagatcaccactgcattagtattatggctcagaggagaagataagcaattgacatgaatcattcaattactacgtgcatttcctcgtaggggttttagactcttgaatgaagggaaatttagactggccattattttagtaggataaagtcgaaaaaaattaagatggcattaagttcttggatctgattttgttagatcagtgctaattttaaactaagtttggtgatcttgaaaatttggatttaagagtgttaaaagattacaacatgctgcctttattctcagaaatttttctacggttcatattttactgtgggagaactttaggcaaaacatattttttgttctttgtaaggcctttcagaaaataagtaagcagaactagtactagaatcatcagttcctaattcttcttccactactcatagtatttttgtcaatggggtttcataagctttctttatattgagacttcccttttatgtttttattattccaggtttcttaagaaatagctattaagtgaaaaagttcataggctaagttattaataactaataagataggacttgattatcattaaaaatatatatattatacataaaagagtattatatattatagattaaaagtcaaactatggacatttggaaacttcaaaacttatttttactctctttagtaatatagtttatattagaaaattttattaagttgttttatttctgatcttttctcccagtgagtttttagcagaagacagtcaagagaaattttggaattttgtagaagccagtcaaaatattggatcatcagatcatgacggtaaaattgaagcaaatgcttctttgactttggtgtctgggaaaatattaggaaaaaattgtctctttatagtatgtgtggcatggcagttaatggaaaacattgttgtctttaatgactggagttatgatggtggtcaggaagagccaacacaacacaaattattatttttgaagcaatgtatacctttggctataagtggtacctttgtttttttccccttttgtttttgttctatcgtgatcctttattaaagtgctatgtgaatattttgtggaagtacatttcattttaaatcattcagtattaataaccatctaatctgattcactatttttgttatgaactacacaactgagctattatctgttaagttcattatcattaagttagtatcatccagagtgttttccattatgcctgccagccacccacaacttgagtgttaaggtatcaaatgaatgattatcctgtaaaacctcatttgcagtttttatgatgtgctttcacattttttaaacttcgtataagctatatagggtgtaaacattaatagttggagatgctgatatgtgagtagttaaaaccttgaatattaatttacattgacagatataggttattattatttttttttaatttttattttttgagatgaagtcttgctttgtttccaggctggagtgcagtggtacgatctgggctcactgcaacctccatctcccaggttcaatcatttctcctgactcagccttgcaagtagctgggattacaggcattcgccactacgcctggctaatttttgtatttttagtagagatggggtttccccatgttggccaggctggtctcgaacttttgacctcaagtgatccacccgcctcagcctcccaaagtgctgggattacaggcatgagccactgtgcctggccagatataagttcttacagaagaggaaatgtttcaaaattgtgtgactgctgctgatgttaatgggttgttttttttttcttcttttaaaattatttaattattatttttttaatacaatggagatgaggtctcactgtgttgcccaggctggtctcaaacttctgggctcaagtgatnnnnnnnnnnnnnnnnnnnnnnnnnnnnnnnnnnnnnnnnnnnnnnnnnnnnnnnnnnnnnnnnnnnnnnnnnnnnnnnnnnnnnnnnnnnnnnnnnnnnnnnnnnnnnnnnnnnnnnnnnnnnnnnnnnnnnnnnnnnnnnnnnnnnnnnnnnnnnnnnnnnnnnnnnnnnnnnnnnnnnnnnnnnnnnnnnnnnnnnnnnnnnnnnnnnnnnnnnnnnnnnnnnnnnnnnnnnnnnnnnnnnnnnnnnnnnnnnnnnnnnnnnnnnnnnnnnnnnnnnnnnnnnnnnnnnnnnnnnnnnnnnnnnnnnnnnnnnnnnnnnnnnnnnnnnnnnnnnnnnnnnnnnnnnnnnnnnnnnnnnnnnnnnnnnnnnnnnnnnnnnnnnnnnnnnnnnnnnnnnnnnnnnnnnnnnnnnnnnnnnnnnnnnnnnnnnnnnnnnnnnnnnnnnnnnnnnnnnnnnnnnnnnnnnnnnnnnnnnnnnnnnnnnnnnnnnnnnnnnnnnnnnnnnnnnnnnnnnnnnnnnnnnnnnnnnnnnnnnnnnnnnnnnnnnnnnnnnnnnnnnnnnnnnnnnnnnnnnnnnnnnnnnnnnnnnnnnnnnnnnnnnnnnnnnnnnnnnnnnnnnnnnnnnnnnnnnnnnnnnnnnnnnnnnnnnnnnnnnnnnnnnnnnnnnnnnnnnnnnnnnnnnnnnnnnnnnnnnnnnnnnnnnnnnnnnnnnnnnnnnnnnnnnnnnnnnnnnnnnncgatcctccctgccttggcattccaaagtgctgggattacaggcgtgagtgactgcacccaggctagattttactttattttattttattttattttattttattttattttatttattttttcgagacagagtcttactctgttgcccaggctggagtgcagtggcgcgatctcgactcactgcaatctctgccacttgagctcaagctgttctcctgcctcagcctccggagtagctgggattacaggtgcccaccatcgcgcccagctaatttttgtagttttagcagagacggggtttcgccatgctggccacgctggtctcaaactcctgacctcaggcaatccacccacctcagcctcccaaagtgctaggattatgggtgtgagtcaccaagcccggcctagttttgattttagaaacagagtctggctctggaggctggagtgcagtggtgtagttcactataatcttgaactcctgagctcaagcagtgttcctgcttcatcttcctcagtagctggtattacaggtgtgtacaaccaggcctggctaatttttaaattttgtaaagatgggtctagctgtgttgcacatgctggtctcaaactcctggcctcaagacatccctgccctgcctctcgccttggcctcctaaagtgatgggattacaggcgtgggccaccatgcccagcctgaatctttttttttttttttttttggagatatagatatgtaaatattttaaacaagcatctgtaggttttactaatttagaggcaactagaattaagttatcaaaaaatactttatttttaagattttatagaacaaatttatcaaagtgggtttataatcaaatttgaactttgacatttaaaataacattttttcagtaaaaatgataatattaattaaagctataggagtatgaattctatgaacaacataaaagcatgttaaacattttatttgtttgaaatattatttatattcctgccacccaaagattgacaccattaacattctggcatcattttgagatatttcttatctagttttacgtagaggatgctgttgcagtataaaaccttttatattctggctcataaaatgttaatatttatattttgttttttacatggaacattttgttttcattatttacttatttattttttgagacagtctcctcttgctcaggctggagtgcagtggcgtaatctcgctgcaacctctgcctcccggattcaagtgattttcctgcctcagctgggattacaggtgcatgccacctcccgtggctaatttttatatttttaatagagatggggtttcaccatgttggccaggctggtcttgaactcctgacctcgggtgatccacccacctgccccttccaaagtgctgggtttacaggcatgagccaccgtgccctgcctatttctgttttttttaaaaagagatgcactatgttaccaaggctgatctcttgagctcctgggctcaagcaatcctcctgcctcggcctcctaaagttttgggattacaagcaagagccactgtgcttgtcctttaaaatggaaaatttaagttttttgcatggatatatgtgattccgaagtcaaagctgtataaaaggttatacacagagaaatcttgtttcttccttgaccctgttccttctgtttctttcctgctttttataacattttaaattaatttgtttagccttaagtgttttttacagcaaatatatacatatgtattcttatttctcattctttctcctggtttaaaaaaaagttactatgtacattgttttgtgcctttgcttttcatttatcctggggattttttcacattcgtatttggatttttttttctttaaaataatttggtccaactttttgtttaaatgcttcttttcaaactttacaatttcattagtattctttaatactgtgtaacttcctcatgacactgctcagttttgtttagtttttggagtagttaccatatgctaggcatcatggatataaggataaataggtcatagcctcttcctctggggaccagaagtctaagtggggtatagatagacagtgaataaataatttagtaaatgatatgataagtgaaagaggtaaacaaagacgtgttctgggattgaggaagaggtttaactggtccattgaagcatggggtagggattgtggagactttctggagtaggtaatttcacagctgaattatttctgaggaagtatgtagctgtaagtcatccaggtaagtgggaaaatagcggtccaggggagggaatagttcgaaaggtgagaagagaggaagagcccaactgcattttgtactccagggagttttaagcatttgttgagagttcaagacaatatactggtaaaacttgccttcacatacctttgtaaacacagctttgtgcttcatgaactatcttctttagatatctctagtcatacgcaattactttggttaatgttcttccttgacaggtaccgattattcctactatcatgcaatattggaggctgcatttcagtttctgtcacccctccagcagaatttgtttaaattttgtctgtcccttcgttcttactcagctacaatccaagccttccagcaggtgggtccagtgctcttaaagaacagcattttagagtgtatatcatgatgaatggatggaccccagttgtcctggaattgaattacagagctattatcacttttttgcctgaaattttctaggatttatgatttttaaaaaaaataataagcaaaattgatgttaagtcttcaacccacagatttaaaaaaataagaaaaagaatatatagaaaagagacagcaatattttatttatgcattgcagcctgggagatgtaatcttgttaaaccagtgagccagcatctaattacagcctgtagttctaaaagcagttcacaggaaatacaggaggcaagaaatgtttagcatcaccacagggatgcagtcaggaaaatctagaattcaggaatcgttgtagtaaagtaatctagtttcttcagtacataaattatggaaatttctattgtaattgaaaagaaaaagagggacagaggaacctcaagttaagagagacttaagaagagacaaagatgtcttcaccaacttgatatttgatataaaagcaatgctaattttaaaattattttttattataaaataaaacatggaaaaactcctcacaaaaaaatatagtaatggactattataatgtgaacatccttgtaattttcacccaagtcaagaagcaggacttagtctggcaccatggaaagccctccatgtactgtgtcctgattgtggccacctttcacccctgaaaccaaccaccctgttaatttctgttggaatcacttgcttgttactgtattgtattgcccaaaggtacatcttcacacaataaagtgattttttttttcatttttctttattttgtgacacagtctcgccctgtcacccaggctggagtgcagtggcgcaatcacagctcactgcagcctccacctcctgggtttaagtgattctcctacctgagctggggtagcctgctaccacacccagctaatttttgtatttttagtagagacaggatttcgccgtgttggctaggctggtctcgatctcctgaccacaggagatctgcctgcctctgccccgcaaattgctgggattacaggcatgagccactgtggctggcctgtttttgcatttattgattttgtttttttgagacagggtcttgttctgttgcccaggctggagtgtagttctgtgattacggatcactgcagcctcaacttttcaggctcaagcaatcctcctacctcagcctccttagtagctgggactacaggcgtatgccactgtgcctaattttttattttttttattttttgtagagatggggtctcactatgctgcccaggcttaagtggcaggcttaactgcccaggcttgggcttaagtgatgctcccactctggtctcccaaagtgctgggattacaggcacgagctaccacactcagccagtttcaacaatgttgttttgtcataatttaatcacctattttgattatacatgtctttatctcgtctttggttagaaatttaaaaagtatgtgttgtgtcttatgtgacagatagcagctgatgaacctccaccagaaggatgtaattcgtttttttcagtgcatggaaagaagacttgtgaatctgatacccttgaggctcttctactgacagcctctgaaaggtagattatgtgtttctttattttcatgtcatgcatttccagtgctgcttctgcatttggtctaccttctgattttctcatctgttttgtatcattaggtgtaatggtttagagtatggcttctggaaccagactgactatatttgaatctcagctccgtcacttaaaatagttttgtgaaatgtggcaaattactttctttcctaatctcatttcaaaatggagatgatacaagtatttagtattaactgttactgtttagtaatgactgcatctgagcaatgacatagattttgtcattggcttagtaaggaatactgtgtgtattaaagccaatgcctgaaataatgatattaatgataatatctctcaggatattattagtttcagacaaaggaggatatttgaaagataattgcaggcttgatttgaatattaatttggtaactaatgtaccagctttttgcccaaaggtgggtttcctgtggtagacaactctgctatgtatcattttgctgaccggctagggcagcaagccctctgtacctcctctaatgctgttcataaacagaaccgtgatctctccgtggggttggccggccctctcagtactgctaatggcagttaggtggtgtaggtcttctttagtgagattggctgcccagcacccatcctctgcccaccaaatggcattagtgcttcttactcagagtgccgaccaaaaaacagcgtgcgttccagccatctccgggtcaaggcatggacattcagaaatggctgcatggtgatacagtagtgctgtctcttgggggaaacaaaattgatggctttgtaattcttttaaaaaactttaatttgctacaacaataatgcatacctttatgaagaaaagaacaacggtgtctcctctctctgagaggcggtaactgcttttaatggtttggcatatataccttcagacttttttctatggttttaaatttatatatgtaggtagttttatttttataaaaggtatctttcaatttagtacaagtgggtatacctcgttatttttaacacatgcataacctaggtaagactgtcccgtaattggtaatttacctcttaccgatggatttttaagtcatttcctcctgttacaataaggctatatggagcatctgtattcatgtctttactttctgctgagttgtatagtttattataatagagactggtaggtcataaagtctgtgcattaagatctgttaatatcttgatgccatccttagataagtttttttgggagaagttttaaaatttatgaggaaaactgaaatgttaagtccattgggggcacaagcctgtagtcccagcactttggcaggctgaggcaggaggatcacttgatcccaggaattccagaccaaccggtgcaacaaagtgagacgcagtttctccaaaaagtagctgggtgtggtggcagtaaccacgcacacgcctttggtcccagctactcgggaggctgtggtgggaggatcactttagcccaggaggtagagactgcagtgagccctgttcatgccactgcactctagcttgggcaacagagtgagaccctgactccaaaacaaaaacagaaacaaaaacgtccattaggaagatcatagtagtaaaaatagtagaggagatagacttagtagaattggcaagtaatatgctgaatgtcatcctgtgctttttgcattatttatacttacatttttatttatttatttattatttatttatttttgagacggagtctcgctctgtcgcccaggctggagtgcagtggtgccatcttggctcactgcaagctccgcctcccaggttcatgccattctcctgcctcagcctcccaagtacaggcacccaccaccatgcccggctagttttttgtatttttagtagagacggggtttcactgtgttagccaggatagtcttgatctcctgacctcgtgatccgcccgcctcggcctcccaaagtgctgggattacaggcgtgagccaccacgactggcctatacttatagtttcaaataaaaagctaatcatattctatttatatggtagaaaaatatacttggccagccatggtggctcacgcctgtaatcccagaactttgggaggctgaggtgggtggatcgcttgagtcaggagtttgagaccagcctgggcaacatgacaaaacccatgtctacaaaatatacaaaatttagttgggcatgatgtcgtgcacctgtagtccctccttgagctctggaggtcgaggctgcagtgagctgagcgatcacgcgactgtgctctagcctaagtgacagactgaggacttctcaaaatataacataatataacatattatattggccaggcctggtggcttttgcctgtaatgccagcactttggggaagctgaggtgggtggatcacctgaggtcaggagtttgagaccagcctggccaacatgatgaaacactgtctctactaaaaatacaaaaattagccgggtgtggtggtggatgcctgtaatcccagctactgaggaggctgaggcaggagaatcacttgaacccaggagggagagttgcagtgagctgagaccatgtcattgcactgccagcctgagcaacaggaatgaannnnnnnnnnnnnnnnnnnnnnnnnnnnnnnnnnnnnnnnnnnnnnnnnnnnnnnnnnnnnnnnnnnnnnnnnnnnnnnnnnnnnnnnnnnnnnnnnnnnnnnnnnnnnnnnnnnnnnnnnnnnnnnnnnnnnnnnnnnnnnnnnnnnnnnnnnnnnnnnnnnnnnnnnnnnnnnnnnnnnnnnnnnnnnnnnnnnnnnnnnnnnnnnnnnnnnnnnnnnnnnnnnnnnnnnnnnnnnnnnnnnnnnnnnnnnnnnntaatcttaatttgaattttcataactgtactttatattttgtgacatttttagtgtttcacaattatttttaaagttttgagcttttattatttattttcagacccaaacctttattgttcaaaggagatcacagatatccctcgtctaatcctgaaagccctgtggtgattttctactctgagattggctctgaggaattttccaattttcaccgccagcttatatcaaaaagcaatgcaggcaaaatcaactatgtattcagacattatatatttgtaagtattgacttattttacacctgttttgaatgtaatttgcctagcatgactttagaacataagctaataatctccctctttataaaaaaatctagttatttgaatcccttttttgataaatccagtagtttcattgagtctattatttgcacatatgatgtgctttgcttggctttctgaagaaatataaaacatgctaaaaaagtagctcgataaagtttacattttatttcaaaatgaaccatgtaaataatcttttctgattttaatatggtcatcatactatggaactgattgttgaattcagtttcctttccaaccttttttcttctgttttctctttgccacctttttatttggtggaagggggaggattttctaaacaggcgattcataggtagacttgatgtaatattaagcttttaagactctgtgtaatatttagtcatttaaaatatttatatgtaaaggttgttagccctttaaagtttctatgtcataataagctcagtactaagttcatgcaaaaaaaataaaattttatttattgatttatttatttttgagacagagtctcgctctgtcgcccaggctggagcacagtggcgcgatttcagctcactgcaacctccgcctcctgagttcaagtgactctcctgcctcagcctcccgagtagctgggattacaggcactcaccatcatgccggctaattttttgtatttttagtagagagggggtttcaccatgttggccaggctggtctcaaattcctgacctcaggtgatctgaccgcctcagcctcccaaagtgctgggattacaggcgtgagtcactgtgcctggccataaaattttaaatgaaaatttgtacaagcagaaagttttattgaagtccagtttttgattctccctctgcccccttcattgctgttaggatggatgttaatgtctgaagggccatcttcagtcaggatgctggtgagcctgtgacatctggtcactccaagctccgctcgaaggcatttaaatttaataaaaagcatactcccatgggcctcaaaaaacacctctgggactgagacctcaccagctttcaaccctgctttgtaggttctggaacttctttttctctttctccatttcttatggttgggaccatagcactttcagctgtccattcatctggttttgcttctaccttggaattccattcccacagttgtggcagcctacaacatgtaaaggagcctaggattttataaggagagaatatagactctgaattgatttttaaaacatataatcaatattttaatggtagatacgtgcttttattactcttgagtttttggtaggttttggactaaaaaaatttgtttagtgaactttcttagccatatagttaatatcgttaaaaaacaatttaaagatattttgagggcataatccgaggtaatggctagtagatgcaacattaacatggtcatgccatgtacactgtgacatagaaagagctaggtggtaatgatggaattcttgctttacttgcagaatcccaggaaggagcctgtttacctctctggctatggcgtggaattggccattaagagcactgagtacaaggccaaggatgatactcaggtgaaaggtgaatttgtaaaaatgggaccagtgtgctttcttcaaatatgagttaaaggggagtttgtttccatatgaaaaataatagatttaggtgtatgctgaacctgtgtttgcatcctggttctgttacacctgagtgggtgacccttaagcagattctctagatcccagttttctcttgtgtaaagtacaggtaatgatacatgtctcttccagtattggggaggaataaataagatgtgtaaggaaagaattttttcatgtactaaaaaaaaaaaaaaaaaacaaaaaccctcaaaaaaagaacctggcacagtggtttgcccaaaaacgttcagcaagtagtagctattgttgttgatgttataggggatttacaaatagccatttatttgtgactccaacgtgaaatcttaaagtatcctatatttaacaaacaattttatgttgtttattatttctgtacatggaacagtttactgtggatactttctgttgtaatactctagggttttgaatttattattttacctacaagttttaaatgatattttttcatttcttttatgcttattttaaagataaaaaatcaatttgagtagtaaagcagatggaaaataaactactacctcattctattttcttcaataattgtattaggattaagttgactaattataaattcttcagaattttaatattgaaaaattctttgttcatagtgtttgactattaatttcataattgtccataatgtttaaatgtattaattttgaagtttttagcatgtaaaattttcaaagtttaaggaaaaatgcattctttatccaggaacacaggagatattaaaatgcatttatcctgtttgtttaaagaaccattgccaaagggtaattgtgatagtcagcattttaaatggtataatttcaggggtttctgatttttttcacattattcaattttatgaagtttatgagactagtaacgtttttgtttcaaatctgagcaattattaataatatgtattttctattctttcataggaactgaggtaaacaccacagtgattggtgaaaatgatcctattgatgaggttcaggggttcctctttggaaaattaaggtatgtatgttctgtgtattttgggaaacgccctcattttctttaagcctccaggctttcttgcattttaagcatcatcttactcattactgtctgagtttctcatctcctaacagtactttatgtatgcaatcctacgtggaaagtcaaccacttagtttatagtacagtttatgatttcacattattcttttttttttggagacagggtctcgctgtgtcgcccaggttggtgcagtggcgtgatctcaactcactgcaacctccactttccacgttcaagtgattattctgtctcagcctcccaagtagctgggattacaggcatgcgccaccacacccggctaatttttgtatctttagcagagatggtgtttcgccacgttggctaggctggtctcaaactcctggcctcaagtgatccactcgcctcagcctcccaaagtgctgggattacaggcatgagccactgcgtccagcctgaagcacattattcttaattgatagtatggctacctgcccacagtttaagtgcgtttttcttgcctctcagttgatggcattaagttacataccattttttgattgccataagaggagaaattgaattgtttcacttaatattttcccaggaaaaaatgtatttaaaagtttttttcaaacatagtctgagcaaaaatgcgaaatagatatagtaaattttatacatgctcaatgggaaaaacattttattattattttttatttatttatttattttttttgagacagagtcttgctcttttgcccaggctggagtgcagtggtgcaatctcagttcactgcaacctccgtctcctgggttcaagtgattctcctgcctcagccccctgagtagctaggattacaggcacccaccaccatgcctggctaacttttgtatttttagtagagacggggtttcaccatgttggccaggctggtcttgaactcctggcctcaagtggtctgcctgcttcgctctcccagagtgctgggaatacaggcgtgagccatggcccccagctcagaaaaaacattttattagaatttgctttatgtgaaaggaaatggtattttaaaaaattccataattatgtaatcatttaatgaaagcatcatcataacctgttaatgtaagcatcatagtattttatagctggaaagtcttcttaactgttattctttttttttttttttttgagacggagtcttgctctgttgcctaggctggagtgcagtgccacgatcttggctcactgcaagctccgcctcctgggttcacgctattctcctgccttagcctcccaagtagttggaactacaggcatccgccaccacacccggctaattttttgtatttttttttttagtagagatggggtttcactgtgttagccaggatgatcttgatctcctgacctcctggtccgcccgccttggcctcccaaagtgctgggattacaggtgtgagccaccgtgcctggcctggaacgtcttcttagctgttattctaaaagttgaagttatttccctcatggcttgataattgtttagagccctgaattctgctttatctggcagtttttattaggacattttgtgtgtgtgtgtgtgtgtgtgtgtgagagagaaagagagagagagagagcgaaagagagagaaagtgatcaaatagaaatagtatatgctagactcagttttatatacttcagctttgagatttggccaagtgaaataaccagattaacaatttagaagagatatcttagtttacattgaattacatgttgagttcatcctacatatatgtacatttcttctcgtttaacatcagttttgaccttgttagaatgtaatcatattctatttttatttgactcaggctttcagaatccttttctaaaaaaattttttcgagacagggctttgctctgtcactcagactggagagcagtggcacaatcacggctcactgcagccttgacttcctgggctcaagggatcctcctacctcaccctgtcgaatagctgggactacagttgtgtgccaccatgcctggctaattttcaaatgttttgtagagatagagtcttgctatattgcctaggctggtcttgaactttgggttcaagtgattgtcctgccttggcttcccaaagtgttagaattacaggtgtgagctaccactcccagcttcagaatcttttttcacatttgtggtgtttatgtttattttttgggtagcatgatgattttatgcattcacagcacaaaggtattatcaagaatattgaggctgttttaccttttggacattcagaatagttatttagctatccaaagtaattagaccttttttttttgtttgagacaggctcagtctgtcaccaaggctggagtgcagtggcgccatcatggcctgctgcagcctccacctcccgaggctcaggtgatcctctcacttcagtttttgtatttgtggtagagatggggttttgccatgttgcccaggctggtcttgaactcctgggctcaagggatctgcgcaccttggcctcccaaagtgctaggattacaggtgtgagccaccgcgcctggcctcatttttggtatttaagagtttgtataggttgagtgtcttttttctgaaatgcttaaactagaactagagtgtcagatttcaattttggaatatttgcatgatacttaccagttgggcaccccaagtctgaaaatctgaaacctgaaatgcttcaatgaacatttactttgatgtcatgttgacatttaatgagttttggattttggagcattttggatttcagaatttcggatttgggatgctcaggctgtagtaactgacaggaagtgggttggttggacagtgaacagtctgagggaattttaatttctgtatgttgtattaagaaattttgagttagccgggcgcggtagctcacgcctgtaatcccagcactttaggaggctgaggcgggcggatcacgaggtcaggagttcacgccattgcactccagcctgggcaacaagagtgaaactctgtctcaaagaaaaaaaaaaagaaattttgagtttatggcatttaaaagaaaaaagtaatgtactagccgtctgtctgatgtaaatgttatatctctgccccagatcacctctgctttactatagtggaatatgctatatttaaagataaaacccagtaactatggttagcctaaattgtattcatgttactaagagatttatgagcatgtaggctaaaggaaactcattttgggactggcagcagtttttttcccttcagttttactttgagaaattacagtgattcacaaaagcatagagaaaaatttattcccacatacttacaacccagaatagattgctgttgtcatacttgcttttctcttctatagaactatttattaagctttttttttttcccagtataagcctttttttactttaagaacaaaggaaaacaaacaaaaaataaaacaggtcagtaaacactgcaggtatagccgaagtctcctttgttcctttctttctttcattttttctttttttttttaagagacaaggtcttgctgtgttgcacaggctgacctggaactcctgggctcaagtgatcctcctgccttggcctcctcagtggctgggattacaggcgtgagccaccacacctggcctgaaaagtctcctttgttaaccactctcagtctccttatctacctcatagggaatcactattctagcaatttttctataaattttatgagttttaaactagcttctaattttctattttttttaaagaggaataattatacttcattttttccccctatgtcgtagaaaatttcctagggttgggacaggaaaaccatgaagataaagttggtttacttcttcttatgctccgggaaagaaaaaataatgaaaaggactgatttttatgtttcttttagagatctgcaccccgacctggagggacagttgaaagaactcagaaagcatcttgtagagagcaccaatgaaatggcacctttaaaagtttggcagttgcaaggtaatgaaaacagggagaggtcattggcctactttttggctaagttttatggctttaaaaaatgcaaaatttgaatttaattgtatgtagtacgtgattctgaaggtgcctcagattttaaagataagagtgattaattacgattaatcagggaagaaaggaagtccttttgtaaacagataacactaggtagaagtaatatatataaacaaatggcaagtctttctgtgtgaccatacataaacttgtaatacgagaagcaggtcatagtcctaagttcctatatatatacatttcttcaactgtttatctatagagtgtttaagacatgtcattgtggcaggatgtatgtgtttttctctgttccaaagaactatttttcaagtttttttccccaacgtcatttactaaaagtcttcatgctgtattttgtgatgtattgtaaatttagaaaagggaaaaggacttgggcctgatttagcctctgctacatgcgttagtgtgtgccctagtgttttctgcagatatatcagaaacggctcaactgaatactccagagatctttgaagtgaataaaacctgaaattaaatcatgggcactctctggaatggttgcattcgaagacattcttaattaccatgaaaagagtgggaagtaaatttggattttgttttctgcttctcattgcattagattaatccacttttaattatatttgacattgttgcagatctcagtttccagactgctgctcgaatcttggcttctcctgttgagttggctttggttgtcatgaaggatcttagtcagaattttcctaccaaagccaggtaatgtagaataatgctcttctccttaacatcatacccagtcatcgtcatgttcacttgccaaatgaggtaataacaatatgaaaattcctagaaaattaagattcttttttttttttttttttgagatggagtctcactcttgttgcccaggctagagtgcagtggtgcaatctcggcttaccacaacctccgcctcccaggttcaagcgattctcctgcctcagcctcccaagtagctggtactacagacgtgcgtcaccatgcccagctaagtttttgtatttttagtagagacagggtttcactgtgttggccaggctagtcttgaatgcctgacctcaagtgatctgcccgccttggcctcccaaagtgctgagattacaggcgtgagccaccacgcctggcgaaaattaagattctttatgaccaccaccactactattgcagatggtgctctgtgtcttgaagatggcaagaccatgcattgtgtggttgaagtgacagatttaggttatgttcttagcacttccacttattagttgtgtgacctttgcaaataaacaacctcagtttcctcagcagtggaacgagaattaaaatacctgcctttcaggattggatgagtcttgctcatataactaactaatctagagtctgtcccagaccatagtggttttcttcatgaaaggttttacatatgtcatcttattgaatcttgaagaaactgagtcatagaggctaagtgactagttcatagtgacagaataagattttgtttggaccgggcttggtggctcatgcctgtaatcccagcactttgggaggccaaggcctggctaatttttgtatttttagtagagacagggttttgccatgttgatcagactggtnnnnnnnnnnnnnnnnnnnnnnnnnnnnnnnnnnnnnnnnnnnnnnnnnnnnnnnnnnnnnnnnnnnnnnnnncaggagttccagaccagcctggccaacatggtgaaaccgcttttctactgaaaatacaaaaaattagctgggcgtggtggcaggggtctgtaatcccagttactcgggagtctgatgcaggagaatcgcttgaacccgggaggtgaaggttacagtgagccaagatcatgctattgcactccagcctgagcaacaagaacgaaactccgtctaaaaaaaaaaaaaaagattttgtttgtacgttttctgacattgccttcaattctgtaatattgctgcacatctcataaatgcaaggcaaaattgttttaaaagccacatttttagaaactattgacttgaatggttcccagtcattttcttgagtcactgaatgaagtgttttgacttctgatgtgagatattttataactaagtttgtttatttgggacttagacatcatgtagtgaattctcatttagtccagctgctacttgaaggtatacatgaatgattccacctccaccataagtgcttaagtgggaagagcaatctgctgccttggtgtattcaacattatccttttagcctgagagtagtagagatcatatatagaaatggggtgcatatgttttaagaacttggaaacaactgcacctgttttataatgctatagctgctacatttctttgattttgtatcttacaaaaaatatacacatctgagaaaggagaaatatatttatcaattataaaaatttaaggtttttcccattcagttttttctaatttattgaataatgtgtttcatattttaaaatatggaaattgaagactttatatcaaatattaagccaagcactcataatgtttttatttccttagagcaataacaaaaacagctgtgagctcagaacttagaaccgaagtggaagagaatcagaaggtattcaccgatagaaaatactgacctgttttgtattctatctttaaagataaggaaatctgagtttaatcagcagcaattaacagtgtcactcttcttttatctaagatggtgattttttcatttctgtgatctttgcatttttagtttttaatgaaagttcagtatgcacgtaactgaaagcatgaagtggtgctaccgtgttgtttaggaaagcagcacccctaacatgtctcaccccgttcctgaagacattcactttcgacatttagctgattcttctgatatttctctccagaattctagcttacattggtactttatttttcacgttcagacattatatattggcctcctatttaaacagtgtggtttaactttctttcactgcctccccctcagtgtcccaccactattctatattggcactgttcctgtctatccatcttctcaatattggatgttgtggttttacctggttttgatgtggtctgagatggactggttgctctttatgcccagggcatgccggtcatcctgagaccttcctttaacctcctttgttggatcctctgttgcttgattccatgtcttttgtgtttttggtttatttccttgttttggtacagctcatcattctttgtgagaaaagttgcctgggaggcaaatttgaaattctgagaaatcaactttctacttgtttttgtttttgttttggagatggagttttgctctgtcacccaggctggagtgcagtggcgtgatctcagctcactgcaagctccgccttccaggttcacgccattcttcttcctcagcctcccaagtagctgggaccacaggcgcctgctaccactcccggctaatttttttgtatttttagtagagacggggtttcaccgtgttagccaggatagtctcgatctcctgacctcatgatccacccgcctcggcctcccaaagtgctgggattacaggcatgagccaccgcgcccagccaactttctacttgtttttattgatagctcgttatacaatattggcaggttatacaattctaggttggaagtcatttcaaaatttgaaacaaggcatcgcctcttggaattttagtttccattgtggctgttgagaaatctgaagcctttgtatgagatctcttaaggatcttttctttgactctagttatctgaaatttcataattatatgtgtttttaaaaaaatctctgtactgttaggtggttcgtgggcccttaaaatcttgaaaatcatttcctttagctttgggaaattttcttaaattctttgtttgtgtttcttctctctggtttctctttcctcttttcctagaaatatgtatttatttattttttaaatgttgcacctctgactagtttggccttttaaaagtctcttctttcctattcttttctctttttcaaaaaaaaaaacactttctggtaagagtttttaacctgtgtgtatctttcttcctttagttgtcaaatatttaattttcaggggttttttttgttctttttatggtgttcccgtgtatctctgaagataatggtgcttgtgttttctgtctgcaaagtctgtttcctcttaagctgcgtttttgggttttggtcttttcagtggtggaggccttccttaggtgtctggtgatcacactcagagtgaggcactaaggacctggttggaagtcctaatgatgtggctttgtgactgtaaggtgttctgttgtgaccatttcctagggaaccccagttacagtatctttgttccttttcttttgggttggtcagtccttgtcagtctccagaaaaggatccgtcagtcttcttgctggtgggtgaaatctgtttgctagagctgtagaagcacagtagggaagagcgtttggtgacttgccttcgattccccattatgtgtgtggggtccctgtcctccttgtgcttgatttgccattgtccacagatgttctgttttgttcttttccagggaatgagccttcattttgctggagtagggggtagcaccgacctcaggcacctggctgtgggaaatcagttggggggctggggggttttgtcttaaagggctttatatcagaacttagctaataatcaccccttgtacatgtcctgtgtgctgccagttcctgagcctttggtgagttccacagggtgacacaggtttcttgttgacctttcctgttgttggtctaacattcagctttctcagggctgttgggacagtgactcctcacccacctctcttccagcttccaaaatttggtggcctttttctttcctgttctctttgtctttgtggatttataactgaaaaagtagctctagtgacatttcagtagaattcaggagggaaaaaagttcttatgttcaattcactatctttaccccaaatttccttaatctttatatctgagatattagtgaattaagtacatctgagggataaataaatgtttctcaaatgtttactaaattgaaaaaccttattgggagtttttatttactttttagtttccaaagtaaaaatatcaaatattatcttaaatttagggcctttttccccactaaggaagacaaaattatactatattgctgtttcatggagtcttaattttttttgagtaaaacattttattaaagcataaatatatactttttttttttttttttgagatagagtcttgctgtgtcgcccaggctggagtgcagtggcatgatctcagctcactgtaaccttcgcctcccggttcaagtgattctcctgcctcagcctcccgagtagctgggactacaggcgcgtgccaccacgcccagctaatttttttatatttttagtagagacggggtttcaccatgttggccaggatgatctcgatctcctgacctcatgatctgcctgccttggcctcccaaagtggtgggattacaggcatgaaccatcatgcttgaccaaaatgtattttttttttgagacagagtcttgctctgttgcccaggctgaatgcagtggcacgatctaggctcatggcaacctctgcctcccaggtacaagcagttatcctgcctcagcctcctaagtagctagaattataggtacctgccaccacgcccagctaattttttgtaattttagtagagatggggtttcaccatgttggtcaggctggtctcaaactcctgacctcaggtaatccacccgcctcggcctctcaaagtgctgggattacaggcatgagccactgtgccctgcccaaaatgtatatatgaaacacaaagagggaagcacacaaattctcagtcattcgtttgatgaactttcccaaaatgaacccatctatattaccagtgtccagacctagaaatagatctgctattcaccagctcagggtcagtcttttttttttttttttttttgagacagtcttgctctgtcgttcaagctggagtgcagtggtgctatctcggctcactgcatgcagcctctacctcctgggttcgagcggttcttgtgcctcagcctcccaggcagctgggactataggagtacaccaccatagctggttaatttttgtatttttaatagagacggggttttgccacgttgtccaggctggtctccaactcctggcctcaagtgatccacctgccttggcctccccaagtgctgagattacaggtgtgagcctctgtgcctggcctggatcagcctttttttatcgtctgatggtgctgtgcactcagccagcgagtgagtagatgtgaattcctctctctcggaagaaattccagttcacaattgatacacctttccatgatctccttatttttttctcttctttttaaaatcgagaagtaaaaattgcatatttttgtggtgtacaacatgtttcgaaatgtgtatacactgtggtattatcccctgtcttacttgccattgaatcccaacagcatcttgaagcaaatcttagccctgccttaggatgccaagatttgtacaggtagtgaagcccagaaacaataaaattttttttaaaacattctctcacagctccctaataattattaaaatttttcagtatttcaagggaactttaggattacaacctggagattcagccctcttcatcaatggacttcacatggatttagatacacaggatatattcaggtatggataatatttttcattctctgaaaagtttttgtaatgcgtagcaccttgtaacatgttcatattgccgttccttcttgatatggcatgatgcaaagtctgatggcttaccagcccccactgggtggacgtaggtagtaggcacatgccatgatgggtaggcaggatgacatatctccatcttgtgttacagtgtgtgttcaaggcctgagtgttttctgaggctgtccttttagaagctatacttttccacttaaccatgggaacatagaaaagaacaggttctttggcttttggaacagtgtgaagtagatttattaaaaataactgcctctgggcctggcacggtggctcatgcctgaaatcccagcactttgggaggctgaggccggcggatcacttgaggtcaggagttcaagaccagcctggccaacatggtgaaaccccatctctgctaaaaatacaaaaattagccatgcctagtagtgtgtatctgtagtaccaactacttggaaggctgaggcaggaggaccacttgaacctgggaggcggaggttgcagtgagctgagattgcacccctgcactccagcctgggcaacagagtgagaatccatctcaaaaaacaaaaaacaaaaaaaaannnnnnnnnnnnnnnnnnnnnnnnnnnnnnnnnnnnnnnnnnnnnnnnnnnnnnnnnnnnnnnnnnnnnnnnnnnnnnnnnnnnnnnnnnnnnnnnnnnnnnnnnnnnnnnnnnnnnnnnnnnnnnnnnnnnnnnnnnnnnnnnnnnnnnnnnnnnnnnnnnnnnnnnnnnnnnnnnnnnnnnnnnnnnnnnnnnnnnnnnnnnnnnnnnnnnnnnnnnnnnnnnnnnnnnnnnnnnnnnnnnnnnnnnnnnnnnnnnnnnnnnnnnnnnnnnnnnnnnnnnnnnnnnnnnnnnnnnnnnnnnnnnnnnnnnnnnnnnnnnnnnnnnnnnnnnnnnnnnnnnnnnnnnnnnnnnnnnnnnnnnnnnnnnnnnnnnnnnnnnnnnnnnnnnnnnnnnnnnnnnnnnnnnnnnnnnnnnnnnnnnnnnnnnnnnnnnnnnnnnnnnnnnnnnnnnnnnnnnnnnnnnnnnnnnnnnnnnnnnnnnnnnnnnnnnnnnnnnnnnnnnnnnnnnnnnnnnnnnnnnnnnnnnnnnnnnnnnnnnnnnnnnnnnnnnnnnnnnnnnnnnnnnnnnnnnnnnnnnnnnnnnnnnnnnnnnnnnnnnnnnnnnnnnnnnnnnnnnnnnnnnnnnnnnnnnnnnnnnnnnnnnnnnnnnnnnnnnnnnnnnnnnnnnnnnnnnnnnnnnnnnnnnnnnnnnnnnnnnnnnnnnnnnnnnnnnnnnnnnnnnnnnnnnnnnnnnnnnnnnnnnnnnnnnnnnnnnnnnnnnnnnnnnnnnnnnnnnnnnnnnnnnnnnnnnnnnnnnnnnnnnnnnnnnnnnnnnnnnnnnnnnnnnnnnnnnnnnnnnnnnnnnnnnnnnnnnnnnnnnnnnnnnnnnnnnnnnnnnnnnnnnnnnnnnnnnnnnnnnnnnnnnnnnnnnnnnnnnnnnnnnnnnnnnnnnnnnnnnnnnnnnnnnnnnnnnnnnnnnnnnnnnnnnnnnnnnnnnnnnnnnnnnnnnnnnnnnnnnnnnnnnnnnnnnnnnnnnnnnnnnnnnnnnnnnnnnnnnnnnnnnnnnnnnnnnnnnnnnnnnnnnnnnnnnnnnnnnnnnnnnnnnnnnnnnnnnnnnnnnnnnnnnnnnnnnnnnnnnnnnnnnnnnnnnnnnnnnnnnnnnnnnnnnnnnnnnnnnnnnnnnnnnnnnnnnnnnnnnnnnnnnnnnnnnnnnnnnnnnnnnnnnnnnnnnnnnnnnnnnnnnnnnnnnnnnnnnnnnnnnnnnnnnnnnnnnnnnnnnnnnnnnnnnnnnnnnnnnnnnnnnnnnnnnnnnnnnnnnnnnnnnnnnnnnnnnnnnnnnnnnnnnnnnnnnnnnnnnnnnnnnnnnnnnnnnnnnnnnnnnnnnnnnnnnnnnnnnnnnnnnnnnnnnnnnnnnnnnnnnnnnnnnnnnnnnnnnnnnnnnnnnnnnnnnnnnnnnnnnnnnnnnnnnnnnnnnnnnnnnnnnnnnnnnnnnnnnnnnnnnnnnnnnnnnnnnnnnnnnnnnnnnnnnnnnnnnnnnnnnnnnnnnnnnnnnnnnnnnnnnnnnnnnnnnnnnnnnnnnatttttttcacttgacatgcccctggtattcagctgagcatctcttgggaaaaagcgtttagtttgtattttctcaattgcatacagatcttgtgtgatgtcgtgacatctgtaaattaaaactactattgaaaatgtcactttttagctaagaaccttctttagtaggattttgatatttgagatttgaaggatttatatagacttttgcctgccatatgatctttctgagcctttgtcttgtcatctgtcagagaatgtggggaatagggctgggcttggtggctcgtgcctgtaatcccagcactttgggaggccaaggcgggtggatcacctaaggtcaggagattgagaccagcctggccaacatggtgaaaccccgtctgtactcaaaatacaaaaattagccgggtgtggtggcacacacctcctaatcttagctattcgggaggctgaggcaggagaattgcttcaacctgggggtggaggttacaggtagctgagatcacgccactgcgctccagtctgggtgacagagcaagactccgtcacaaaaaaaaaaaaaaaaatagagaatgtggggaatagtgccatcttgggcagttgtggtaaaaaataaggtgagtggagagctgatcttattttttcttggtttctgtactgcattcattttagaaaaattttatttaagagaaataatgtagaatgtagataatcattacttgaattcatacttggtgatataacttattttgatgaagacattgttaatgtcatttgcttttctgttaaaagtacttataaagagtaaaagataataacatcaacatgacatgtttatgcaaacataaagggactaacaaccataggacccatcatcatgcttactaaatgttaacatttaatcattttgtgtcagatttaactgttttcttgggggaagaaacagttttagttgaagcccttctttgtcccttaccaaccacccctctccttcctgaagttcatatcttttctcaagttggtgtgcattcccttgtcccttattttatccttttattttctatcaaatatatttttctttctttcttttgtttttttagagatgagtctcactatgttgcccaggctggactcaaattcctgcggtcaagcaatcctcttgcttcagcttcctgaatagctggaaccataggcatgcaccaccttacctgactcctatttaatattctaaaaatttgaggccaggcacagtggctcacgcctgtaatcccagcactttgggaggccgaggtgggtggatcatttgaggtgaggagttcgcgaccagcctgggcaacatggtgaaaccccatctctactaaaaatacaaaaattagctgggcgtggtggtacacacctgtaatcccagctccttgggaggctgaggcaggagaattgcttgaattcgggaggcagaggttgcagtgagccgagatcaagccactgtactccagcctgggcgacagagtgagactcttgtctcaaaaaaaaaaaaaaaaaaaaaaaattgggataatccagtcaggcgcggtggctcacgccagtaatcccagcactttgggaggccgtggtgggcggatcactttagctcaggagttggagacctgcctggccaacatggtgaaaccctgctggaatgcaggaatgcaatcatagctcaccacagccttaaactcctgtgtttgagaggtcctcctgcctcagcctcctgaacaattgctctttgtggacatgaagttgtttctgatgttttgctgttgtaaacactactttaattaggctcttttttcctctctttttgtgtatacatgtgaatttatttggggtagatatctggaactagagtattgtattgtgttgtgttgtgttgcattgtgttgcattgcgttgtgttgcattgcagtctcgctctcttgccaggctggaagtgcagtggtgtgatctcagctcactgcaacttccgcctcccaggttcaaacgattctcctgcctcagcctcccgagtagctgggactacaggcgcacaccaccatgcccagctaatttttgtatttttaatagagatggggctttcaccatgttggccaggatggtctcaatctcttgatctcatgatactgcccactttggcctcccaaagtgctgggattacaggcgtgagccaccacacccggcagtactgcatttattttagaaaaattagtactaatatagtcttcaactttattagatccagttctctaaagtgtttgtccacataccagcattgcatgagagttctctttgctctatatcttttcctattcttggtcttgacaaactttcactttttctgtctagcgagtatgaaatttcattgaggtcttagctcatagttcctagattacaattgagggtgtacacatttcttatgtttattgcccatttgggtttccgctgtttatttttcatattctttttttttttccgatttttttttacattttcttttttcctttgttcttaaaaagtttagggctgggtgctgtggctcacacctgtaatcccagcactttgggaggccgaggtgggcggatcacttgaggtcaggagttcaagaccagcctggccaacatggcgaaaccccacctctactaaaagtacaaaaattcactgggcgtgttggtgggtgcctgtaattccagctactcggggggctgaggcacgagaatcgtttgaacccaggaggcagaggtttcagtgagccgagattgctccactgcacttcagcctcgtcaatagagagacttcatctcaaaaacaaaaacaaacaaacaaaaaaaatttcgcttctttcttttatttttatgtcttcttcattcttgacgctagtcctttattgggtttgtaggttacaaatgtcttcatctattctgtggcttatcttttagtcactcatttttccactcgatctttttgtcttttttgtttgtttttttgagatagggtcttgctctgttgttcaggctggagtgcagtggcacaatcatggctcattgcagcctcgaaccccttgggctcaggtgatcatcccgcctcagcctcctggagtggctgggacagcagccaccatgcctggctaatttttatatttttttgcagagatgggggtctcataatattgcccaggctggtcttgaactcctgggcgcaagtgatcctcctgccttgtccttccaaagtgctaggattacagatgtgagccactccactgcagccaatctttttatctttgaaaatggtcttgtctcacatgattcttcttaaaatattttaaagtcttattgatattattgcaggttttactaactggttcctaatgtgcatgtatcctgttgtgttattttttgtagtgggtcaacaacctggaggttgatagcagatataattcgtggccttctagtttacaagagttgcttcgacccacctttcctggtgttattcggcagatcaggaaaaacttacataatatggtaagtaaaacttattgtctggctgtgaactctgtttctcccttggcctagtccctctttttttgtcatgtagaatggtcacttctcacctttactagctgcttcctcccccacccttcaccaaatactcttcccctgttcacactggaaaggctttgtagtgtactgaccacttgtggggctgtgggatgtaacaggagcattacagcccccctcagagtgtggggaaatgcttatttttaacacgaaggtttagactattgttttagtcttttaatttgtttttaattttaaaacatttttaattttttaatttttattttttctaatcagcttttccagattgaataagtttccttttcatactcttcacaccattcagtgatgtgtttgtttttattttaagactttatattttttagggcagttttagtttcatagcaatattgttttactagttttaagatagctctttttttacagtatattacagcatattgctactgtttttctttaatatcttaatccctaaaattcagcagtttaatttattcccttaaatatggttgtttgccaactcctacttgttattccttcttgcactgctttagagagagagagagagagggttcttcattggcccactttttccctctcatttctttcccttccctcacacagccgggaaagagatagtggtagggttagtgccaaggttggcctcctcagaacttgcagggaagattaccctctctacttttcttcttgtctgtctcttttcttcccccccactcccgcagaaagagtcttgctctgttgcccaggctggagtgcagtggcaggatctcggctcactgcaacctctgccccctggggttcaagtgattctcctgcctcacctcccagtagtgggaattacaggtgcatgccaccacacctggctgatttttgtatttttagtagagacggggtttcactacattggctgggctggtttcaaactcctgaactcaggtgatccacctgccttggcctcccaaagtgctgggattacaggtgtgagccaccatgcctggccacttttctgtctcttgaaaccacttctttcctttctagtcagaatttaaatctcattctgttttaccacatgtctgaactttattaagcgagagaatacgtctaagttgcttaacacgtaatacgtgtttatatgcttgcctgacagctgtggctgtggtctaagaattaggttctaagtgaattcttaattcagagatcctcagaaatgaatatacaaaaaggcaggctccattttttaaggtgagagagttgctaaacttggttttcatttggtgtagtagaaaaagcggcatcatcactttggagtacagttcccttgttatcagcgtaagtccatgagaaaatcacctagcccttcagtaccaggttttttgaacatagagggaggtagctgctatgtgtgtaattcatcttttatgtggttcaagcgtagctcgaaaaaggttggcttcatgtacagtgactcataacatttttctcggcccacagatacttgaataaatgtcatttcatgtgttcttttccctttcttcaacaggttttcatagttgatcctgcacatgagaccacagcagagttgatgaacacagctgagatgttccttagtaatcatataccactaaggtaacactggtattgatttgatgatgtatctaatttagctgaggttttatttgtcatttttaaatgcaagtctggtgctactgagttgtaggataattaatagtgcacatcactaatggcaattttatcttctggtcagtatgaagccagtgtcttttgggactgagaatttgcttctcaatgaatagaagcttaccaccaatgaattatcaataaatagcccatgtaaaaatagtttctggctgcagcttgcttcccaatggaagggaattttcctaggtgagtgtccacatcacaaaacctatttccactttcagcagagatatagagcattgccaataacttgttagcctgtcaaggactaaacatatacacagccttttgtagatgcaaacagtaacagttacttcacttgtgttgccaaacctgcctacagggtactgagtggctggatttccactgtctttttaagaacagttttttttattttttaaaggttttacatataaatgctaagatattttcacctacattctaaataattctggtaattttacatgttggtgaaattttaattcttagaaaatgtgaaaataaagaagaaaataactctttattcaataaatattactgtgtgttccatgattactactgggctaaatgctgtaaacatgtatgccttattctaccttcttggaaaagatcctctgtatactttcaaaccctttagggagatatatgatcaactgctaggttatgtcctactggttagttataagtgcgttaggatttcagggaaacaaaaaaaatcattgagatatttgggaagccaaaggtttttggagaagttggatttcaaataggctttgaggaaaacagagggttctgatagttggaaatgcagagattttgagtttcatgacatttttcatataaagcatgaatacatctggttagatggaagaacctattactggatcacaaccagagctatgttttgattaaaagagaaatataaggacacagaagaagttgggtcgtggtacacagttggcactaatacaatatttcttgaattgagggacgagaagagggcatgtggtcttctgattgcaaaggcaggtgagaagaaggcacttgaactcctaggcaactgagagattgtgaatagttggagagagccaggcatacaggctgctctttccttctttgtaggagctcatgtggtcctgcatgttggctgctaaatattgatacattattattaattaaactccatagtttacattaagatttgttatttgtgttgatgacacaaatgtatgatgtaaagtattcacattacaatacagtttaatacagattagtttcactgccctaaaaatctcctgtgcttcacttgtttatctcttcctcccttcccctaaatctttggcaactactgatctttttactgtcttcatagttttgcattttccagaacgttctaggttgcagtcatacggcgtgtgcctattcagattggtgtctttcactgagcaatgtgcatttaagcttcctctgtgtcttctagtggcttgatagctcatttcttcttatcactggataatagtcattatgtggatgtccccccatttatttatccattcacttaattgaaagataccttggttgcctacaagttttggcagttatgaataaacctgctataaacatctgggtgcaggtatttgtgtggacatgtctacagcttcttcgggtaaataccgaggagcgtgattgctgcatcgtgtgttaatagtatgcttagttttgtaagagtatgcttagttttgttctaaagtagcggtaccattttgcatttccaccagcaatgaatgagagatcctgttgctccacagccttgccagcatttggttttaccagtatttaggattttggtcattctgataggtgtgtggtggtatgtcattgttgtttaatttgccgttccctaatgacatatgatgttcaggatctacttatatttatcacctatctgtatatcttgtttggtgaagtgtctgttcagattttttgtccttttcttttttcttctttttttccccctgcccttttgtctccatttttaaaactttggttgttttcttattgttgagttttaagagttctttgtaagccaggtgcaatggctcacgcctataatcccaggactttgggaggccaaggtgggaggatcgcttgaggccaggatttgagatcaccatgggcaacatgagaagacctccatctctacagagaactaaaaaagagtagccaggcgtggtggcacacacctgtagtcccagctacttgggaggctgaagtggaggattgtttgagcccagaggtttgaggctgcaatgagctgattgtgccactgcactctggcctcggcaacagagcaaggccctgttgaaaaacaaacaagaagagttgcatattttgtttacctgtcctttatcagatggttgttttgcaaagattttctgccactctatggcttgtcctttcattctgttaatagtatctttcacagggcagacatttttaattttagtgaagtccaaattaaccaagtgttgtctttcatggattgtgcttttggatctaacatcattgccaagctcgagaccacctaaattttcttctctgctatcgtctgggaatttttgtttttgtgttttacatttagacctgtgatccactttgaatgaatttttgtgaaagatataaagtctggtctagactgattaatatgcatgtgcatgtccagttgttcagcaccatttattgaaaagatgattctttgtccattgaaatgcctttgccccagtatgttcagtgcaaagtcttttttgccagcccatctatagatacataatagtatctctgtggttaattcctttattttaaaatttaaaatctgataaactttaaccttggttattgctttttgtcgtgggacagttgtaaaccttttttggcttttcttttaccaataattctcatactgcatgtgctaaatgtcacaatccccccctttctgtttactttgaaagtgtgaaaatttttattctagtttttgtttaaaatcagaaaaaaaaaatctcttaaaactatagcaacgctcttcatgtcagtaaaggaatcttttcatgacgtggaaatggcttgctttaacagtagaaaggcctaagccacgtttgagagcctgcttttttattaatactttgtaagtggccgggcatggtggctcatgcctgtaatcccagcactttgggaggccgaggctgatggatcacctgaggtcaggagttcgacaccagcctggccaacatggtgaaaccccatctctactaaaaatacaaaaaattagccaggggtagtggcgtataatcgcagctacttgggaggctgaggcaggagaatcgcttgaacctgggagacggaggttgcagtgagccgagattgcaccattgcactccaccctgggcaacaagagtgaaactctgtctaaaaaaaaaaaaaacctttgtaagtggtgtatgtatacctttgccaatcatgttagagtagagtaggctgtgaactgtgcttttcactcaaagagttttcctctgttagctataatgtatgagaagggtacaaggatgtcattctttttaaccatttgcattctttgacatgtttctttttttcttttccctttccctccagaattggttttatctttgtggttaatgactctgaagatgttgatgggatgcaagatgctggagtggctgttcttagagcatataattatgttgcccaagaagtggatgattatcatgccttccagactctgacacatgtacgtttttgttcagaatggcaaataattttttcagatctaacttactcttaataacaatgtgtggtcattgtatgctaggcagctggggtgtatagagctcaggggtgggtcctgaatttaaaagtcatgtctgctgcagtgtatagagatggatctgaggaagggcaaagcaaagtggcagggatgccagttgatgagctgttgcagtgatctccatgagaagtaatggggaaggtagttaagcagggctgcggagaatgaaataggttcaaaagaagtcactcagaatagtaagtattttatactttgttattttattcactttatctctgctaaaggtttgcttttgtttgtttgtttgaatatatcttccacaacggctaccttaaaattttatttatttatgtactttttgagaccagatcttgttgtgttgctcaagctggtctcaaactcctaggcttaagggatcctcccatgtcagtcccaaatagctgggattacggccgtgcaccaccatgcccagagaatattttaactctgctttttaaagtttttatttatttatttattcatttattttttattgttataagtacacatgtttgatcgagggggccaaagaagatagagagatggtactgtacacagctggtataggcttggaggccgaatgtcacacagagacagacacagaaacagtccagcactcagcagggaaagctgggcagtattctgaggcttgtaacacttggttggcaggtgacagtcagcaggggatctggcctagggctgaaggggcgcaggcatcctggaggctcccagatctgagatcccgggtggcacctgctgtggcgcctgggttcagctcacatcattcagggacttgcaggcaaacttgggcagtacgaaggcagcactgtacacatctgagcagctgcacctgctccacctgctgccgtgtcacttgttgcatgggcttctggaagttggtgctcgggtttttgctgcagagcatgaaggcaatctggccactgggataggtggggacagtgcagtaggcgtgtgccaccatggagaagagtgactggcagaactaccgtgtctgcttgatgaggtccaggtgcagccactggtactcgccctggcagcagagaatgctgtcctcgttgagggccatcttcatgagtggtaataggattccttgaagaggctctcagcggatcccaggagtcagtgatcataatattgaaggcatcctggttctgcttcacgaaatcaaaatcgtcacccatatgcagggtcagcttagagctagagaagccaatggccatacccggcaggaatttcttagagacctgagtgccatccttttcagtctatcatcggaccacagactccacagaggggtgcttcaccaccttgtgcaggatgccgtctttgtccccgacgatcagcaccttttgtgggatggggtggttgctgaatggcaggttgattctcatctagtaggagaacttgtccctgtccatgcaggggatgatgccatccaacaccagcacactgctgtgggtcttactgtggaaaacaaggatatcctgggagcgtgagcgctggcagtggagcagctgctccatctgtagcaacaaggcttccctgggctcaggctgcagatctcatggaaccagccctcctaaatggcagcgtgaccattgaagccaggctccatgtctcttgggctctgcggcctgagactgcaggctgtgcagagccacagcacaacaggaccagctacacccaccacccactgtttattttattttattaaaaaattttttttagagacaggatctcactgttgcccaggctggattgcagcagcgcagtcagggtttactacagccttgaactcctggccctaagtgatcctcctgcctcagcttcctggaatagctgagactacaggcatgcatcaccatacccagctaattttgttgttgtttttaatttttggtagagatgatgtctcactatgtttcccaggctggtctcgaactcctgagcttaaacaatcttactgccttggcctcccaaagtgctgggattttacgtgtgagccactggggcttggctgctgttttttatttcagaagtgaagtaatactgctcactgtaaaaacacttgaggccaggcgcagtggctcacacctataattccagcactttgggaggccaagggagggagatcacctgaggtcaggagtttgagaccagcctggccaacatggtgaaaccccgtttctactaaaaatacaaaaattggccatgtgtggtggctcatgcctgtaattccagcactttgggtggccgaggtgggtggatcatttgaggtcaggaattcgagaccagcctggccaacatggggaaacctcatctctactaaaaatacaaaaattgggccgggcacggtggctcatgcctgcaatcctagtactttggggaggccgaggcaggtggatcacgagatcaggagatcaagagatcaagaccatcctggctttaacacagtgaaacctgtctctattaaaaattaaaaaaaattaaatgggcgtggtggcaggcgcctgtggtcccagctactcgggaggctgaggcaggagaatggcatgaacctggcaggcagagcttgcaatgagccaagatcgagccactgnnnnnnnnnnnnnnnnnnnnnnnnnnnnnnnnnnnnnnnnnnnnnnnnnnnnnnnnnnnnnnnnnnnnnnnnnnnnnnnnnnnnnnnnnnnnnnnnnnnnnnnnnnnnnnnnnnnnnnnnnnnnnnnnnnnnnnnnnnnnnnnnnnnnnnnnnnnnnnnnnnnnnnnnnnnnnnnnnnnnnnnnnnnnnnnnnnnnnnnnnnnnnnnnnnnnnnnnnnnnnnnnnnnnnnnnnnnnnnnnnnnnnnnnnnnnnnnnnnnnnnnnnnnnnnnnnnnnnnnnnnnnnnnnnnnnnnnnnnnnnnnnnnnnnnnnnnnnnnnnnnnnnnnnnnnnnnnnnnnnnnnnnnnnnnnnnnnnnnnnnnnnnnnnnnnnnnnnnnnnnnnnnnnnnnnnnnnnnnnnnnnnnnnnnnnnnnnnnnnnnnnnnnnnnnnnnnnnnnnnnnnnnnnnnnnnnnnnnnnnnnnnnnnnnnnnnnnnnnnnnnnnnnnnnnnnnnnnnnnnnnnnnnnnnnnnnnnnnnnnnnnnnnnnnnnnnnnnnnnnnnnnnnnnnnnnnnnnnnnnnnnnnnnnnnnnnnnnnnnnnnnnnnnnnnnnnnnnnnnnnnnnnnnnnnnnnnnnnnnnnnnnnnnnnnnnnnnnnnnnnnnnnnnnnnnnnnnnnnnnnnnnnnnnnnnnnnnnnnnnnnnnnnnnnnnnnnnnnnnnnnnnnnnnnnnnnnnnnnnnnnnnnnnnnnnnnnnnnnnnnnnnnnnnnnnnnnnnnnnnnnnnnnnnnnnnnnnnnnnnnnnnnnnnnnnnnnnnnnnnnnnnnnnnnnnnnnnnnnnnnnnnnnnnnnnnnnnnnnnnnnnnnnnnnnnnnnnnnnnnnnnnnnnnnnnnnnnnnnnnnnnnnnnnnnnnnnnnnnnnnnnnnnnnnnnnnnnnnnnnnnnnnnnnnnnnnnnnnnnnnnnnnnnnnnnnnnnnnnnnnnnnnnnnnnnnnnnnnnnnnnnnnnnnnnnnnnnnnnnnnnnnnnnnnnnnnnnnnnnnnnnnnnnnnnnnnnnnnnnnnnnnnnnnnnnnnnnnnnnnnnnnnnnnnnnnnnnnnnnnnnnnnnnnnnnnnnnnnnnnnnnnnnnnnnnnnnnnnnnnnnnnnnnnnnnnnnnnnnnnnnnnnnnnnnnnnnnnnnnnnnnnnnnnnnnnnnnnnnnnnnnnnnnnnnnnnnnnnnnnnnnnnnnnnnnnnnnnnnnnnnnnnnnnnnnnnnnnnnnnnnnnnnnnnnnnnnnnnnnnnnnnnnnnnnnnnnnnnnnnnnnnnnnnnnnnnnnnnnnnnnnnnnnnnnnnnnnnnnnnnnnnnnnnnnnnnnnnnnnnnnnnnnnnnnnnnnnnnnnnnnnnnnnnnnnnnnnnnnnnnnnnnnnnnnnnnnnnnnnnnnnnnnnnnnnnnnnnnnnnnnnnnnnnnnnnnnnnnnnnnnnnnnnnnnnnnnnnnnnnnnnnnnnnnnnnnnnnnnnnnnnnnnnnnnnnnnnnnnnnnnnnnnnnnnnnnnnnnnnnnnnnnnnnnnnnnnnnnnnnnnnnnnnnnnnnnnnnnnnnnnnnnnnnnnnnnnnnnnnnnnnnnnnnnnnnnnnnnnnnnnnnnnnnnnnnnnnnnnnnnnnnnnnnnnnnnnnnnnnnnnnnnnnnnnnnnnnnnnnnnnnnnnnnnnnnnnnnnnnnnnnnnnnnnnnnnnnnnnnnnnnnnnnnnnnnnnnnnnnnnnnnnnnnnnnnnnnnnnnnnnnnnnnnnnnnnnnnnnnnnnnnnnnnnnnnnnnnnnnnnnnnnnnnnnnnnnnnnnnnnnnnnnnnnnnnnnnnnnnnnnnnnnnnnnnnnnnnnnnnnnnnnnnnnnnnnnnnnnnnnnnnnnnnnnnnnnnnnnnnnnnnnnnnnnnnnnnnnnnnnnnnnnnnnnnnnnnnnnnnnnnnnnnnnnnnnnnnnnnnnnnnnnnnnnnnnnnnnnnnnnnnnnnnnnnnnnnnnnnnnnnnnnnnnnnnnnnnnnnnnnnnnnnnnnnnnnnnnnnnnnnnnnnnnnnnnnnnnnnnnnnnnnnnnnnnnnnnnnnnnnnnnnnnnnnnnnnnnnnnnnnnnnnnnnnnnnnnnnnnnnnnnnnnnnnnnnnnnnnnnnnnnnnnnnnnnnnnnnnnnnnnnnnnnnnnnnnnnnnnnnnnnnnnnnnnnnnnnnnnnnnnnnnnnnnnnnnnnnnnnnnnnnnnnnnnnnnnnnnnnnnnnnnnnnnnnnnnnnnnnnnnnnnnnnnnnnnnnnnnnnnnnnnnnnnnnnnnnnnnnnnnnnnnnnnnnnnnnnnnnnnnnnnnnnnnnnnnnnnnnnnnnnnnnnnnnnnnnnnnnnnnnnnnnnnnnnnnnnnnnnnnnnnnnnnnnnnnnnnnnnnnnnnnnnnnnnnnnnnnnnnnnnnnnnnnnnnnnnnnnnnnnnnnnnnnnnnnnnnnnnnnnnnnnnnnnnnnnnnnnnnnnnnnnnnnnnnnnnnnnnnnnnnnnnnnnnnnnnnnnnnnnnnnnnnnnnnnnnnnnnnnnnnnnnnnnnnnnnnnnnnnnnnnnnnnnnnnnnnnnnnnnnnnnnnnnnnnnnnnnnnnnnnnnnnnnnnnnnnnnnnnnnnnnnnnnnnnnnnnnnnnnnnnnnnnnnnnnnnnnnnnnnnnnnnnnnnnnnnnnnnnnnnnnnnnnnnnnnnnnnnnnnnnnnnnnnnnnnnnnnnnnnnnnnnnnnnnnnnnnnnnnnnnnnnnnnnnnnnnnnnnnnnnnnnnnnnnnnnnnnnnnnnnnnnnnnnnnnnnnnnnnnnnnnnnnnnnnnnnnnnnnnnnnnnnnnnnnnnnnnnnnnnnnnnnnnnnnnnnnnnnnnnnnnnnnnnnnnnnnnnnnnnnnnnnnnnnnnnnnnnnnnnnnnnnnnnnnnnnnnnnnnnnnnnnnnnnnnnnnnnnnnnnnnnnnnnnnnnnnnnnnnnnnnnnnnnnnnnnnnnnnnnnnnnnnnnnnnnnnnnnnnnnnnnnnnnnnnnnnnnnnnnatatctatgaaatagtcgagatgtcaaagaacagaattaacatggtaagagttttaggagtgtatatttaaaacatttaaactatgatgtagagaagtggcttgaaccaacctagaaggctttttaggctgtgccatgttttaggctgtcagtttctgtgctgttacctgttattgagcttgtctgattagaaagtaagcagtctgttaccgatgactcggattagttacccaatgggagttcttttctactggtgctatctaaaatggttataaataattaaattctgctattttcagaaaatggcaattacaaggtgtgcgatagacatttgtaaagttgcccactttacatcttgggtggtaatacagtttttactctgaaaagttaatctgagggacaagcacctatgttgacagtcaggaaaaatgtctgtcttaggtacatttgccgttttgttgccccagtattttctggccagtgaacctcttttgtcctggagaagggaaaagattggatgtattgtgtcttagagcaattgttgagcactgtttccccacaaaccttgttttgttttctgcaggtgtaatttctttgttagtgatatggacccttatttagaattgggtgcaaatatttacctcaggctttttgcatagagcgcttataatttatggtagcaaaacctgtgcacctcattttggcagcccatggtcacatgtagattttaaaatggaaattaattaaagatttagttacttggtcatagttggcaggtttcaggtgctcagtagttacatgaggttagtgactactgcattggacagcacagacaagcacagatagaatatttccatcattgcagaaagttctgttgtatagtgctgaccgtagaatatgtagttcagttttgacagcctgtgctacacacacacacaaacacacacacacacacacacacaaacacacgtacacacacacgcacttcataatttgcaagcttttgtggtcttgtaaaaacttgaactcagtaattcaatctcagatttacatagtaggatattaactttgatgtcatttttcatttttttaaaaagaaatatcttgagttattttttctttacaatatttctattgattgttgttagaacaggcatgtaagaaaaatatgctgtgttccatttgtctcacaaaaggcaaaaatatactgtttttgtggttacttgtgtttcaggaagcaagaggctactatgagcagactggagttggacctctgcccgttgtgctgttcaatggaatgccctttgaaagggaacagctagaccctgatgagttagaaaccatcacaatgcataaaatcctggagaccaccaccttcttccaaagagcggtgtacttggtgagtcacgtttcaaggctgattttttaaagagaacagttggcttatattttttgttgcctctatagtaggcagtaaaattcttagtatcactatttgggaggctgaggcgagaggatggtttgagggtaggaagtctgagaccaacctgggcaatatggcaagaccccatttctaaaaaagaaattaaaaaattagctaggcttggtggtgcacgcctgtagtcctagctactcaggaagcttaggtggaaggatcgcttgagcccaggagtttaaggttgcagtgagctgtgattaccccactgtaccccagcctgggtgatggagtgagaccctgtcccgttaaaaaaaacaaaacaaaacaaaaaactattttctgtaagtcacttgtaattggtttgcaaactcttggcaagtcctatgatgaaaatattcataaatcttctatatatggtaatttaaataactagtattattgatttcaggattaaatgtttattttaaaaattgcaggcagttctaagaaacatttattctatttgtagggaattttggctttggagagactcaatattatttttcatttatatataaatattaatatatatagttcttgagatataattcagacagtataaaagtcagccttttgaacggtacaattcagtagtttttattctctacacacagttatgtaactaccacctctaattttcagaacattatcatcacccccaaaagaaaccccacatccagtagcaattactcctctccattttgcccattttgtcctactcccagccaccctgccattggcaaacacaaacctactttctgcttaatagatttgcttgttctggacgttgtatacaaatcaaatttgcagagaacaggatgatattggacagatagcttgttgctcagaaccccaactctctaatcatgtggttggtctttctagtgttaccagcccccaacctgagtcattgcattagcacagactctcgggccccactgtgcatcaacccgtagtataaaccaccatgtgtgtcctaaggggctcaccatgaatgacaaagacactcctatcactggatttagagtttacatcccagaaactagggccagccaaattatttaccacacacagtccttttctcttccctcctctcattctggaaatatgcacatggtggtactctctcatgtcccacagatctctttatgttcctcagactggataatctcagtttatctatcttcaaattcacttattctttcttctgtcaactaaaatctgctattgagcctctctagtgaatgcttcatttcagttattataaatccagatttctatttggttctttttgataatttcctttggtttatagatattatttggtgagatgttggtcttaaactttactttggtagacatggtttcttttagttcttgaatatatttgaaatcatttatttaaattctttttctaattaagtccaatgtttggacttactcagaataatatgaacataatgtaagaatatacattacacattttacttatataatagtaagaatagtatgtcttggcctcttctcttcctgagtatacaccatacttttttctttctgcatgtctttttttttttgtttctgatacagggtctcgctctgtcacccgggttggagtacagtgacatgatcttagctcactgtggcctccaactcctggacttaaatgatcttcccaactcagcctctcgagtagctgggactataggtgcatgccaccatacatggctaatttttgtatctttttgtggagatgagatctttctatgttgcccaggcaggtctcaggtcgcgaactcctgggcccaagtgatctttccgccttggcctcccacagtgctgggattacaggcatgagccaccatttctgcatatttaataattttgtttttgacaactaggaatttgaaataatataatgtgacacttcttcaccgtaccagggtttatgttgttctttgttgttgttgtaactgttatttgtttagtgactttcctgaaccaattctttcttttattttctttcctttttttgagacagagtttcgctctattgcccaggctggagtgcagtggtgccatctcagctcactgcaacctccgcctcctgggttcaagtgattctcctgcctcagcctcccgagtagctgggattacaggagcacaccaccacacccaactaatttttatatttttagtagagatggggttttaccacatcggccaggctctaatttcagaacattggtctcgaactcctgtcctcaagtgatccactcacctcggccttccaaagtgctgtgactacaggcatgtgccaccatgctcggccctgaaccaattccttaacatctgtattctttttcatgtgtggcttctgaagtttcagcttgtttaacttactggtcagctgatgaacgaacagagatttcctttgatgcatgaattcaaaaagtctcccagttttccccaagggtctctgtgttgtgttggggcacactttccacactcaaccaggcagttggcaactctgccttagtcttccatttttgcttgcacagagccccaaggttagaggcaagggtttaagaccttctaagattttccctgggcattcacgtacccctgggcatggtgcttatggtctctcaaattccaagaagtttgtcagagcttttcaaagtcccttatggacatcccattccccagcctttttttttctttgttttttgaccagctttgtgttagcccatgtgttatctgccacctcaggcagctaagatgttaaacaattgcccagttgtgtttgacagatacccccagggaaaaggctgttggcactgagtgaggtctggttcagcccaaataaagagaacccctgagaattctctagtgtcctagttgttttattttggggccattgattttcaaggctttgtgcagctggggagatgtaaatagtagtggggcaaattaattgttacaaaggtcactttccttaccaaaactttttttgagacagggtctctctgtcacccaggctggagtgtagggattgtgatcatagctcactgcagccttgaacttctgggctcaagcagtcctcctgccacagccttccaagtagctgggaccataggtgtatgccaccacatgcagctaatttttgtatgttttgaagagttgggattttgccaggttgcccaggctgttctccaactcttgggctcaagcaatttgtctacctcggcctcccaaagtgctgggattataggcatgagccaccgtgcctggccagtattccattattaaaaataggnnnnnnnnnnnnnnnnnnnnattccattataaaaaataggccgggcgcgatggctcatgcctgtaatcccagcactttgggaggccgaggcgggcggataatgaggtcaggagattgagaccatcctggctaacacggtgaaaccctgtctctactaaaaacacacaaaaaaaattaggccgggcgcggtggctcacttgggaaaccgaggtgggcggatcatgaggtcaggagatcaagatcattctggctaacatggtgaaaccccatctctactaaaaatccaaaaaaaaaaaaaattagctggacatggtggcgggcgcctgtagtcccagctactcaggaggctgaggcaggagaatcgcttgaacctgggaggcagaggttccctctgggaaccaagtgcagccgagattgcgccactgcactccagccagggtgacagagcaagactccgtctcaagaaaaaaaaaaaataataataataattagctgggcgtggtggctcatgcctgtaatcccagctactcgggaggctgaggcaggagaatcgcttgaacgcaggaggccgaggttgcagtgagccaagatcgtgacattgcactccagcctgggcgacaagagtgaaactctgtctcaaaaaatatataagtaaaataaaataaacatttacttcattccctagtattggacattacttctacattttcactagttacagacagtgctacagtgaatattctaatatgtatatacctttgtacattgtcttgaaaaataccaagtactggaaaatttgaactaaatgcactacaaaaagatgtgttatcagccagttgtggtggctgacgcctgtaatacaacacttcgagaggctgaggctggaggattagttgagcccaggagattgagaccagcctggctaacataacgagacctcatctctacaaaataaaaaaaattagccaggcattgtggcatgcacctgtagtctgagctacttcgggagactaaggcaggagggttgcttgaggattgaggctgtagtgggctataatcatgccactgcactctagtctgagcaacagggcatgaccttgtttctttaaaaagaattaagagatatgctatgccagtggtatgaaattcaaaacagaaatgtaaatgaagagaaacttttagccatacacccctgtgctgtactactcatgatttcttcctcaagacaactaccgtgtgtgtgtgtgtgtctgtgtgtgcacgcatgtgtgcatgtgtgtgtatacaagggctggtcagaaggtgttacatttacaattatttattttttttaattaataacttttttttttttttttttttacaaatgtttattatatgtacaacaggcttcaggacaacacttcattccagctataggtggcaaaagatgctatggcagggaatacagatgtttaaatatgaatgaaatcaagggtcaccatctcctcaggcacaaggcacagcttacttgttgccagatttttttttcttttctgtttttgagatggagcctcgctttgtcacccaggctagagttcagtggtgtgatctcggtttactgcaacttctgcatcccagattcaggtgattcacctgcctcaggctcctgagtagctgagattacaggcgcccgccaccatgcccggctaatttttgtatttttagtagagacagggttttgccattttggctaggctggtcttgaactcctgacctcaggttatccacccgcctcagcctcccaaagtgctgggattataggcatgagccattgcacccggcccagatttcttaatttcacctgcagccaggggtcccttccccatagccttctattttagctcctatttttgtttcttctgctcctctttttgtttctgcttgaaagtcttaccttcctcgtccatctccttggcctgcttcttgggctgtttcagcagcaccttcacaggcagacatggcgcctgccacaccttccccaggccctgcaaccctacttttaaaatttttatagactttgccaaattcccctccttgaactcgatgggcttctaattggagtcaagtagatttataatattgaccaaagttgtatacatgggccaacatgtacagtgagccatctaatatctttgtcttttgatttgtatgattggttcatatgctccttattaaatagctacaaataatgtctaattggaattatttagacttgaatgtgtatatttgattcacatcttttatcttgaaaatgacttcaggtcgggcacggtgagagaggatctcttgagcccaggagtttgagactagcctgggcaatgtggtgaaaccccatctctacaaaaatacaaaaattagctgggtgtggtggcacatgcctgtagtcccagctatttgggaggttaaggtaggaagatcgcttgagccctggaggtcaaggctgcagtgagctgtggttttgattatactactacactccagcctgggtgaaagagcaagaccttgtctcaaaggaaaaaaaaagaaaatgactttaaagtatacttgtgtgttaaatattttaagtttgataaatctgcacatttgcacagttgttgacacatggctctgagatcaccttcaagaagtataactatttctgtaatattagctgtgcaaaagggaagaataaatgacaatgatttcctatcctctcattgtaattctgactctggagatgtaagtttatttggatggctgagattgaacaaagatgggagtggtttttattacaaagtatattaactgcttgagagaagaccttttcctattttttttttttccttgggacagagtctcactctgtagcccagtgcagtggcatgatcttggctcactgcaacctctgcctcccaggttcaagtgattctcctgcctcagcttcctgagaagctgggattaccggcacctgccaccatgcccggctacttttgtatttttagtaaagatggcatgttggccaggctggtcttgaactcataacctcaagtgatctgccttcctcagcctcccaaagtgctgggattacaggcatgagccaccattcctggcctgggtttgcatttcataatcactttgcattagctttgtgagtttgagtaagttatttaacctttctgtgccttagcttcctcatctttacaatgaatgtcaacaatatctgcctcacgttgttgatagaggtagagatgctgtaggtgatgtgcccaggtatactcggcagtgacagggaccaataacatagtaacttctgtcttaactattattagcacagaggaagccatttataaagttaataattttttggttcctaatgaattattattgctaaaatttgctttaccctcccccctcaacctcctttttttttcttgcagggtgaactgccccatgatcaagatgtggtagagtatatcatgaatcagccaaatgttgttccacgaatcaattctaggattttgacagctgaacgagactacctggatttaacagcgagtagtaaggagcatttcaggaacaaccttatgctttttttgacttgtgcttcagaatctttacatttttcagattttaatattctgattatcttctgcagtgttcagaagatagcccaagattgtgacaaaattttatgtgtaaactctttgcacctttagttcataatatgagattctaaattcacaagagtttcctcctaaagaagaaaacatcttctgggcaaaaccctgtgaactttgaaaaatatttagtgccatttaaatgccaactaaacagacaatagatgatgagaatggacctggattgttcgcttctctagtcataaagcagttctctttcttcatcctcattctagagtcagtcagccataatgtcaacaaatatctcagtgaattttactctgagaacttaggaaggcctttagcagcttcatcaagatatgatgtatatgccataaaactcaaccttttaaagtatacaattcaatggtttttttaatgaaaaaaaccccacaaagtttgtgcagtcatcaccactgtctaatgatacatcattatcatcaccccccaaaaattccccagaattccatgtacctattagtggtcactctctgttcctcccttcccctatcctctggcaacaactaatctactttctgtgtctatggatttgcctattctagacatttcatataattggaagccttttgtgcctggcttgtttaatttagcatattgttaaggcttatgcatgttgttgtgtatgtcagcatttcattcctttttatagtccactttatggatagtccacatatatctgttcctcagttggtggacagttggcagttttctgctagaataccttataagagccaaatatgttaagcccaggtgcaatttgttccttgtgccttcctcgagattctgaggcctcttcagcaaacacctggaaataagatggaactgtcatcactagcccatgaaatctcactggggaaggaaagatgtgtgtaatgaagtcataaccagctatttattgttatagttgagtataatgaacatatcaatctatttatggttgttaacgtaatgcactatctctaatagacttgaaactgaaagtttgttttaggtagaggaaaaatacatgtatatatacacacacacacacacacacacactcctatacataagcacacacacactgaggaaaaagtgtaaatataggcttatatttgagaaagaaactacccagaaagtgagctttttcttcacagccgggttttcctttcttccctgaagtttcagtagagcaaggtgagcgtgttgtggctcttcatcctaagtgtttattgttttcatcatttttatttaaatttgaagggttgtctctggaatacacatgaataaggaacataatagcggttttgtttttgaatttccttttccattgagtgttgcagcaatgagctatgaaacagtgctagtccacagtggcaaagtgccacctgtcagctgaacatagtgcagacatcaattaggaggctctggcatcctcttgacctggtggtggtggcattgtcactcaggtttctttggctttggctgtcctggaacctttttagtaggatactaatttttaccagcatggtaaaatttttaattttatactaatttttatcggcatggtgtgctctcccttcccccacgtgatatcatggaccgtgtgtgacttattttctacggttttcctggatagtattctatggatagtaggtgttcagtgtgcattgtcaagtgacagtgtagatggatgagcatgtgcacagatgaataaatgagtgggtaggcaggcaagctgtgtctgacagactgtgatgagaagactgacatttgtatagggtgcaataatgtttaagattggggagattgttagagacagagagtttacagtactaggctgtaagaaattactgggtagtttagagcaagagaatgacttgatgaaactggaattctaggaataataatttgagggaaaatgagtaatgaggattgccctttgacactaattggagaagggacatatgcaaaaagagtgaaaatgaccttttatttctgttaagggtttaaaaggtgatattttgttagacctgaaaaataaaaatcagttttcttacgtattttctcttttacccctgcttcctctgtaggaacaggaagagcttactccactggttggactagggaagggagaaatgagttaaggggatctctttgagattgtcctccagttgacaagtgacaggaatgggaataggatgaattcagccattaaactgacacatacttatatgatagctgtgtgagatatgtatgtttccatcaaccttgtgtctttgatgtgtgacttcagtagggataggggccatgttgtgaagttgttcagtaaacatggaacttaatatacttcactcacgcatttctataaatcttatattatgatcaagtcaggttatcagttgaatattaagaatagattgaactggaactaatatatacgtatttcattttttctcccagataacttctttgtggatgattatgctagatttactatcttggattcccaaggcaagactgctgctgtagccaatagtatgaactatctgacaaagaaaggtaatccatttgaggcttattatcttgcattcaacatttttttgaaagtatttgcatattcatcttaatgtgcaaattaagagagaaaagggaaagagacttcataatttttcttatttcttataaagctttgagtctagaacatatctatttaaagtttaattctttgtatatttgttgaaagtatatatttgtttaaaaattcagatgtcttcataaattttgtattacctgttttaccttttgactaaagtcaaaaggaaaaatatttcatagttcaaatggaaaaacatttgtgatgtaaaaatgggttaatgaattaaaaatgactgtacagggttaatattattttggggtttataagataaagttggttttagaaagccttgtataatctttgaagctgattttatgcagaggtatttatttaggctaagattgtgtaaaatgacgccctgtagtggcggacagattctgtcgccctcgggtcagtgcttcagaaaagcactggctgttattttaagtcagctatttttaccgcctttttaaatccccgctgtggtctctccccaagagaagttctggtttctcagctgtatgtaaagtacaagcaattactccatttggttctttaaagaaactgtttcttagggtactgggacagcgccatgacaccgacaggactaagcagcaggaagaaccatagaccgtgttagccattgtttagactttcaatttttacagtaggcattcattccagaaatgatactttttttctactcttttctctttacctttgttcaggaatgtcctccaaggaaatctatggtaacttaaaacttcagaatgttctatttcttaattttcttctttggtttcagtgaccattgtaatttagaatttatcaacacttaattgtactgtttccggaatctgtgggtaacaggaagctatatcaatgtagataattttttttttttttttttttgagacagagtctcattctgtcacccaggctggagtgcagtaccatgatctcggctcactgcaagctccgccttctgggttcaagtgatttcaagtgattctcctgcctcagccttccaagtagctgggattacaggcacccgccaccacgtccagctaacttttttgtatttttagtagggatggggttttaccattttggccaggctggttttgaactcctgacctcaagtgatccaccctcctgaacctcccaaagtgctaggattacaggcgtgagccactgcacccggccaatgtagataaattttgtataaacatttgtaaagaattagtttcagaaaattacaaattagtatgattaaaaatgacaatatgttacccacatgttcaaaggctgtttttcattttacatgctaacagatgcccagaccagtgcattaatcagtagaattaatcagtgcatgttcctagtctgtaactaaactctgtggaagattcccctgctttcctatagtaaaggtttacgactttttcttctatctttattaagcttgtcattttcttctttttgcatggttcttacaaattatttggtcaatttcattttcagaatgttgaaacacagaatgtgcttctctcctctgactcaattagctgtttttgtttttctacagatgattcttttattaggccagtaactttttggattgttggggattttgatagcccttctggacggcagttactgtatgatgccatcaaacatcaggcaagtatctatgacttcattttatatttttgtttgtggctgtagttgtcttcatgggcttcgctgtgcggctaggattgttcagtgggagttgggagtcctgctttcttaatgctcgagggaacggagaattgtatctctagagatctgccagctctcaagaaaagagatctaagactacagtatccaggctttgttgaacgggatagattcttatagagaaaaaaataaatagcgagatcctcatcatagacaagttttattgcatacctgttcatgttcttggagcagagttgctccaacaattgtgttgtgtactgtatcggggagatggggtccttaccacgacagaggtctggacatgggggcagtagcacacaggaatggtagtgtgtgtgtttagtagaagtagatccagatgcactgagggatacacacataggtgttctgaaaagatatgctgccattaatagttgggcttgagtgagtggcaatggcaggtggttgggaagcagctgattcttctggagagtgtcatcgttagaggatgagatgtcaaaattctttttcctgggctgtttcagtttgcatcttcatccatacctcacaaccctcctcatggtcccctttccaccctgtacctgggaaggtttactgaaataaagaaatatccaggtggtttcagttttactcatatgccgagttcctttattgttcaaggagtggaccaaatgctgtggtcaatttgaagttagaacagggcagttctagctaagggcgatagttatatgtgaaaggcactctaacacaaatgcgtaaatcttcaaatggtagtagggtaggagaatggggaaggagagttgcattttttaataactattttaattgaagtaaaatgtaggttcacaagaagtgctcaaatcataggacacacagtgtcacaaagagaacacactcttgtgaccaccactcaggtcaaaaaatagagaattctcaagttcctgaaagccctcccacacttgtgcccacccacacttgtgcccagacactacgcctcttccctcttctcatattagggaataggtttgcctatcttttagtttattaaaatggaatgttatgcaatttcatttgtgtttggtttctttacccaatcttttgtaagatttattcatgatgttacaagtaggggtatagagtcctttttcattctgtagtattatatcatatggctgtaccacaaagttttatttgtttaagctatttgaaggacagttgggtttttagcttggtgctattataagactgctgcaatgaatattctcgtatgtcttttggtacacccaaatataaatgtctgttgcttatgttattggtacaagcccttttttggctttgtgtgtcctgggtgtattcttccacttggattcttgtcttttcacccagggagagattgaattgtactaggaatgtgggaaggctgtatgaatgaagaagggtttgaggagagcactgaaaacacttctaaaacaagtgcgttagaagaatacaaaatgtgtggcataagaatataaactgtgttgggtaaagataggactctgagggtctgtaatttatgctatatttaccgggaaggtaagaaatgaagttggaaaggtgggctgggggccacttcatgtagggttttgaatgcttgatgatggcatttttaattttattttgaatgaggaggagaactatctgagactttttttttttttttttttttaatgagacggagtcttactctgtcatccaggctggagtgcagtggtgtgatcttggctcagtgcaacctccacctcccgagttcaagcgattctcctgccacagccttgcgagtagctggaattacaggcgcccaccaccatgcctggctaatcttttgtatttttagtagagacagagtttcactctgttggccaggctggtctcgaactcctgatctcgtggtccgcccgctttggctttccaaagtgctgggattacaggcatgagccactgcgcccggcctgagacttttaagagagatattatttgctacttattgaacatgactgatgttaatgctgctttttaagttcaaaaatatctacaatatgactcccgtttcccattttgtgaacagaaatccagtaacaatgttagaataagcatgatcaataatcctgccaaagagataagctatgagaacactcagatctccagagcaatctgggcagctctccaaactcagacttccaacgctgctaagaacttcatcaccaaaatggccaaggagggggctgcagaggccctggctgcaggagctgacattgcggagttctctgttggggtaaggctctgagcctctcatgaggctgccccattttgtctgccacggaagctcacccactgcagcttacgtgtccggttcatgatcacgatttgtcattttagtcctgagtctcagggaatttttttttttaatttggaagtttccctttattacttttaaccttgcctagctttcatgtggtgcatgatttgagtttttgtgtgttttaagtatggagccatttgttatgcacagtttttaagagagacaatatggcttatttatagagcaaaaaacggagatttgaaccacttataggttcaaggcttatatgttcttgatgtgtttccagaataagcctgtgtttattcatttatattttatgttacttatttttttgacacagttttgtagtttttaaattttttacagaatgatgagtatatactatttgacgtttgagttaggaaaacaggctgtcactggaaattagcaggatttaaaaatgcagagtaaaggaatgatgaatagtctgctagtcgaacaaatcacaggaaaagataaggaaatagcagttactctaagtagtagggagatggcggggagactggagaattgacacatcttaatgttaattatgaaaattagttattactttccagggaaagaaatttttatggtttattcactgtgtttatttgtttatatggtttgcttagtaacgactatttttccttaataatgattactttcctagggaatggatttcagtctttttaaagaggtctttgagtcttccaaaatggatttcattttgtctcatgccgtgtactgcagggatgttctgaagctgaagaagggacagagggcagtgatcagcaatggaagggtgaggatttgtcaagcttgacttcacattagatccgtgaacagtctttgcagcattctcctctgaagctagtaaactcttcagacagagccactcttttttcaaaggtgattggggcttatgaagtgccattgatgtttctgcctcctatttccaaggagctgtgctttttgacatagacaaatatccccatatggagccttcctgctgtcggtgagagtgtggtggctctcagaaagtcagtcagtatggactttgacacataaagtagcctttgttgtttttattcaggtagaattaatgaaaactactttacgattttattttactttgtccttgaggaattgataagtaaataactacaagtatttgctttgggcttcactttgtattatttcactgattttatctaaacatgtacctgtctcaggtctttaagatgttctggcgtatgaggtagcctgaggacgccagagggttccttaccagcttgctgagtgcaggcagccttccagagctaagcgcctgctcttctctccttcacagatcattgggccactggaggatagtgagctctttaatcaagacgatttccacctcctcgaaaatatcatcttaaaaacctcaggacagaaaataaaatctcatattcaacagcttcgggtagaagaagatgtgtaagttttgccataggaggaattacaggggttatataattggactttcctcattgatcagttagaattatatgttgttactcatactacatatcccaaggagttttatttccagtttaaaatctaataatactcttcaattccagttttaatgtatgcttctgttgaaacaagataatttattttgtagggtactatttaaggaactgaactagttctctctttttatttttataatttttggttgtggaaaatttcaaatatatgcagaagtaaagaggctagtttatttattacctggaatacttatgtaaagtgatacttttcatcattatctatttggttacccttcagttttattttgttcaggaaaggaaaggcagtttaaatgtttcttttatttaccagtgcagaatactgagttgtttcccttgtatcttcaaaggtgatgatgaattggttgttgtcggtttttaattttaattttcagtgttattataagctgatgtgttttagtgtgttattttcttaatggaagaaaataaattgtttggatggaccctggagtccattgttacatatatgtagtttctgcattaaatatcaaatgactatgtagttggaggatctatttctatgtttaattgtttgaggaaccacaatacctttcccacagtggctgtaccattttacattcccactggcaatgctcaagggtgccggtttctccacatcctcacaacacttgtaattttctggggggttttttgtttgtttgtttgctttttataatagccatcctcgtgggtatgaagtgctgtctccttgtggtttgattcacatttccctaatgattggtgatgttgagcatcttgtcatgtgcagattggccatttatatatctttgggaaaatgtctattcaagtcttttgcccatttttaattgcgttttttttttttgtcgttgagatgtagcagttctttatacattttggatgtcactttcttactagatacatgatttgtaaacattttctcctattctgtggagatgtgttctttgatgcatagttggaggatataaaattttaaagttctgcttgcgaggttgcaatgagctgagattgcgccactgcactccagcttgggtgacaaagtgagactgtgtctccaaaaaaaaaaagttctgctgggtttttttcttacatcatcatgctgcagagttcaagagcatgttttagagaagtgttgacttggatagctgtcaaagtcagctgttgccatgtcttgtatgacctgggaagaaatcttttctcattttggccaatactggggctacaaataaggaggatccatccctcttacctcagtggctcctgagtgatgccccttgtcccgacctgtgaaatgcttccctgatgtaggtcaggaggtactcgtgactcgaagcagccatgtcacaggcataggcttggtgtggcatgctgttggaccactgcagggagctccttggggtcttcttgggctatataactgccagactgtgcctagaagacttgccttttgccaatgagagatggctctcgatctttcctgggtgaatttagggaaatcaggtagtcatggggccaaaagactaatgctaaaactcttaggcttcccaaaattaccttgtctgcatcaggttttcattagcgccagagctgctccaccttggagtggcccccttccccgtgacagccacagctatcattcatgacccagtctgcatccccaaggctgccctgaagcttggctgtgtatactttgatcattgttcttcatcagccttcagggagtttcttgttggcctgctcactccagtccacgtaaccaagtgccccttgacatgttttgtagccgtgttgacacatcacaggaagagaatggcctgtattatatatatttggcatttatattgagaagttgaaccaaaatagttaattttatatatttgctgggttcataggaaatgtatgtaggcttaattacagttcaaatacattcacagtgctcttttaaaattcttattcaggatttagtctttggttcagcaaattggagtgttttttttttttttttttcaggtttagttcaagatctttttcagttagaaatcaattttaggctgggcgtggtggctcacacctgtaatcccagcacttgggaaggccgaggcgggcggatcatgaggtcaggagatcgagaccatcttggctaacacggtgaaaccccgtctctactaaaaatacaaaaaattagccgggcatggtggcgggcgcctgtgatcccagctactcaggaggctgaggcaggagaatggcgtgaacccgggaggcagagcttgcagtgagcgagatcgcgccactgcactccagcctgggcgatagagtgagactccgtctcaaaaaaaaaaaaattaattttagaagaggcagggacaataaaattctttttaaagtggtttacttcagtgttaattgtaatagtgaaattagaaacaacacagatgttcagtagttggcttaatatttagattattttgtatccataaatgtaacattatgcagtcataaatatattgaaataggctgggcacggtggctcacacctgtaatcccagcactttgggaggttgagatgggcagattgtgtgagcccaggagttcaagaccagcctggcctgtactaaaaccctgtctgtactaaaaatacataaaaattagctgggcctggtgctgcatgcctgtagtcccagccagtcgggaggctgaggtgggagaatcacctgagcctggaaggtcgaggatgctgagatcaagccctgggcaactagagtgagaccctgactcaaacaaacaaacaaacaaacaaaaatattgaaatatcactgtatttattaaccaaggaaaggatttttataatatgtttttaagtgaaaaagcaggctgccagtataatttgtttatatgtatttaaaagtatagaattatgagccaaaatatcagaccttgttacttgatattatgtgtaatttcaatttttggcttttatgtttattttccagtgaattattactctaatagtcataaaaagtaatagttttaaaaggacaagggagaatgtaaataatactgacagcctgtaatgggccagggcctcagctaggtgcattgcagagttgtgcagttttactagagtcatgcagcgtgggtgctgtctccatttcacatgtgggaaagtgagtaacttctccaaggttataccactaatcactctttctcatgcctatcagtacggactttataccttgttcaaaccatcttgttagaattcagtatttgggctgatgatatgtttggcaataattggaaaactttcagttaaaaagatgttaagatttctctaaccccttctttcagggcaagcgacttggtaatgaaggtggatgctcttctgtcagcgcaaccaaaaggagatccaagaatcgagtaccagttttttgaagacagacacaggtatagaattaatgttgaatttgtgcatattcttgaatattaaactcttatgtttgctttacctcagctccttcatttttccatataagatttatatataagttcttacaggaattgaacatttgtttggtgtgcagttttcacatgtatatatttgtgttcatatataaaattcatatgcaaatctcagttgtatgaaaactgacatttatttctaaatgaatctgaaataactctgagtgcacccttgtagtagaaaatagactgcatttaattaaacagagaagttgtacttttcttaaattcgagaataaacacaggcaggtcaagatagctcatgcttgtaattccagcactttgggaggccagtgtgggaggatcgcttgagcccagaagctcgagaccagcaaacaaagggagaccctgtctctacaaaaaaattttaaaacattagctgggtgtggtggcatgtgcatgttgtcccagctactctggaggtagaggctgcagtgagccatgatctcatcactgcacttccagcctgagcaacagactgagaccctgtctcacaaaaaaattaaacagagattggctgggcgtggtggctcatgcctgtaatcccagcactttgcgaggctgaggccagcggatcacctgaggtcaggagtttgagaccagcctggccaacatggtgaaaccccatctctacaaaaatacaaaaattagccagtcatggtggcagatgcctgtaataccagctactcaggagcctgagacaggagaatcgcttgaacccaggaggtagaggttgcagtgagcagagatcgtgccattgcactccagccttggagacagagcaagactccatctcaaaatcataataatagtaagataaacagattattaaagtacttgtctcattcatcttttattgaaaactttttttaaaaaaaaaaaacagggtttcattctgtcatctgggctagaatgcagtagcgtgatctcagctcactgcaccttccgccttctgggctcaagtgatcttcctacctcaacctcctgtgtggaagagaccacaggcgcttgccaccatgcctggctagtttttgtattttttatagagatggggtctcactgtgttgcccaggctggtctcaaactcctaggctcaagttattcatctgcctcagcctcccaaggtgcttggccgaaaacttttgttttaaataagcttagcatagtgagggagtttgcctttttgttcttcacttttttgttttgaaaagtttaaaacctagaaatagttgaaagactaatataatgagcacccaaatatccttcacttagattcaccagttgttggtgtgtcacatttgctttatctctgtcatctgcacacgtgcatgttgtgtgcgtgtgtctgcatgtgtgtgtttgtgtagtacttctagtaactgctttagtagtttatttatatgtttgcatacacacggtcatattttttcctgcaccatttggaaatacgttgcagacatcctgatgtaacatgtctgacgttttccgcatgtgtatcctgagtgctaggacttctccgcagtactgttagctgacctcagaaatgtaaccttgatacagtaatattaaaacacaatttctgttcacatgactccagtatctttgtaatgaccttctacaactgttttttgtatttgttttggtccagattacatattacagagttgtgtctctttggtctcctttaatctggaagagttctttgccattttttttcctagtcttttgtcttttatgatgacattttttaagagtccaggacagttgtcttatggaatgtctcacagtctgagttgcttcctcatgattagatttaattgtttctaggaaagagccctgcgcagtaatgtatatagcctttgctgtagctggcaagtatatacatatacactgattgtgcctcggaatccccagggaggctttaaatatagatgcctgtgtcctattcctctgtgtttctgagctgatcagtctggcatggattggactttggtttagtgggcctgtgttttttatgacccatccttgtggggatcaggtgtgcgtggtgagatcatttgatgattgtaggctggaatggaggccctctctgtttgcactggttgtgtgtcctaattttttatgtcagcagtgggtgaagattcttatggctcctggataatccttgttgaatttggccattagcacccagattgcacccattttctcaacattttgtgaactttcaggaagtaactcattagtcaccagcgggaggaaacctttcctaatcaacctgccatcttgtttacccttcttgcccaaggtagcgagtcctgagcaaagacctcttcccttttcagaaatcttcttctccatgggtctccatgttttgtataattaaaataccttaattataaattctattatgagacaaattataattcctattagagaagttcctcttattgggagttgtgtcagttaaatgaatgtttattacatttaactcagaagtttctcatttatgctagaaatagaaagatctgaaccatcagttatgtatattcttgccctcaaagtgtggtccatggaccagcagcaagacattgtctgggagcctgttggaaatgcaggctttggacccaccccagtcctgaggaatcagcacctgcattttaacaagttgctcctgggggattcccgtgtgcattcatgctactaagcacagtattcgttgacatttactctacgaaccataggcaaatgtgtataatctccaaatcttgttcctgtctctgtcacttttagttttattctggtcttttctctgcacaatatagtgaatacatttaaacatgatgttgttcatattgttcccatttccacacaaatactcctctttccttgttttttttcgagtccctttttcttgttctagagatgtggggtaagtaaaggacctcacaaggtcaatttgtggtgtgcctgttgctgatcacctagaacactgctggctcagaatgtgaacatgttgtgtgaatctctaccccaaacctggtgtgggcaggcatgaccagatgttacactcttgtgtagagtcctttttgagactctctctctggttcccttgtgagcctttgtataatgctattttctaatgagtttttccttctagaattctagaatagcagagaggtgcaaattatattagggcagtggctctcaaaatttggcttttacttagagtttgttaaaatgcagattgctggacccgtccccagagtttctgattcagtaagtctgggttggatcctgacttgcttctcacaaatgcccaggggaagctgatgccactgctctggagtcacactttgagaacagttgtattagagtaacagaagttttgttgtgttagaagaataatgattggcagtggacttaatctgaaattgttaataatgccagagatcgaaagcacctacctcaacacagatacaaagctattctcatggttatttccaaagcagtgaagatgtgaagtaacctccatgagcatgtaaattgtttccagttttcttcgttatgctgttttgtggtattcttttgtattcatcccacttaggtaaatgttgtttggtaaaaaaaaagtaaaagtagtggttagtattgtaaccacattatagtattgttcagagcaaacaaagtataatggtttaaacagttaatggttttcaaaaattgggtataattttaaatcctttcaagttgagtccttttaaaagttcattagaggttcctgctccttttaagtcaccagtctgtgtgacttcacagggagtccatgcaacaggaagttaccattcagttaagaacagacaagggggctgggcatgatggctcatgcctgtaatcccagtgctttgggaggccaaggcaggcagatcacttgaggccaggagttcaagaccagcctggccaacatggcaaaacaccgtctctactaacaatacacaaattagctgggcatggtggcatgtgcctgtaatcccagctactttggtggctggggcgcgaggattgcttgagccggggaggtggaggttgcagtgaaccgagatcacgccactatactcccagcctgggtgaatgagcgagactctgtctttaaaaaaaaaaaaaaaaaaaaaaaaaaaaaaaaaaaaaaaaaaagacaaggaccaggtgtggtggcttatgccattgctttgagaagccaaggcaggaggatcacttgaggccaggagtttgagactagtctggtcaatatggtgagacccgtatctctacaaaaaaatataaattagcccggcatggtggcatgtgtctgtagtcctagctacttaggaggctaagttgagaggatcatttcaacccagaagttagaggcttcagtgaaccatgatcacgccactgcactccagcctgggccacagagtgagaccttgtctctaaaaaagtaaataaggaaaagaacaggcaaaatatctatctataacttaatgctgacgaaggatgtggtgaaatttattttttggccttgtaaatttgtttagttcttcaggaaatgtggttgacaatacttattagccgcaaagtatttgtatcctttgtctccataatctcatgtctagcacttccttgactctaaagaaatttccaaatgtggagaaagttggttgtacaaattgtttacaggttgaaagccatctctatgtccagcagtaaagaaaagctggagtaaactctgacagcttcatttggtgaatagcatattatttcttatagaggatgcttgttgtgtaacagcatgtggaaatctttatgctacagtagtgagagacggaaggaaattgttttgaaattgctaatctgtatctacaactaatgtttatacaggcatctagaaaggattacgtagagatgcagctaagtgggctgggatagtgaatattttgtgattatatttttcctttttctttgttttgcaggttttctggaatgttctttcattattttttaaaaattgatttattccttttctttttgtactcttcttgccaagaagtaaaaactggcataatgttatcagaagctaacttcagtagcttttctcagtttttggttaaatacagtttcaagctgcttttcctctctttacatggacctttcagtccatttcagatccattattaaggttttgcaatctttgggatagacagaatcatatagttggccactgtcatagtctagtctttctagatctaaagttctttgaaatgctaagaaggttgaaggttatattgtacaaaaaaaacttttgtttcctgtgtcctccaggttaatgttttatccttgtgatctttcagtgcaatcaaactgaggccgaaggaaggggagacatactttgatgttgtggctgtcgttgaccctgtcaccagagaagcacagagacttgctcctttgctcttggtaggaacgctgtgcaggaagtgtacatcacctttgtttgaagttgtcacatgctctgaaattcactgagagcttcgttttccttgagttgccttcaacaggcactggacaatgctatggggttctagggcagagcaatctttacaaagattgacagtggctgtgaaacagcctcacagccctagaaagttggtgcaagtgtggttggctgcctcatgtaatttaaaaaagtgattaacatcctcatttagagtaaaacatcctggaattaaggtatgctatattttaatttataatatcagagataaaataaatatgttttttcatttttccttttttataactaccatggattttttgtcttggcatgtcttttagacatgtacagtgtgttacaattttaggacatttaaaagacctttgacaaagacagtcgctccaacattcattgccgaataaatctctaaccttttttgtgagtattggtatctctgttttttcatcctttggcatgtgagcggtgactctgaggcctgtagtttttccatgatctgcctgctgcttccccacaggaactgccttcgtgtgaggagcagtgagctgcagcagcctacttcccattgcttttggccacgtcctatgtatgtgtgatgtagattgtgcagtagagttgtgatttccagaagtttcgccagtgcagactctgtggctgttatctttatatcttttcttgagatattaatagctcagtgtcaaataataaatttctgaagaaaaaaatcctaaatattttgtcatctggttttccttctaggttttggctcagctgataaacatgaatctgagagtatttatgaactgccaatccaaactttctgacatgcctttaaaaaggtaaaacatgctatgtaagaaaacagttgaagaaattgtactgaatccaagttctgatattgcatgttagaggatcagatggatttataggtggacatcatgtttgaaatggtcatttactaaatgttcagttttgccaaatttcattctaatcagaagttctaagaacatagtgtgtttgtagcatttaggtggcattaacccaggctgcttgcatttgtgccttttctttctttttttcgagatggagtctcgctctgtcgcccagattggagtgcagtggcatgatcttggctcactgcagcctctgcctcccgggttcaagggattctcctgcttcagcctccttagtagctgggattacaggtgcacactaccatgcccagctaatttttgtatttttagtagagacggggtttcaccatgttgaccagcctggtctcgaactcctgacctcaagtgatccgtctgcctcacttcccaaagtgctgggtttacaggtgtgagctaccacgcctggccccatttgtgcttttcatcttaaaagaagaatattcatttcaagttggaatatacatgttagaggaagcttgcttagctatatattgtcatgagctttggaatggtcatttatgaaaaaagtgatacagaaagcagttagcgttgtggctatgggaaatttctaacttgccagtgtgctgtgttttataggttagcttctaagtggattgaaacagcatttgaaagtaaccaaagggttcccagcttccaccattattctcgtataggggaaatgtttacattattagtgttttcaggactagcctgagagcccaatcagtatttaggaattggttttaaagagaaaaatgagtcctccttgaagggaggaaaatgcccaggacctaactgtgaccctgacagccatccatgtgaacgagtggcctccgttcaagtgattggattttggcttgcaggtggacagtatagtggctgctgagtatgagctagagtacctgttactagaaggtcattgctacgacatcaccacaggccaccactgagcactcctcctcagtgctgtccttgtttgccttttcttgcatctgcagcaaccacaaggaggcatcataaggtcaaagatggttttggaaacacttttcccaatctggaagggtactcctccaaatctaatttgttttaaccagttgttacctgtgtaagggctgtgcactcaagtcctgttgtcacatcgaaaattatctaacactttccttttcaatttcagcttttaccgttatgtcttagaaccagagatttctttcacttcagacaatagttttgctaagggtccaatcgcaaaatttttggatatgcctcagtctccactgttcactctgaatttgaacacacctgagagctggatggtagaatctgtcagaacaccatatgatcttgataatatttatttagaagaggtaagaccatatctattgcttccaaatacctaatcatgtataatacagcagattgaatcatagtctaggtgggcctctgagacatcagtgttcaggtatgatatttttttaaacaacagctttattcacatggaactcatataccataaaattctccccattaacgtgtacagttgagaggttttagtatcttcacggagttgtgcagccatcaccactatgtaattgtaggatgttttcagcatccccagtgaaagccccatactcattagcagtcactcttcatttccccagcccctggcaactgctggtctactttgtatctctatggatttgcctattctgacattttgtctaaatagaatcaaatgtggtcttctgtaactggcttctttcacataacaaattgttttcaagatccatccatgctgtagtatgtatcgacgcttcactctttttaacttgccagataatattttatttatggacatatcacgtttcatttatcctttcacgaatggacatttgagttgttttcactttttggttgttatgaataatgctgctatgaatgttgtgtgcaagtttttctactgatacgtgagtacaggatgtctttgcatttaggtctttaatttttttcaacatttagtatcttatcctcgttcgtatttttagaataacgtccttattgtttttttctcctttctctttccaacctagtttttataattgtatacagtcattaaccaccactatagccacgatgcagaacatttccattaccccaaaaagttcttttatacccctttgcagacagtagcctcctctcgcctggtttcaggcaacaactgatctgctttctgtcattatacttttgtcttttcttgaatttcttaaaatatgatcatatattatgtaagtcctttttgtctgcttcctttactttgcataatgcatttcagatttattcatgttgtctctgagtgcattcaagtgattggattttggcttgcaggtggacagtgtagtggctgctgagtatgagctggaatacctgttactggaaggtcattgctacgacatcaccacaggccagcctccacggggactacagtttaccttaggaacttcagccaacccggtcattgtggacaccattgttatggccaatctggtaaataatctgttcatcagatagtgatattgtagttacgttaatttgggcactataatttatgatggagcaattagcattcttaaccatagagtgagattaaaattcattatgggctgaatttggtcaatatagaaatcattagttcagctaaatttgtaggttagaattacatgtcaaaagaaaaaacatgctggaatactcagctataactgaattggccccctgaaaatagattgctcatgagctgacagcctttttcttttctttggaagtgcaacacttattcatgcatcacacgttgattcttccctgaagcacagctaaagagcagatgatttattggtgtgactggcctttattgtactagtttttttttttttttttttgagactcctgcccaggctggagtgcagtggtgtgatctcagctcactgcaacctccgcctcccaggttcaagcaattctcctgccccagcctcctgagtagctgggattacgggcacccaccaccatgcccggctaatttttgtccttttttagtagagatggggtttcaccatgttagccaggctggtctcgaactcctcacctcagttgatccacctgccgtggtctcccgaagtgctgggattacaggcgtgagccaccgcacctggtctgtgctagagtttttaatgtgtagttttggttttttaagagttgcattgatttgtttactgtgttattcacattatagttgattgatatttcagaaatagaagtaactgttcctcagaaataacattttggtgttttgaagagagctaactggacttttcttcttgtcctagggctactttcagctgaaagccaacccaggagcttggatcctcagacttaggaagggacgctctgaagatatttatagaatttacaggtaggagtaagtgatgcagttacattatcccagaacttttagaaatgagcattagctctaattgaatactaccctggcagttagccaggcaacatgaatttaatttgcagttgtatgtgatgaaacagtggtttttccaggaaattaaatatggaagaattgttagaatagaattagataataagaggtatagatgctaatgagtatagtcaggctttattctttaattattcctttgtgctaacaatatcccagaatcaaatcattctatcagtgtgatgcggctcatagataggcagatgagaaacttgaagaaaggagaaaagaaagaaagaacagccacacttttctgcccagagagtgtatgtgttgaccctgagtgatttgcaaatgcacagtacatggaagctttggtcttgaagctgtgctgttagtgctggtattccttggtctgtggtggcatagtaagaacattccctctatagccagcttttaccttaaggtttactgcacatatttattagtttaaaaataattatgttgcctttaaaaaagtttgatataaattctgcttaacacaatttaaattagttttaaactgtgtgaagaggcttcccgtcaggttgtgtaggggatgatttccattagggcacatttgaagcactctgtagtatgtccttgccttaattagctccgtagcgacacacatgaaacagtggattagtgcctggttcttacccaggaaatagaagaattctgtattataataacaccattgtaaacagtagaagctttttttccacataacattttcctcagataaggttttacaaaatttgggatgcacttccgaactccttcccttttggatgccctggcccttgccagccctccccttcccaggagcatggtgccccctcttcctagctgttcagggccccacccccattagaatcttcctttgcctgagaaccctactctctgctagatgacagcaaatgcagtgaattcatgttgtaattatgactttctgcaccttgaaatttggtgactggaaattttaggcattgctgttgattagtagggaaacatacatttaatttttcttcctctgctcctgtctgcctgcaaatagaatttgttacagtttttctggtagcgtatagacaccaggttgagtacagggcctattgttgactgattgttgcctccggcagaaagagcgagcagatttcctttacaacactattccagttaaagagtagtggccgggagtgatgggtgatggctcacgcctgtaatcccaacactttgggaggccgaggagggtggatcacttaaggtcaggagtttgagaccagcctagccactatggtgaaaccctgtctctactaaaatacaaaaattagccaggcgtggtggtgggtgcctgtaaactcagctacctgaaggctgaagcaggagaatcacttgaaccccggaggtggaggttgcattgagccgagattgctctactgcactccagggcaacagagcaaaactctgtctcaaaaaaaaaaaaaaaaaaaaaaaagagcggaggcagtgtggttccaataatggttcagggggcctgttccctgcattcctttatcgaaggctctgtgcttggctcagagcttgtgaacacaggcggttgtttagtactcaccatgtggttaccacacatgggtgcctctcactacgtgatgggtaatttgcaagaggactcacaaaggaggtttgggcatgcaccttatataaagagaggtttcaacacgtgcttctgtgcagctcgaaggagcttaaggagcaagaagatagctggatctggaaaactcctttatgagaaggatgatggactcagatgctctgagagcatttgctgccttttgagaattgtgccttgtaatattgatctttcttttctcgcaaagccacgatggcactgattctccccctgatgctgatgaggtggttatcgtcctcaacaacttcaaaagcaaaattattaaagtgaaggtgagtttggtaaaagtagtggcattctgttattggacagctgtcatttaaaaatatgtatcttggaaccagcccaagagtctctttggaatttgctatggcaattatagggatactgctttaaggcaaaatgtctttgtaactgtgagtttgtggcttccctcaactgaaagattgtaccttttgggtaatctcggtgtgcagaacatgtcccatcttatataaaatattctcatagatgctatgttgtttatatagccacaattcatagtgttgttgatgattcttttctcaatattgggggaactggcaatggaaattttcaacaataataaaatgatagtcctatttaatttcttttgacttgtactttccgttctctgaatgttgaagctcttagtgccttaaattcaagtacagtatattcttgaagaaagaatcattacacacagtgaaacctaaaataggccatccattgttgagaagaaaaatggtcactgtactgccaagaagaaacccctgtttgtgctagtgaatcctgaaaactggtcataacatgaaatacctccctcccaacagctagagcccccagcagccacactcttccctggaactagctgttgactcattgaatcgtgcttctggtttcactgcacagttgagtttgcggctctttgcctatgttgcaagctgaaaatggggttcatctaattaaaagaggttgctgtctcctcacataaggttatgatgtgaatgtcctggcgaagatacttctattgaatccttctagactctgggtggggttgtgcctgtttgtgagagaattgattgataattccctattgatgacaggctcacagtgtatatccagtgagaggcagttttatgcctgtgagacatactgggagtaaggtttatcacatttgattgcaggttcagaagaaggcagatatggtgaacgaagacttgctgagtgatggaacgagtgagaatgaatctggattttgggattccttcaaatggtaagttgacattgtaagagttatgtttttaaggaaaaactgagatataagcaccatccatccctcctttttgcatcttgtgattctgtctgggcctttcacattctactttgtgcagctacatctcacacttatatttggcatagatgagtattttccactcgattgatccaaaagaggttcatgtctcctagtggggaagttacttctgctccatactttgtgactctcattgcctgtacctgctctttggaaatttgactgctccctgctcagtttacttcccgttgtgtaagttgcattctggtgcagcctgtgttcagtctcttcctaaaacaacactgtcggagagtgaacattctttttgtaggttggttttgtcagtcttgtggtctctccagggtgtgagggaagcttcataaccactcctgctgcagctcacccgctagggaaggatgggaagcgcagtctctttcctcttactttcaaaggccgtgtgtctgtatgagtgtttcaagtggtcttttttttacccttattgttataggggctttacaggacagaagactgaggaagtgaagcaagataaagatgacataattaatattttctccgttgcatctggtcatctctacgaaagatttcttcggtcagtcttgttgattatttcattatatatgatgaatgaattggtcagtgttcttatttagagaggaaaggttttgtgggattctgctcattatactcctgtgtctttgaagcactctgagcattgtgactggcttgccatttatcattggatttgttttgatcccgccgtctctgtgaagttgaactatgtagtgagtgcttctggatattacaaggctgcagccctttaacgtcactgtacacattcatagactgtactgtttactgcctgccaaacattgcttaacccagagattaggaggttgacatagagaatagaatcagaacagaaccatggaatacttcactgccttgtaaagattcacaggattttagagccaggagagagcttagttcttacatgtgaacacttctgttttataaacaggctgaggccccgagtgtgaagggacttgtctaaggtcacacagctacagccagaagaggccacgggctagggctgcctgatgtagtggtcaccagaggcactgtcaggaaggcctgagagtcacttttctcattgccagggctctgttcactcttaatttttcactacagatctagtatagaaaatcaaaatgtcatttgtctcatttttagccctcttatttccaagaaataatatcctacctaaaatagtgacaataataacaaccgaatttggttaaattcctccattcaaaaatgtggttttgttttctgagtaaggaggccggagctggtagccttcctctctaaagcagggcctctgtgtaggctgcaggaggcgctgtggttacacattcttcccttagcaccagatgctgatgtcatgtgacaggagttttggggagtgatgtcagttaccccgatttccagggttcatctggaccataactaatatatcagttcatgaagcagtttatttagaggtgtaacagaattaaaacatttgcctctgtcagttaagtgtagttttataggtgaggaatgccccttctctttagtgataacttcataagttggagtaagtacaatttttcattttccatcactgagcgtctccctcggcctaattgagccattagttagctctgccgtaaagagcatttaggtgtctcgtgattgactctacataatgttgaggttaaataacattggaaagctgttattaattacctgcttttgtttggcagcataatgatgctatccgtgctgaagaataccaagactcctgtgaaattctggttcttgaagaattacttgtcccccacatttaaggtttgtttcacagagaaagggaaaacattcttattaaggagatatttactgtatatttttcatgacttttgttttatctgtatactttagcaaattttccatttactaagataccctaatttggttgcatatttttattttgattattcttccagattggtctatttgaaggaaacagttaaattgtgtttaaaaacttggatgatatggtaggagagtcttttgttgttgttattattagcagtgtcttactgagataacgtttccttcctctgaagcctgcatgcttgctttaatttagaaagcacagcgatggtttacattgaagagaatgattggtgttagcatgaaccactcctagatgatgtatggaagtagtgcttcctctgtgcaaaacaaaacacgtacttggaatgttttctgcattacttatatcagtcagtatttgtcatctaagttgatttatttgcatcctttttttttcttgtagaatttactaagtgacttttaatatattcaataaccattctccttgataagcactttactgctggcgcctaaaggtgcttatacttagaatctgaaagacttattcaaaaaggacaacacatttgtccagagttctggctttgcagtgttattccctgggttagatctggcctcgaggaaggcttgtcatcaagctcagtaaatgccttactgaaatcaagtttagacaaatggacttaaagttcatgtgctgtaaaaacacacacagagggatatacatctaaaatccttctcttgaacattctgtcatttcatgtggtgaccagaagtcataaagaaatggggatttgacaaaggtttatatctgttcttctatgtagtcatgagtgggtcacggccggtctttgtaagaccactgttttggtaaatgtgttttatttgtcccgtatcatggtggttggcttacattatgaaagcagttttcttaatcagaagaaatgattatttgttgttcccatgtctaaaaataggagtttataccttacatggcaaatgaatacaatttccagtatgagcttgttcagtacaaatggccccggtggcttcatcaacaaactgaaaaacagcgtatcatctggggttacaagatcctcttcctggatgtacttttcccactagttgttgacaagttcctgtttgtggatgctgatcaggtaggcccttaaaggccaagttttgacagtttgtattaaaagcaacaaattgcttctttttaaatgctattttttccacttatggaaaaggacatgcttattttacatttagaaaatatgaaaatatgtatcacatagatgtcatcactttttaaatttgcatttagcttatctcctttacatctttttctctgtctttttaacatcattgtgatgacataatgtgtgcagttttgtatctgacttaattcatttaacatgaaaactaaaaattagaaaattaacatttagcagtgcttgccatcatctctaattatctgcccaaaagataggagttattgtcatgggtaatagacgaagcttaagtggatacatggctttggcagtagggaacctccggatattcttccggccgtcagggtttgacttagtgaaagggaacatgtgattttagagcatacaaactcaaacagcataagtgtacgtctgcccacagccttccacttcagcccgagcgggcggaaacccaagtcagccacctgagtggaaggatgtaatgtgtgtgaaagtcactgggacagagacttcactcacctctttggaattctcttccactggcttagcctgaagtgtgccttcctgattgtaacatagccacatttaatccttgttgagtacttacgatgggcaaggcattattctacatctgtccatccatatgttaacttacataatcctcccagcaaccctgtgagataggtactgtcattatcattatctccattttacagatgaagaaactgaggcacagaaaggctaagcagttgaaatttgttttattcctactcccacacaccttgctaagaagtgtcttacatgttagtgagtcaaccaggtaataagtggagcaatcaaagtgcatctgcccctagtgcctgtgccactaaccacggagcagccttccatgctgccttaagcgagccactctgtatctgaaggaaaccgcattagagctgtctgcatggttgcttaacaaatgactttttatattctccagattgtacgaacagatctgaaagagttaagagatttcaatttggatggtgctccttatggttacactcctttctgtgacagccgaagagaaatggacggctacaggttctggaagtcagggtactgggccagtcatttagccgggcgaaagtatcatatcaggtactgaaaagaagcactcctaacactgttacggggttttccttaaaattgattttgtgtggttaaaattgtgaataggtaatacattggtatggttgaaaaataaaaatgataaaaaatacacagtggctgggtgcagtggctcatgccttaatcccagcactttgggatgccaaggcaggtggatcacctgaggtcaggatttcaagaccagcctggccaacatggcgaaaccccgtctctactaaaaatacaaaaattagctgggcatggtggtgggcgcctgtaatcccagctactcgggaggctaaggcaggagaattgcttgaacccaggaggcggaggttgcagtgagctgagatcacgccgctgcactccagcctggatgacagagtgagattccatctcaaaaaaaaaaaaaaaatacagtgtaaaaaaaacttcctaatcctgtctctctctttcctactcagttcctgttctcacagcagataacctcccaacttattgactgtctatccttccagattttcttaattcttacagaaacagctgtgaatgtgtattctttttttttttacacaaaatatgctacctatttatacattttgtaacttggcttttttttttttttttttacttaatgtcatatacatcttctcagtgaatagagagagacctgattccttttcatagctgcatattattccagtgtgtgagtgttatttatagttttccctgtgacctacaatgttgcaatgaataatctactaaataatttttcatatctcatatatttgtgagataaattcctagacgtagaccttttaggtcgaacagtgtgtgtgttgttacatttctaatgagcaccccattctcttctctgcgagaagtgtgatttgaagatgtgcagggaagaggaacgtgtaggaagcggcacatgcagagatcactgctggggtttagtgatggtggcttcattctttacattcctggtccaaaagaactgtaaggactgtaacactctggggttttcccccccctgtaacattgaagacatcatcaggatatcattgaataatggttgtttatcagttactatggcttttgttactgccgcatatgctagaaatctttggtctgagattatttctttcggatggcaaatacagaacagtaacaaaagcatagcacagtatagattttgcagtgactttcttagagatctttaaagtagcacactttaactccactgtagggctgtagcataccttttcaaagaaaagccagaatatttggctagtggcctgttccattattcattgggtttagttttcctgtcgtaatccatggttggttgtaacaagcgggtcttctttattcagtgcactatatgttgtggatctgaagaagtttaggaaaatagctgctggtgacagactcaggggacagtaccaaggtctgagtcaggaccctaacagcctttcaaatcttgatcaagtaagtgtccattttttatggttaactgtgagtgacgggtatacagtgttgcatcagaaaatgaagtattacttgtgtcttcagtcctctcctcacaggatggcgtcttgttttttcatggtgtgtgtgtgtgtgtgtgtgtgtgtgtgagagagagagagagagagagagatttttatctgccctcaagacatatcagcgtgaaaaatgtcatagatttgatgctggctggggagagagatggaaggagaatgctgcctctctgaaccattagcatatctttgtattttgtactcaaactaatctcataggtttgtttctctacctactagggtcagtttgtttttctgctgtaggaactaaatagctcaggattcgtagtatagaatcacagtatagtatcacagcttcccctttttctatgtcagaaaccatgatgtgtttcaaggctagctaaattactgtttgttaatgttaagcatttttcagaggtgagattgtagtttaagggttttggatacatatttcacatattttaagcattttattttgcttaagtctacttaaatgtttttaaacctttattgtgatatgtagcatccataaagaaaagtatacaaaaaacatacatacatattcacatacatccaggaattattatgaagcaaatacccagataccacaacctagttcaagaactagaacattatcagcatcccagaagccatccttcctccctaacaaaagtgtctagcatcacgacttttatggtaatcatttttgtttctttatagatttactgtttaagcatgtatccataaacactagtttaatttgctcattttcttctcctctatctcaatggaataataaaaggtaaacttttttgtttgtttgtttgttttgagacagaatctcactctgtttcccaggctggagtgcagtggcatgctctgggttgcactcactgcaacctccacctcccgggttcaagtgatcctcctgcctcagcctcctgagtaactaggattacaggcacgcaccaccactcctggctaatttttgtattttcagtagagacagggtttcaccatgttggccaggctggtctcaaactcctgacctcaagtgatccacccgctttggcctcccaaagtgccgggattacaatcacgagccacagtgcccggctctacttactttaaaatttgtgtgatacctggtatcttctaatttatggagctactatggatctgattctgttgtattatttctgttattcttttgttcatactgtctatcacatatttgtttatcttctgtagtgtgtcaggcgttgtttttgcagaattattttggggaataatttgagttcaaaaatggtatcacccaacagtatttgtttctctcttttttttttttttttggagatggagctttgttcttgtagcccaggctggagtgcagtggcgtaatctcagctcactgcaacctcagcctcccgagcaggtgggattacagaggcgtgccaccacacccagctaatttttctgtatttttagttgagacagggtttcaccatgttggccaggctggtcttgaactcctgacctcaggtgatccacccaccttggcctcccaaagtgctgggattgcaggtgtgagccaccgtgcccggcctttttttttttttttttttttttagacaaggtctcactctgtcacccaggctggagtgcagtgatgcgatcatggctcactgcagcctcgaactcccaggctcaggcgatcctcccacctcagcctcctgagcagctgggacgacaggctcacaccaccaggcccagctaattttttgtattttttatagagatggggttttgccatgttgccctggccagtcttggaactcccgggctcaagcgatctacccacttcagcagctatttttaaattttagtctgttggcagggttttgtagagaagtatcatctatttatttttgtaccatcatggaacattctttacaagtatcgcagtcaatcatttctgtacatttccttgttccatgtaagtcttaggacaatggaacattttattgtggcaaagtcagaaggactccacaggaaaaaggtttaaagcatagggtagcattggctagaaaaaatgtcgtctatttgggagcaagtctcaatagacaaggtagattcagaacttccttgacagaagcctgcaaaatttacgaaccaccactctatttagttgactttcagaagtcagtaggagtatttttctcaggattgccctaatgaagggagggttaggtgcaggctgtttgtaagttttaagccaaagcttttcagttgcttattatgggcagatgttttatggatcctctaaaatttgtagttttgaataacttctctaaggcattggtaaggaccttttccattttaaacatttgtgattggcatgtgatctgtaacgagcagctgtacatcactgatgttctatacgtttgtctccacacgaactggctgggtgcagtggctcatgcctataatctcagcactttgtgaggctaaggtgggtggatcgcctaagctcagcagtttgagaccaacctggggcaacatggcaaaacgcatctctagtaaaaatacaaaaattggccaggcatggtggcgggcccctgtagtcccagctactcaggaggctgaggcaggagaatctcttgaacctgggaggtggaggctgcagtgagccgagatcgtactactgcactccaacctgggtgacagagtgggaccccatctctcaataaataaataaataaatatcgccagaactttagatacatgtattttatttttatttttttttaaccaaacaggatctgcccaataacatgattcatcaggtgccaattaaatccctccctcaagaatggctttggtgtgaaacgtggtgtgatgacgcctctaagaaaagggcaaaaaccattgatttggtaagccgtatgtggtgtgcttctgcatgttcatccactggatgtgtgagtgaatcacgattaatgatttttatttagattcttaaatttaagaatttcctagattcttatttagactttctctgtaattgtgtagtttgtcggggctattcttatcttacagaatattcttataaatattcttatcttatagaattagtatcgtttgttgtatagtaagcataagtatatagtttgttggggctattcttatagaatattcttataaatattcttatcttatagaatatttcactggttttatttccctgcttacattaggaaaccaaatcccttagcacttaatgggactgttttcacaacttacaatctgctgagtcactccttggcttccagtttatctctgtgccttgtaatttttccaaatggactttcacttttcctgccttccattagccactcacacattctttgtagatgtaaatacagctttacatagcccactaccatattgcttctggtagtatatcatttggttccttactattgttttcttgtccagttaggacttgtaacccaagaacctttgaattctctatcatgtggcctttcttcaactcagctgaagtgtgttcttttggtttcacagtgtaataatccgatgaccaaagagccgaaactggaagcagctgtgcggattgtcccggagtggcaggactacgaccaagagatcaaacagctacagatccgctttcagaaggagaaagaaacgggagcactgtacaaagagaagacaaaagaaccaagccgagaaggtaagcacaaaccgttggttttaggacagtacttctttccatttctgatttctgcttgttgtaaagacaatagaataatggataaaaggaagagaaaaatctcctattaatccttccattctaacatcaaccagtatatatttttcattttccttttatgttggtcttctaaacagtatttattagtgcaattgctatgtttttttttttttctcgtttttctggtgagggggagaaagggtattttaattgtgattatagttatttaggttcatgagttttgtgatacataaaccaaaccttttgcagagttcttcttagattccttgttttttttttcattaaatctgtcagtgtactagtgaatgaaaaaatttagatcaacacaaatatgtagttgaagaaactttttttttttttttttgagacagagtctcactctgttgcccaggctggagtgcagtggcatgatcttggctcactgcagcctccacctcccaggttcatgtgtttctcatgcctcagcctcccaagtagctggaattacaggcatgcaccaccacacccagctatttttaaattttatttattttttattttttgtagttttagtagagacagggtttcaccatgttgcccaggctggtctcaaactcctgacccaagtgatccgcccgcctcagcctcccaaagtgctaggattacagacgtgaggcactgcgcctggccgaaaaaagtattctttaaaacaagcatgttgggatggagatggaatgcttgtatttaatttagtgttaagtctttaatgtcttccctgttgtgtgtgtcttgaatgatagctacttgaaaaaatcattagaatacgaaattgactttttaaaatattaataagttgggctctagatttaagaaaaattttaaatgtatttatttttaaattgtcacgtaataattgtacatatttgtggagtccatagtgatgttttggtatgtacatgggctctggatttttaagatttattctgctttagactaattctaaaaaagtggctgggcacagtggctcatgcctataatcctagcctctcaggaggctgaagtcggaggattgcttgagcctggaggtcaaggttgcagtgagcgactgcactccagcctaggtaacagagagagaacctgtgaccaagcaagaccctgtctcaaaataaaaaaatccagaacatggatcttgggtgatttgcctatacatccctcagactgtactatgatattaaatatcacagctggaaggttatatagtaaccataaaagtaattaattccgattcatcagtaaaaccctgaggatttccatagataaatgggcaaagaatgtggacacactgttcaagtaagaggaaacacaaataataaatgaatttgaggaaacagtaatcaaattaaagcagtctatcactagtatctgctacatggaagaaaacagacatagtgataatgccatttgtttgggaggcggtgatgaaaccgttgtggatgtagcttgatgaagctttgtgtattggaatagcccttgttacaaagcagtacatctgccattagaagcccgtaaggcgtttatataccctcaagaattactctcttgagaatatatctgaaagaaataattcaacagaaaaaacaaagttgtatacatgaaaaaatttattttactattacttataagccagaagcatcaaaaacagtttaaacatccaagaatgagctacactgatacatagaaaatgtttagatgctattaaatgataaaagaaaaatcccgactaaaaaaatgcatgcaacgtttactgaaagtaaatattgtatttgtgaaaacaattcagttggagtggggtttacagatagtttccatttttaaaaaatctttaatttagtttttgctttcaaaatacagtacaaaagcacaaatcccaaagatttagtaagtgagataagatgaaggtggaggtacaaagaataggttccagtgatgaaaaatgcccactcagtggtgtttgtaatttgaagatcatctgttttcttttctgtggttctccttttccttaggtcctcagaaacgtgaagaattatgatctctggagaaggacaggaaatcaccccatttgaaaaacagtttttataataaatgctagttttttctgatctgtctatacaactgctgataagccggctgggcaggagtgccacaccttttgattctgagcatttgattctgacttctgtactctggtggccactggatctttgggattaaagctctgttggatttgtacctcagaggaagaccaagtggctgatcctttggactctgtaaagagcattcttctagtcagagggtggaatggcagcagcaactggaagaaaatgagttttttggtgcccacacccaagagcacacacatgctgcactgtctcggaaagcagggccagctagagccaccatgttcttccttacctcagtttacctgcggcctgcgctgcactgcagatgcccaccctgccctgggtctggccggcggaagctctgtccaaggtccacacacctccaggtttacgccaacatccttgtgccctccccaccttctcttccaacgcattaggtgcattgtttaattgaaatccaaccaacaattgtgtgtcaaggctggtttggtgcagtggctgggcaaattaattttgggccaggatgggggtgggttgcagtgagggtagggaaaatgtcaggagtaggaaggttcgggggttaagggaagggaaggaagaccagaactggccatcctcttttataatccattagtagcaccatggctcatttgaaatgaaaatattacacttattccccacccaaccgcagtgaactttctaggtaattgttttgaaaacaatttttgtatctgtgaaagtctttgctttttctttccaccttctagaaaagtctgctaccagtttccttactgaatacagccatactcagcccctctcgcatccagcccgtcagggtcagggtcagggtcaggctccctcaagacgagcaccgcattgtctgccctcttttgcgtaggatttttctctcagacccaggggacattgccttggacttttctctacaaatgccctcagatgtaagaccagaaatgattctgcttgtggaactcgtggctttctgtcctattttccttttatgtgagccctgcaggttgcctttggcgcccacaccagttctgtcttcatgtcgctgcatcgtgaagccccatttgcctttagtccctgctttgtgtgtcttcacttccacagccagtgttgcccctcagggcatactttgctggtgaacgggctgtagagtcttgagtatgttattggcctaagtgggcatgaggccccagcatccgactccatctgccaggctgcagggcacagcagcactggcatagacaggcacgctctgtcttccaacgtgcaccagccttttcttacatattttgcctgtttttaaaaaatacgaggagagggtgcagatggatactgtgccctcaccctcctaagccaggtaatatattgatgtgcagacttttaagaaatcttagtcttatcacaaatatcaagtaatttattttttccattttcaaatgcaaaagttagcctaggaagcctcccagtcatcctgaaggaccttttgactttgcttttataattctgttaaaaattgaggaggggattaatgagtacaatgaaaacaaaacaaaacaaaaaattaagaagaggaaagctcaaaagaggataagagactgaaaaggcacctcagaatggctgctgtgggcagagtctgtgacatgacttttccccgccctgcccctctgttcagagcagctggaaagatgggatcagtaagattaaaaaacttttgttcggccaggcgtggtggctcacacctgtaatcccagcactttgggaggctgaggcggacggatcatgaggtcaggagttcaagaccagcctggccaatatggtgaaaccccgtctctactaaaaatacaaaaattagccgggtgttgtggctcaccctctattcccagctactcgggaggcagagacaggagaatcgcctgaacccaggaggcagaggttgcagtgagctgagatcgtgccactgcactccagcctgggtgacagagcgagactccatctcagaaaacaaacaaacaaaaagaaacttttgttcaagctgcatcttcacattgaatgaaagcattcagacgggtgactgctgctgtccacaactgtgggcggaagtgtgccttttcccagtttctcgtccaggaggttgcatagcaaatactcaagtcactgggatatatgctttccaaatgctggcccccatagcacctttccccatgtctttctaccaagcctcttatgtttaatctgtgcagggaagacaagagtagaccatattctctgtgtgctgtgcatgtcctggtgtcactcattgcctcttatctgtcgccattctaatataagtcagcttaatagttgactctgaataatgcaaaacccagcttgcttccagaatggcctaggaccctcctcctcctgccagtttttttttttttttttggttcatgtggcataatcatctttcaaaattaaccaaatgccccagaaaatgatgttaccactaaaatattttctccaagaaggcatactgtaacagaaaagataggtaagatatttttttcccaagaagtaagaattgattgtgctgaatgttcaaactctggaaactgttcacagtatgttgttcttagctgttatttatataaagtgaattattttctctctcaatcatgccatagtggagacttttgtttgtgagtaagtgacagagtaatatgaaataatgtgatatgtcagagtgacatgcagcatcctgagcctgtttttatgttctgtgtacagtggcatttgattgagatcaaagcctgtcacagcctgctgctgggggtgtggggatatgccagagtcctgtgtttggttttagaagtttactgaatgtttcccacatggagaataatggatggcatgttagtttctttaagagtggtaaagttgtacatctgtcattgttgcatttcgaattgaacacatagatgcttgcctgtctgcttgggtgaatgcctcttgggagagcgaagattacgtgcatgatgtatgttaagaaacagtttccggtcaggcacagtggcttacacctgtaatcccagcactttgggaagccgaggcgggcggattatgaggtcaagagatagagaccatcctggccaacacggtgaaaccccgtctctactaaaaatacaaaaattagctgggcatggtggcacacacctgtagtcccagctactcgggaggctgaggcaggagaatcacttgaacccgggaggtggaggttgcagtgagccgagatcatgccactgcactccagcctggcaatagagcgagactccgtctcaaaaaaaaaaaaaaaaaaaaaaaaaaaattaaaacagtttccataaatggagcttaatttgctctgctgtccttaagccctcgtgggtttttttttaagagagtctcattctgtcacccaggctggagtgcagtggtgcgatcttggctcacttcaacctctgcctcccaagttcaaacaattctcctgcctcagcctcctgagtagctgggattacaggcgcctgccaccatgcctggttaatttttgtatttttagtagagatggggttttaccatgttggttggccaggctgatctcaaactcctgacctcaggtggtgatctgcccacctcggcctcccaaagtgctgggattacaggcgtgagccactatgtccggtcaagccctcgtgttctgaaccttgtcaaggctctgcctgaatgagttttcatctgattgtggggaccaagtccctgagtagagggccaagagctagggacagggggaagagactggcccaggtggtagggaggaaagaactcccagagtttcctttagccaggaaacctgctctactgaccccgtgacttggacagtcagacatcaccctgagagtgacaagtgtaaaatgactcccttcctcccccgccctccggaagtatatttagatacttgaaagcagtccttttctaaaatggccttacctatgtggcctgaacgattaaaagaaagaactcagagttacaagggaaaaagaaaaagagttacaagggaattgtagtctttttctgaatagaatattagtactgtggtattgcatttcatgggaatggaaatgtattggtaaagctacctgatggaagctttctcttggtaacaaaaatggagggtgtattatgtgcagttatttaaatatatgtattccattgttgcgtggtttttttcccccctcaagacagagatttgctcttgttgcccagggtggagtacaatggtgtgaccttggctcactgcaacctctgcctcctgggttcaggtgattctcctgcctcagccttccgagtagctgggattacaggtgtgcgccaccacacccggctaatttttgctttttttttttttgagacagaatctcgctctgttgctcaggctggagtggagtgcagtggcacaatctcagctcactgcagcctctgcctcccgggttcaagagattctcctgactcaacctcctgagtagctgggattacaggtgcctgccactatgcctagctaatttttgtatttttagtagagacggggttttgccatgttggccagggtggtctcgaactcctgacctcaagtgatccacccgcatcggccccccaaagtgctgggattataggcgtgaaccaccgcgcctgtcccattgttgtgtaattttaataattagttttttaagtacttgattttatgggcacatttttgtgggatgattggagttaatcaaataaagcttgtcatgtgtgtagtttggtaagataacttctttaaattcatgttttctctgccttgaggtagtgagggaaagatcttaatcagtattttggtaattaactgattgaattcaagcaaatgagacatcatgaacttcagtggttattgatatttcagggtatatacctgaaatgcctagaggatacagatttctcatttcattctttggtctttcatttctctatatacagaaatgaaatgacacttctgggaggcagtagaagcaggaagtcaatgaattgagtagagggtcccattccctcaggctgtcattgatcagtgacaatttataaaaacaaactgcaaagtctgtggcaagtggctgcctgcttcctagaaggagcccatgaaggttaaactctgtggtcggtatttgcaagcgccgggcgtggtggctcacgcctgtaatcctagcaccttgggaggccaaggcaggcggatcacccgaggtcaggagtttgaggatttgcaagcaaaaggtcctctcctgagtctttcccagatacccagcagtgcagaggctagctgtggaaggttgcagtgggacaggaatgtattgtatgccttgccttacttgtcaccattgagatttccagagaaatgggcataacgtctcttaacaacaacagcagaaagcaaaatacattaacttaaggttgacaacaaaagattatcaagtaccatgttttccaaccaaccagttattcgtggtaataataaaataaaggtgggaaaatgttataatttttaaggaaactgtgtactttaaaaatcttctttatgaatatccaatgttactgtaatcctgctccattaaatgcagcattgttgtcaggtgctgcctcttgcttgggaacagcattgggcttttaaatgtctgcagaatctctgcgttcgaagggaattgagaatgaacttcctggtactgtaatgaaaataaggtctgctcaacacagtaaacgtttcctctcttctttaaaactgcgcagtcatttggcctttgtgtttaggaagggcagattgatagagcacaaagtccaaccccttcatctagcagaagctgcaaacccagacagaggaacgagggctttacctgagtcttgtctgctgctggggctggcttcgggttgcatccagttctttggattctgaggatccaaagcacccaggtctcctccaggtcctcaacctctgggagctgccccaggcagaacttggcaggcaggcataacaggtggggtgggagggggaacctcaaggcaagaaggtgtcatgagacccctgggccggcagagttccttaggagggtggcatggactttgcattttgccagttctctgagctcctactccggggtggatatgcattgaggatgtagtctctgtgtgatgatggggagggcggggaggggcacctggtgcctgtgaaggcgcaagagagggccctaaggtgcaggaccaggactaagctgctacaaggaggtggtgcttaggttgaagcctgaggactaagtaggggcgaggggtgggcagaggggaggagcttgagctagtgtttttgagggagctgcatggaagcctgcacgtggccaggagagggggaatgggtttgatcctgggggcacaagaaggcccttcaggggtttaaactgggtgctggcactaaatgggttttttcttgtaataaactttgtgttgaggtctgtagcacatactgaaaagtacataaacacacaccttgatagtttttcacaaagtgaaagcactagcatatccatcatccagataaagaaaaggaagttggagtttattttaacacttaaacatctgattacagtctggcatccaggaagggcagagcagcatgtgtcagaccagcctacgcctgatcattacacacactatttgaaaagcactagagcctgctgagataccggcaagagagggagagcacgaaccatcagaagaagtgaaacctcatgtggctcacagggaataaaacagaaggtggcaggcttactaggcccaggagccaagtcacttcaggacgttcttggccgctgcacacttgtgtgggggcacatcccagaaaggaggaagccatagaagcccccaactttgccttgtatagtctcatcaagttcttggcgggttcctgtattatacataaacagggcagaattccaaatggaaagcaacacttggaaggctggaaaagctgagtagagatttcagaagatgtgctggggagaagaagtttagaattcattttccatcaaattagagggatttggtaactatttcagactttgcatcgaaaacccagggtgtaggccttaggattaggaccacatcacagaactcaaatctagggtctaggactgagggcaacactaagatagacctaccctcgtaaagcctaaaatgaaggcttcgcagaatcagggtgatcgctagtaaccaaactctgctaaaacaaaagtttttgtgggaaaaaactgaatccagagtgtctatagtatattattcagaatgtcctgtatataaccacatcagtaggcacgacaggaagtgggaacatatgacgtgatcaagaaaaaaaatcaggctgggtgcggtggtgcacacctgtaaccccaggactttgggaagccgaggcggttggattgttggagcccaggagtttgagaccagcctcggcaacatggtgaaaccccatctctacaaaaaatacaaaaaattagccaggcatggtggtatgtgcctgtagtcccagctactcagaaggctgcggtgggaagatcatttgagcctgggaggttgaggctgtggtgagctgtgatagtgccattgcactccagcctgggtgacagagtgagaccctgtctcaaaaaaacaaaatcaaaacaacccataaaccaaggtgttgaaatcattcaataaaaatgttaaaataattataaacgtttttctcagacataagtggatgcttttttattgccttttgatacgtcctgagtttgtgtgtgtgtgtaggtatatgtgtatatatatatttattaatttaattgacaaagattgtgtatattccaggtgtcccgtgtgatgatttgctacacatgtgcattgtgtgattatcaccactgaattaggacacccatccccacctgtgctgcacattagatccccagaacttatctttttttctttttttgagacggagcctcggtctgtcgcccaggctgaagtgcagtggtgtgatcttagctcactgcaaccgccgcctcccagattcaagcaattctcctgcctcagcctcctgagtagcagggattataggcgtgcgccaccatgcccggctaatttttgtatttttagtagagacggggtttcaccatgttgttcaggctggtctcaaattcctgacctcatgatccgcccgccttggcctcccaaagtgctagggttagaggcgtgagcccccacacctggcctatcgcgcaggcttaagtgcaatgttgcgatctggcctcactgcaacctccacttcctgggttcaagcaattctcctgcctcagcctcctgagtagctgggattacaggcaactgccactgcacctggctaatttttgtatttttattagagatggagtttcaccatgttggtcaggctggtctcaaactcctgaccttaggcaatctgcccaccttggcctcccaaagtgctgggattacaggcatgaaccaccacgcccagccccacagaacttatctttaaactgagagtttgtactcttttgatctgcatctccccatttccccatttgcagaagaaaagtcagtgaacttgaagacacgttaatagaaattatctaaattgaaaaacaaagtggaagaagagattgaaaaagaataaatgagcagagactcagtaaactgtgagacagtataacaaatgcgtaactagaatcccaggagaggagagaaaatgtggcagaaaaaaaaatacggagaaatattggccaaaattgtttgttttttgaaaatgcggtcttggcccagttttgaggccctagctttgaggtcctggctagaggccagtcagtcctctagagcagccaatcaagtttacaccctcaactacctcccttcttcagctcaagctccaggccagcactctgacaccccagggcagtaccagacatcctgcaacagcccctgtggcccagcgccagctgagattattccagtcagtctcagtctgctgcccctgcctcacctgttccttcctgggaaaccacaataaggggtcttgcccacattcccctgctccctgtgccccataaccagtggttgcttccactgagtggccctgcgtggagtgctgtttctccccagggaactgagtgcgacatgtcaaatttaccgtttctctcttgatctgcatctggcctcaccggaatcaccactccctccccttaaaagcaggatgaatataaagaaggccacacctaggtgcatcatagtcaaatgctgaaaattaaagataaaatcatgaaaaagtagtagccaggaaaacaaaaacacctgatgtggaggggaacaacaatgaaaatgacagctgacttcccatcaggaacaggggagtgacgtcatagaatgctgaaaggagctaacatcctacatgcagggaaaatattcctcaaaaatgaacctggggccaggcgcggtgcctcacacctgtaatcccagcactttgcgaggccgaggcgggtggatcacctgaggtcaggagttttgagaccagcctggccaacattgtgaaaccctgtctctactaaaaatacaaaaattagccgggtgtggtggcaggaacctgtaatctcagctactcgggaggctgaggcaggacaatcgcttgaacccggcaggcagaggttgcaatgagccgagatcatgccattgcactgcgcctgggtgaccgaggaagactgtctcaaaaaaaaaaaagaagttggaataaaaacattttggggtaactgaatgctgacagcattcattgtaggagacaagtactacaaaattgctttaaaaaaaaaggctcccaggggggtggccccaagagttggggttcagtgtcctccaagccctggtcctctccaataggcctgggatctgccccacctgacccgttctcccgaccctgaggttggcttcaatgctaaggaagcccacaatattgtcaaagagtgtgtgctggtgaagattataatcacatcatcaaccaagcatagtggaacaatccttaacacatctggttaagttgggaaaagcttatacatatattgtgacctgtgcagtggtccagaagagcgcatatggctttcatacagccagctcctgtttttgggataccacatctgatggaacctgtaccataagatgggagaactggaccatgaaccgtattgtcaacgtttttgccattgctagtgttctttaacttactaaaaatgttgggctaaagccattaacttaaagaatttgtcagtgtatcttttcaaaaaatgagtaatatttattagtgtgctagatgacaagcgt

SEQ ID NO: 577 - DNA, 4758 bp, Homo sapiens
cagtgagtttttagcagaagacagtcaagagaaattttggaattttgtagaagccagtcaaaatattggatcatcagatcatgacggtaccgattattcctactatcatgcaatattggaggctgcatttcagtttctgtcacccctccagcagaatttgtttaaattttgtctgtcccttcgttcttactcagctacaatccaagccttccagcagatagcagctgatgaacctccaccagaaggatgtaattcgtttttttcagtgcatggaaagaagacttgtgaatctgatacccttgaggctcttctactgacagcctctgaaagacccaaacctttattgttcaaaggagatcacagatatccctcgtctaatcctgaaagccctgtggtgattttctactctgagattggctctgaggaattttccaattttcaccgccagcttatatcaaaaagcaatgcaggcaaaatcaactatgtattcagacattatatatttaatcccaggaaggagcctgtttacctctctggctatggcgtggaattggccattaagagcactgagtacaaggccaaggatgatactcaggtgaaaggaactgaggtaaacaccacagtgattggtgaaaatgatcctattgatgaggttcaggggttcctctttggaaaattaagagatctgcaccccgacctggagggacagttgaaagaactcagaaagcatcttgtagagagcaccaatgaaatggcacctttaaaagtttggcagttgcaagatctcagtttccagactgctgctcgaatcttggcttctcctgttgagttggctttggttgtcatgaaggatcttagtcagaattttcctaccaaagccagagcaataacaaaaacagctgtgagctcagaacttagaaccgaagtggaagagaatcagaagtatttcaagggaactttaggattacaacctggagattcagccctcttcatcaatggacttcacatggatttagatacacaggatatattcagtgggtcaacaacctggaggttgatagcagatataattcgtggccttctagtttacaagagttgcttcgacccacctttcctggtgttattcggcagatcaggaaaaacttacataatatggttttcatagttgatcctgcacatgagaccacagcagagttgatgaacacagctgagatgttccttagtaatcatataccactaagaattggttttatctttgtggttaatgactctgaagatgttgatgggatgcaagatgctggagtggctgttcttagagcatataattatgttgcccaagaagtggatgattatcatgccttccagactctgacacataggaagcaagaggctactatgagcagactggagttggacctctgcccgttgtgctgttcaatggaatgccctttgaaagggaacagctagaccctgatgagttagaaaccatcacaatgcataaaatcctggagaccaccaccttcttccaaagagcggtgtacttgggtgaactgccccatgatcaagatgtggtagagtatatcatgaatcagccaaatgttgttccacgaatcaattctaggattttgacagctgaacgagactacctggatttaacagcgagtaataacttctttgtggatgattatgctagatttactatcttggattcccaaggcaagactgctgctgtagccaatagtatgaactatctgacaaagaaaggaatgtcctccaaggaaatctatgatgattcttttattaggccagtaactttttggattgttggggattttgatagcccttctggacggcagttactgtatgatgccatcaaacatcaggcaaaaatccagtaacaatgttagaataagcatgatcaataatcctgccaaagagataagctatgagaacactcagatctccagagcaatctgggcagctctccaaactcagacttccaacgctgctaagaacttcatcaccaaaatggccaaggagggggctgcagaggccctggctgcaggagctgacattgcggagttctctgttgggggaatggatttcagtctttttaaagaggtctttgagtcttccaaaatggatttcattttgtctcatgccgtgtactgcagggatgttctgaagctgaagaagggacagagggcagtgatcagcaatggaaggatcattgggccactggaggatagtgagctctttaatcaagacgatttccacctcctcgaaaatatcatcttaaaaacctcaggacagaaaataaaatctcatattcaacagcttcgggtagaagaagatgtggcaagcgacttggtaatgaaggtggatgctcttctgtcagcgcaaccaaaaggagatccaagaatcgagtaccagttttttgaagacagacacagtgcaatcaaactgaggccgaaggaaggggagacatactttgatgttgtggctgtcgttgaccctgtcaccagagaagcacagagacttgctcctttgctcttggttttggctcagctgataaacatgaatctgagagtatttatgaactgccaatccaaactttctgacatgcctttaaaaagcttttaccgttatgtcttagaaccagagatttctttcacttcagacaatagttttgctaagggtccaatcgcaaaatttttggatatgcctcagtctccactgttcactctgaatttgaacacacctgagagctggatggtagaatctgtcagaacaccatatgatcttgataatatttatttagaagaggtggacagtgtagtggctgctgagtatgagctggaatacctgttactggaaggtcattgctacgacatcaccacaggccagcctccacggggactacagtttaccttaggaacttcagccaacccggtcattgtggacaccattgttatggccaatctgggctactttcagctgaaagccaacccaggagcttggatcctcagacttaggaagggacgctctgaagatatttatagaatttacagccacgatggcactgattctccccctgatgctgatgaggtggttatcgtcctcaacaacttcaaaagcaaaattattaaagtgaaggttcagaagaaggcagatatggtgaacgaagacttgctgagtgatggaacgagtgagaatgaatctggattttgggattccttcaaatggggctttacaggacagaagactgaggaagtgaagcaagataaagatgacataattaatattttctccgttgcatctggtcatctctacgaaagatttcttcgcataatgatgctatccgtgctgaagaataccaagactcctgtgaaattctggttcttgaagaattacttgtcccccacatttaaggagtttataccttacatggcaaatgaatacaatttccagtatgagcttgttcagtacaaatggccccggtggcttcatcaacaaactgaaaaacagcgtatcatctggggttacaagatcctcttcctggatgtacttttcccactagttgttgacaagttcctgtttgtggatgctgatcagattgtacgaacagatctgaaagagttaagagatttcaatttggatggtgctccttatggttacactcctttctgtgacagccgaagagaaatggacggctacaggttctggaagtcagggtactgggccagtcatttagccgggcgaaagtatcatatcagtgcactatatgttgtggatctgaagaagtttaggaaaatagctgctggtgacagactcaggggacagtaccaaggtctgagtcaggaccctaacagcctttcaaatcttgatcaagatctgcccaataacatgattcatcaggtgccaattaaatccctccctcaagaatggctttggtgtgaaacgtggtgtgatgacgcctctaagaaaagggcaaaaaccattgatttgtgtaataatccgatgaccaaagagccgaaactggaagcagctgtgcggattgtcccggagtggcaggactacgaccaagagatcaaacagctacagatccgctttcagaaggagaaagaaacgggagcactgtacaaagagaagacaaaagaaccaagccgagaaggtcctcagaaacgtgaagaattatgatctctggagaaggacaggaaatcaccccatttgaaaaacagtttttataataaatgctagttttttctgatctgtctatacaactgctgataagccggctgggcaggagtgccacaccttttgattctgagcatttgattctgacttctgtactctggtggccactggatctttgggattaaagctctgttggatttgtacctcagaggaagaccaagtggctgatcctttggactctgtaaagagcattcttctagtcagagggtggaatggcagcagcaactggaagaaaatgagttttttggtgcccacacccaagagcacacacatgctgcactgtctcggaaagcagggccagctagagccaccatgttcttccttacctcagtttacctgcggcctgcgctgcactgcagatgcccaccctgccctgggtctggccggcggaagctctgtccaaggtccacacacctccaggtttacgccaacatccttgtgccctccccaccttctcttccaacgcattaggtgcattgtttaattgaaatccaaccaaca

SEQ ID NO: 578 - protein, 381 aa, Homo sapiens
SEFLAEDSQEKFWNFVEASQNIGSSDHDGTDYSYYHAIAAFQFLSPLQQNLFKFCLSLRSYSATIQAFQQIAADEPPPEGCNSFFSVHGKKTCESDTLEALLLTASPKPLLFKGDHRYPSSNPESPVVIFYSEIGSEEFSNFHRQLISKSNAGKINYVFRHYIFNPRKEPVYLSGYGVELAIKSTEYKAKDDTQVKGTEVNTTVIGENDPIDEVQGFLFGKLRDLHPDLEGQLKELRKHLVESTNEMAPLKVWQLQDLSFQTAARILDVELALVVMKDLSQNFPTKARAITKTAVSSELRTEVEENQKYFKGTLGLQPGDSALFINGLHMDLDTQDIFSGSTTWRLIADIIRGLLVYKSCFDPPFLVLFGRSGKTYIIWFS

SEQ ID NO: 579 - DNA, 76644 bp, Mus musculus
  misc_feature (1)...(76644): n = A,T,C or G
gaatctaaataaatctgaaagaaaggaaaataatttcacaaagcgctttaaggaacgataagcactggcagaaaaggaaatgacgtgtctgaacatgttgctgagccttaaggattgatttgagaactcatccagggactggagtgcggagtcacaggtgtgcagataaggaaacattaactttcagctttattgtacaaaacaagtcacaattttctcctctaatagtcttgaaattcttccaagactgagctttgagaatgaaatcctaatttttagcaggagagaattttaaaatcccaaatttttattattaatccttggctcactgcatattttctcatccacaactggcctccccacccccatttaatttaaacagtgtatatatgcacatactaaaatgagattggaacacctataaaccctcacccaacctaagtactgttagtgattctcaaagaatggtccccaaagcagcatgagacacaccaggaacttagacatctgaggcccattccctacctgctgaggcagaaactgggatctcagaccagcaatctaagctttacttagctcaccaatggactgtggtgcacattagtgtttaagttagagatgagctgcagttgagatctgtgcgctgtgtccttccctctcttccaagagtaatagtgccctgagggtttggtttttgtttttggtttgtttgggtttttttttgttttgttgagttttttgtttgtttgtttgtgttttatttttttgggttttttttggggtttttttttgttttgagacagggtttctctgtctagccctggctgtcctgaaactcactgtgtagaccaggttggccttgaactcagaaatctgcctgcctctgcatcccaggtgctgggattaaaggcgtgcaccatccactgtgttgcctacttgaaccgggtacacctggagagagagagagagagagagagagagagagagagagagagagagagagagagagagagagagaggagagagaggagagagagagagaggagagagaggagagagaggagagagaggagagagaggagagagaggagagagaggagagaggagagagagagaggagagaggagagagagagagagagagagagagagaatggannnnnnnnnnnnnnnnnnnnnnnnnnnnnnnnnnnnnnnnnnnnnnnnnnnnnnnnntaccccccccacccacccccgccaggcttcttgatgtattgttgccaagttgttagcactagtctgccggctccacacttggtgcctggagccatttcgtcagcactcggtggccaggctggccgcttattccggaaattctcaggaaaacgggttcagcttctcagcaggtagcagaagagcagggcagttgtcacttcgaaagaagccagccaggtcggacagctgcaccacaggtggccccacctcagtggcagactagtctgtaccagcccgcttcaggctgggggaagctacaccactgcacagcctgccctgaggttttacttacacattcacgttcctgtatagcaccaatgcatttgagtaacactgcctatatttaattaccattttaaaagacagcggggcacgtagtctctatcttacctttctaattcaacattttcttcctaagattcaaccatattgttcattccttttgacttctgcatggtgtgtaaagacttgtggtgagttggatatgctttttgggatgatttagaagatagactgatggcgttctctacaggaactacagaaggtgaaacaaacgtccacggcgtagtcagtctgtgtgttctagttgatctgcaaatttgcaaaaggcaagtagaaagtagataaaactaaaagtagagggttgtctgctcactagcattcatggtcctggaaggtactctgcactgactagaggataaagctaaacaccaagccagttacaaacctttccttatgcaatgatggcctctctgcatgatatgctggtacaacaatgccacacaagatgtgggagtaaccaaccactgtctggttggatttagggaccactccatgaaataaagccagtccctgacacttctcagttggccaagaacctgagactagacaggcatggacccaggagcaaaccaaacactactgttctgctagaaggacaataacaataaaatgacgcctaacaacattctgctgtatgcatagatcagtgtctcactgagccagcatcagaaaagtgtcctcctacagatgagagcttgtatagatagccatgagtgaacagtgtgcagaggatgagaggctgtggaacactcagtcctaaatgggacatcttcatcaaacctcagggctcaggaaacgatgctgaagagaaagaaagaaagaaaaagatggtgagaggtagtgaagatgagagacaccaagaaaacagcaccttccagacaggatcaatgcatatatgaactcacagagacagaggcagctaacccggggctctacaagtaggggcctgatgggtcccagtgctaagagggtcacaagtttacatccctaacccagaagctacctccagttagcaaatgaaaacttgttttctcagaggagtcttactaggatataaacctcacttagggcaggccccaggctcagcaagagttggctgacacaaaactaactcagtaatacctgtggagatggtgtgtctcataacactttgtgtgctcgggttttaccttttgcttatctagtagtttccaattttgtaatttttatggtgtgtgtgtttttatagtgtgtgtgtgtgtgtgtgtgtgtgtgtgtcctttgtttttgttttctctgtttcctttgttttattccagtttgtttgtttattggtatgtttgttgtctaaaaacgaagaaggtggaactggatgggtgggaggcagtaaggatgtgggaggactttaagaggagaatgtactttatgaaaagtttatttccaattttaaaaagaaggaaaaaaaattgaaaaggggtggagttgtataaggtaaacgcaactggcaaatcaggttctccttcaggtctacagtttccgttgccagcaagtcagtgcttccgcagacaagcgtacgctttgtcctggcttgttttctgtggctgtgataagcttcatggcaaacaacaacttgggaaggaaagagtgtattgtagcttactttctatctatcatgaaaggaactcaaagcgggaacctggaggcaagaacggaggcagaatccaaggaggaacacactgcttgatcccatgacttgctcagtttgcttccttatacaacgcaggaccacctcatcagggtgacactggccacaatgacctgggggcctcctacagcaatcactaattcagaaaatggccgcagacttgcctacagacaatccaatggaggcatcttctgaatgaggctttccctcttcctagatgactctagcttgtatcaagttgacaaaaaaaaaacaagcagaacacctttttctcccatcttataaataaaatgttgagagcctactagggctctgcttctctccttccctgtgtaacagaactccctgaagtaaacagctgctcatagatgcaactggttcaagtttggggcaatttcaaacagaattgatatttacattctcagatgtctctcttggtacctacatgcaaatgtttctctgagtctatacctaggaatgaaactgctggaacattaaaaaaaaaatgttgaatgttcagcttcacaggataatgccaagtttcttccaacatagttaaataaattcacactcctatatgcactcttatacatttccttggaaaaaaatcagtacttagtgtcatatgttttcattctggccagtcaagtggatacaaagttatattactgatgttcacaacatccaaaaagtgagatatgaaatgttctgcatccatacagtgctttctccacgaggttagctcttccagcccgaatcctcagtcctgacttgctcagttgctttcttcagtgctttaaagtttttatcatagaggtctatatacttgattcaatataattcaaggtaaaatgttgaagctgctgggtggatttctgagttcgaggccagcctggtctacagagtgagatccaggacagccagggctatagagaaaccctgtctcgaaaagccaaaaaaaaaaaaaaaaaaaaaaaaagttgaagctgttgtgaatctgttttcctggttgctttctctatctttgacattggcataaaaggcatctactgatttttttttttttatgtgttgactttgtacccagccactttgctgaaagtgtttatctattctaaaagttttctgatgcagtcttttattttcttgagacagggtttctctgtgtagaccaggctgtcagacttacagagatccatctgcctctgcctcctgagtgctgggattaaaggcacatgccaccattgctgggctaaagtattcctttgggatctctttggtattgagtcacatcccatctgtaagtaagaatgtcttgacttcttcctttcatatttgcatcctttttaactttttgctctcactctcagttcaacagcattcaggaggcagaggcagacagatatctttgttcaaggccatcctggtctacaaagtgaattccaggacagacaagggatacacacacacacacacacaacacacacacacaccttgtctcaaaaaaaaaaaacaaaaaacaaaaaaacaaaaacaaattaaacaaacaaaaacccccatattgttgagatgtagcagacatcctggtcctctgcccctctgggagggattatattgtagatgttatcatttggtgccaggcacctgatggtcagttgttctccacattttgactaattgtggctttttataatggtctttgatgcagttttctttgatgagagactagagctgcatttctctgtggttacaaggatttaggaagaagttagcaattacactggtttaggaaaagccaggaataggtttccttcttgagaccatccatgacctcaccagccactggtcatttgctatgtttataataagagacttgaattccttccttttgagtgtgccttaagtccaagtattgtccacttacaaataaatgacttaaaaagtaataaactatttgtccatgtatgaaggagaatatacatattttagaaataattcaagggtgggagaataatccttacagaacttttcacagtggaaacttaaaataagcaaatgtttcttgcctagtgttgttgtgagaatgcagtgaagtgccaggataaatattacagaatcctcagaggttggtgtcaagactctcacagacacccaaatccaaggatgtccagcccttatataaaacaatgcagtacttgaatatcatgcacaatcatccccactgcatcaaatcatctctaagctgtacactaacatgtaaatgtaaaaggtcgtatgtaagcgccttgtgcttgtcaggctgctgtgttcaggaacaataacagcaatgtctgcacgtgctctggggcagctttccaaacacagcttcaagatgcattggtttgttgttggtgggattgcaggcttgtacaactactctggaaatcagtttggcggttcctcagaaaattggacatagtactaccggaggatccagcaatacctctcctgggcatatatccagaagatgccccaactggtaagaaggacacatgctccactatgttcatagcagccttatttataatagccagaagctggaaagaacccagatgcccctcaacagaggaatggatacagaaaatgtggtacatctacacaatggagtactactcagctattaaaaagaatgaatttatgaaattcctagccaaatggatggacctggagggcatcatcctgagtgaggtaacacattcacaaaggaactcacacaatatgtactcactgataagtggatattagcccaaaacctaggatacccaagatacaagatacaatttgctaaacacatgaaactcaagaaaaatgaagactgaagtgtggacactatgcccctccttagaagtgggaacaaaacacccttggcaggatttacagagacaaagtttggagctgagatgaaaggatggaccatgtagagactgccatatccagggatccaccccataatcagcatccaaacgctgacaccattgcatacactagcaagattttatcgaaaggacccagatgtagctgtctcttgtgagactatgccggggcctagcaaacacagaagtggatgctcagtcacctaatggatggatcacagggctcccaatggaggagctagagaaagtacccaaggagctaaagggatctgcaaccctataggtggaacaacattatgaactaaccagtaccctggagctcttgactctagctgcatatgtatcaaaagatggcctagtcggccatcactggaaagagaggcccattggacacgcaaaatttatatgccccagtacaggggaacgccagggccaaaaagggggagtgggtgggtaggggagtgggggtgggtgggtatgggggacttttggtatagcattggaaatgtaaatgagctaaatacctaattaaaaaaaaaaaaaaaaagatgcattggtttgactatccagatgcgaaacctacatatcggtagcaatgattgtgaagacaggaacatatgccacattaataatgaaaatgattttaaaatattgttaaaagtctaacaaaattctgctcttttgcagttgtagagagaaatggcctaagtgttattcagttatgaccttaagaaactataaactataaactataaactcttgctataagagaagtgcttgtgagtagtgatgcctttaattccagaactctggatctctgagttcaaagacaatgtataaaacctagtatagatagtgagttccaggccagccaaggcagtaatgtgcttctcttgttaagcatgatgatctgtgttcaatcttcacaagcaacattttaaataaataaataaagcaagctgagcatggtacaagcccagtgagagggagggagggggatggagacatgtgactgcctctggcttgtttgcctgctagcctaggctacttggagagctccaaccaaagagagacacagtcttaaaacatagggagatgctgtgtggtggtggcacacacctttgatgccagcacttgggagacaaaggtggaaggatcttggtgagtcaaggccagcctagtttacagtgacaaccagggctacatagagaaaccctgtctccaaaaaaaaagaaagaaagaaaaagagagaactcctaagatataacacccagaattaccctctagcctccatgcacacacacacacacacacacacacacacacacacacacacacacaagtaattagagtatgtgcacacacaataataataattatagcctaataatacataatatatagctacatgcataataataagaaagagctgcatccagtcagcctcagtcgaaatcagtagccttctttctagctcccttcgatgtacttaaagcatcttgctcaggctgtactagtgatatatcaaatatgaaatggatgtcctttgacttcatttggctatttgatttccttttaccctctacaaaataaaacctaagcatccaaagcccttagcatagctctttcctcattcccaggctagcttcttttttttttcttttttcttttttcttttttttcttttttctttttttttttttttttgcttttttttttttttttttttttttgctttgctttgctttgcttttgcattttatgtcctcgcagtcagttgcttagtgttgctcatttgtgccatcgtgtctcacaagtctggctttagtctgtgcccctcttctccagtcacatgctcccacctctctgtgtcagtctcacttaccctcgaaaccatccaggatatcgtcccatatgttcctgttgagtcatcttttgtatccagtgctttttaagtacctggaagtggcaggcacttgataaaggtagtggatacttaataaacaactctccaataccgtaattggtgccagtgaccagcaaagattccattgctactgtataacagcacaacagtccattctacaaaaaagaacatgaaatatggcaatcactaatctttgtaatgatatgagtcactctttctgtctactgattcatctaatttacccagaattcccttccgctgactatgcccatcctttaacatggagaccatggaatgctctcctatacaaaatgcttttgagaagtaaaatacttaaagaagtacggagcaaaagatgacagtgatccacagactaaataacccacacgctccttccagggttttcatgtgcacaatttaatgggctgaatttttcctcaccactggcactctccaggttctcaaaggagatcagggttgattttgtaaatagttgaagtggtgccgaaatcacttccttccaatcctgacgccagctctgtctcataggagcattgctctctgcaggccgggtgctagggcagaacaccagttctctcccagtcttgaaagccatcctgtggcagatgtcccactagggacagtttaagaggaaaagaagttggtactcaaagaagtcaagtaacctgcccaagagcatctctgtggtaagcatgaggagactgcactcacaagcagcctgcttccaggcctccctctgagtggctggagcacacatcctattgtgcacagcacaacaataaatgtgcattgcagtggctccatgtaaaccaccctttacctcggcatgcagcaaattaccatttacattacaaataagattaaaggagtcaacttatctacatttgatttttttttttttaactaaggccattttgagacccatagcactgtggtcaggcagtactaagtcctctaataggggtgttttaagtcaaaagcattgggcttgtgagctgcctaacccaagggcactggctgcttttgaggtgtggttccagcactcacaagggagtttatagccacttgttgccccaggtccaaagggtctgacgcccctcctctgggggagggtccctgcaccacacacaagcacatacataaataaaataacaaaccaagaatgctggagggaactaattcctctgtaactgtctcatctttgcaattacataggatgtttttccttttaactgtttttttcttttttcattagtgcatgataattgaacaaaagaaaaattaaaatcatagtgacatttctatatatctattcaatgtactttgaccacattcactctttcttccccaagtatttatgaaatagcttacgtttttgtgctttttttatacttggtggttttaatcagcacatctttccagaaaaaaaaaaaaaaaaaaaaaaaacccgctgtgtggnnnnnnnnnnnnnnnnnnnnttccacctaggactgagaactttctaggtctctctctctctctctctctctctctctctctctctctctctccctccctccctccctccctctccctcttcctcttcctcttcctctcccctctgttgtttcctcagaaaagctcacttcctttctggaattaatattgtttccaacacgttaagaaacaatctctgtctctctctctctctctctatctatctctctctctctctgtctctctgtctctgtctctctctctgtctctctctctctgtctctctctgtctctctctctctccttctctcttccccctccctctgtcctttcctctctccttcctttcctccctcccttccctctccccctcccttctgcttcctcggtagaagccgggaagcacaggactgaccagaagaaacagaaagaaccgcatcactttgactgactttatcttctatccgtagataatcacaccagagttgcacttttgtctttaattccgtttctggacacctcttttccattcagccaactgggtgagacaaagcccgtcggtgccctgagccgcagaactctggtcgggggctggctggctgtaaattgacgtggcatggaaattctccactaagttgcagcagctcacgagctcctcaaagatcgagcccagcctccgggagctggagctaaggctcagtaacagtaacgttaaagaagaatggataaaagtccccagctcctcgccttggacccgccgctttctttctggctatctgtcatttcgctgaaaaccaaatcaaagcagttagtctgtaactttgttttcgcagcttaaacaacaaaattgaccgcgcttgctcctccggctctcccctgcaatcttaactccttgcagactttgccatggggtgcggacttaggaagctggaagaccctgatgaaagcagccctggaaaaatattttctaccctgaagagaccgcaagtggaaacaaagacagaatttgcttatgaatacgccctgctggactttactttacaaggtactccttatttctattgtagctagtgtctgtctccaaaataagagaagactacgtttctgaagtgtggacctgtggagtcttaagctcttttccataatgaaattggtccatctaacaatgacgctttgtttcttaattatatttggggagattttgggttgtattttgttttgtgtgcttttttttttttttaacatggcttatatatactatacaaaattaagaaaactacttggaaatgttccttttatttttaaagcaaatgggacaaatgtttgatttctaggccaaattgctggagccttaatgacagcttgtgttttgaaaagatttgaaaggcagggactgtgggctatgggcagtgctacttgtatgcagttgtggaaaactccgccaaggcaattctgaggtggccagtgtgctgaattgtgtgttgctcatgtgataggtttgaccaaactaaaggttgaaagaaattagttgtttttggttttgttttaatgggggaaagtagcctacagaaggcactccctcggctgggtgctccgtccctaacagagaaactctgttccaaaaagttgaaaacacaaacaaacaagcccagatggcagctccagcaagggaagggagggaaggggctgaggtgcctcctcttgacccaagtctttgcctccctcctctctggaaaccctgaatactgcttcagagtccctgagacacaggacatagcagggtttaaagcgaactgcgtctgtaattatgatgtgctaaaaaaacaaagaaattaaatttagagaaatttgcttgctgaattttccaaatactagtattaagttcctattttaattctttgattctacagcccattagttaattgaaaactgtactgcgcatccaactagatgcttttactccctaccaccactgccgccttccccctgaaaacagtgcatctttgtgcacgaagcaagagcagcccatttttctttgttaaaaactgagctggccagcaagtaaaattcagagacacagaagatctgtacctgtgcttcgaacatattccccactttttttgatcaaagaatccaagtaaggacaaggctgccaaaagaagaaaagttaatattctcaatgttcttctttgttgtgtgaatttaaagtggattgagttaatgctgatggaaaagtagccaaaaagtcatgaatttttatatgcctttttaaaaagtcattcgggaaaattctttgagacagggagcttctacagtgtggttctcgtccttaccaatacagactggatagggcagaaacgcacagggtgggaaagcatgcctttcttgtgtatcccggaagctgtaggctagaaccattgtcttgtgcaccttaggatcctgaggcacagctcaccttagggctatagagcttcaagaagctaacatttttctgattcatgccatttcaaaacattagcacctccaacaaatttctatatatgtgattacctttgaatcaagaagatacacagcttttactcaacagtcattttggttttatcagaaacctttttctccatgaaaggagcataatttccaccttccactctagatgttgctgcgaaagggtaatttcaccgtaaagcacaggcatgggtttgatgtgcacatgcgcacactaaggcaggcgcatgtctttaggtagcatctgcttcctatttggtacaggcgcctggtctccggggcccatctcttcctagttctcccacatgttcttgtttggggtttttgtttaaccatttgttttggtcttgcctttgcgtttgcttcagaagccaggactctgtgtaccagcccaaccccgccccctcttccaggcgtagttagcctgcctctttcctccattctttgacagccacctgcctgccactccagagtctatgatagtgcgtctgggtgggctaacacatgccagccttctgctcggcactggccaacccttcctggaattgctgggaagagaactgaatggtggctgctcctagctgccagaccaccacacagtgagaaaccttggcggaaacaaaatggcctggtgacagctgtgtgtattcctcagttttgtttttgtttgttttttcccaaacagtagccatggaacacagaataaagtttaagaagggagagccttccaagtccctgtgttgtgttacagtttgtcttgaacaagttgtttctcactcagttctacctttctcccttccccaatcattgcatcgcaaattctgttgtactaactttcggtggtagtgtatgtgtcttagtcagggttttactgctgtgaacagacaccatgaccaaggcaagtcttacaaaggacaacatttaattggggctggcttacaggttcagaagttcagtccattatcatcaaggcagaaacatggcagcatccaggcagacatggggcagaaggaactgagagttctacatcttcatccaaaggcagacagtagaagactgacttccaggcagctaggatgagggtcttaaagcccacacccacagtgacatacctattccaacagggccacaccttcaaatagtgccactccctgggcagagcatattcaaagcaccacagcaactactgtagccaaatgaaatgtagttttcattcactgctcagtggttcagagcagcccctctgttatgggtacatgctctcgttactaccctctttccaccctctcaccaaatatccagtcggatgcaggggagtgctcagtcagcaaatgcttgttgtccaagcataaggaccggaggagtcttataaaactcaggtgtgtcgagtgacccctgctccagggagacaggcaggcagatgtctggagagtgctatccagcctcaccagtctgagtgccagactgcctgaagcctgcctgtctcaaaaaataaggtacaaagtgatcgtgggcaatgaccagtgtcaacctctgccctccacatgatgtacacacatgaacacatacactcgtgcacacacgcatgcacacacacatgcatgcacacacctgatccaaccagaatacaaagaatttaaattcccccatttcttctctcctctccattctcattaccactctccatagccattcatttcctctctgctttccctgccctctgtcttcagtggcttctttgtttgttgttgtttgtttgtgtttagtttgtgttttttgttttgtcagttgggaggatgtgatgtcttccagtcattccatacatctcaacaagaaaataatagcataatgattaggcacacaagactctagtccagtgattctcagccttcctaatgctgagaccctttaatatacttccttatgctgtgaccataaaatcatttttgttgctacttcctaactgtaattttgctactgttgtgaattataatgtaaatatctgacatgcaggatatctgatatgcgacctccccaaaggggttgcaacccacagtttgagaaccagtgttcttggcgtgggtcatgagtccttttaagctgctgtgcagatcccttaactgcaaacagggattctaacaatacttacatcagacagctgctttagatattaaaggaaatgacagaagattacccacaggggagtgttcactaaagctagctgctgctgtccctcctgtgagaacaaggctctatctctattccaaggctgggacggacctcatccctttcctttaaactcagttcttactcctctttgtattcatagctagaagtggtgatttgaggggcaactcaaataaagtcttcaaaagagggagtatgtggccagccaaagtgttctggcctgatccggggcacagctgtaaagagaataactcaaataacatgagtgagccaagagcacaggtttaatacagaaggagtcagttatgtaaagtattagagaaaattcaagaagaataggaatgtcgctgtgtgagaacgtactgaaagttaacaagagttaatatatggtcagaaatagagggttttttttaataaaaaatctagtcatgatagtgtatgcctataatcccaggtcttaggagtctaagacaggaagattttaagtttgaggccagcctgagctacagagcaagacctgtcagaaataaaaaagaggggggaggagatagaggtgaagggaagtaaaagtcaagttgtattttgtataactgtatcgatctaataaactccaggacacatgcccctggcgatcaaagggtttttaaatgttaaagtgctgctgggccggggaggggggggcgcagaactagtcgtaatgaaattgactggatcctcttcagcattgatatagtctctattctttcttttactaaactatataaggtgtttcattatgtttgaagtggtaacacagtccacctaagaagaataacaaacacagacaattgtggaaaagaatgccattctgagtctggagaggaagggatctctaataatagcaggcagctgacccacttttaaaactgtcaagaactggcagtgtgcctagttggtagtgtgtgcctagtatgaatgaagtttgggttcagttctctgcactggataaaacaaagtgtgaagaagacacgggcctgtaagcccagtactgtgcaagtggaggcagaaggatcgatcagcgggtgggtcaaagctgttgttgtctgcacagcaaattcgaggccagcctatggtacatgaggctctgactaaaaaacaaaccaagaaaacagacaatgccactcttagtccgtctgtgtacacactaaaaccgcccggttctgtgtatgtgaacagactaactctgcaagagctcctgtagcagggcctgggcaggaaacaggagtcacagcatcctttcacattgtgcctgccctgtgatgcagcctgggactgcagaggctctgccgtggacctgagtgggcaggtccaggaaggctcttcagaagtgcatcccactgcatcccagatgtaaaggatgagtgaggctcaggaaggcctctgtcctgaaagcttcaaccaccactacaagacagtaaggaaaagacagctcaataaaggaatagacaagaatctgaacagacaaatcagaaataatccaagtgaaagacatgtgaaactgcattccaatcatcggtgaccaagaacatccgtattacaaccactactacaaaacacccagaggaaataaaattttgaaaggttgctaatatcaggtgtcagtatagtgctataatcatttgaaaaacagttgatattttctacctataactgaagatatgcccagtgccgacatacaccatgtggtgcacaaggatgtccaagtcaagcaattgggaattcccaacccacaggcatgagtgaccactggactacagatatccactaatgcagggcagggagatgggggaataaagggcatgggagaaaacctgcgtcccatcagagttccggtgctctgggaggttggatgcattagactgctgcatgctttccacacggccccgggtgggtgtctggctgtgtgaagccacggaatcccagcttgcgggggaggggggtggacaaggggcagtcttaggtaccagattctcggcctcgagcatcccagacacctgctggacaccatggaagagctgagaacagaatagggtccccaggggcagctcagtcagctccggggccgaagggtggagagggcaggggggagagggaggcgctgggtggttcccacacaggcgagaggtccttggtccagtccatggctagagcgtaggaaggccttctggtgggaggttagacatggctccttaggagaaagcctatcccatcgttcaagcacagcgggccatgatggttttagagctttattttagaaaggcagggtgaaagagagaaggtagaaagagggagagaggctggccatggccacatggagagagggggaagggagagagagagggagggctagagagtaagaaaggtgagggcttaaagagatccaggaggggccaagcagctcctcttatagtgggctgggctatcaggtaactgtggggaggagcatacctggctatagtcaggtaactgtggaggtggagtctaaccagaatgtcagaagcttgggacattgtctacatgactgatagtcacggaattatggagttgggggctctgtggtttcagacacctgtctctgggaacgtggctcagtttctgtcccttgtagagttttctactgggtcaccggagcaagcctcattcaagcacaatagggtgcctatcacagccgcacacactaatggtttctgtaaaggaccaaactataacatattagtctttctgagccatgtggcctcagtcacacctgattgactctgcacaccatgctagagctgccaaaagggatacacagctaaactccacggcggtcctttgctgactgctcttacagtgcaatgagagcacaactttaactgtcacaggcaagtccagcactgtggggtatagagtgagatacctagtaaccaccgtatgatcccatttcatacggctcaagacatccatcaggtggcctgcccaggggcaggctgctcctttagcacatagtctatgcttgacactgcattgtagagactagggctgtgttcctggtctgcagcactaagggaagagcaaggagtaattactggacagtcaaggctcagtatggtggaaggatggaaccaaaattggaaaggatggaatgggaggtctcggaagagcaggccactttctcgatttttcattaaataattgttacctgggagttggtagttttaagtatgttctgtgcttgtttcctgtatatgttatacccaccatcagggtacagttgaaagtgtggatgggaatatggacggagataaagcaaacaaggcagaaagtcagggtgactggaggtgagaagcaggaggaattctgtggcctgagagaggcagcacagaaagtggagagaagctttcgtacgtgaaagagaaagtagacaaaggcaggtcacaagattcccaaaatgccatgagtctattgtcatgtgtccagtgccaagcaagttacaagcctctaattctagcacttgggagcctggtgcaaaataactggccccatgttcaaggccagcctggactccaaagaccctgcctcaaaatacaagtagaaagaaaagaaaaagaaaaactgccattatgttacttcatttaacaacatgagtgacttcagcagtggctagcttcactaataaacaaaggtcgaaatgctatttacattgtattccatttctcgatttcttaaaacttataatcctcttaacagccacatgctaagatactcagcggtctatcatagtctaaaccagtgattctcaacttgtgggtcttgaccctttcacaggggtcacatagcagtatatcctgggtaacagatatttgcattactattcacaacagtagtaaaattgcaagtataatgtagcaacaaaaataattttatggtcaccaccaccccacccccacccccaccccacacatgcgagactgtattaaaggactgaggtatcaggaagattcagagccatggtttggctgatctcatgtctggattcacaaatgttcaacaactgtggttcaaacaataacgttttccttcctatggcactggagtgtcccagtttccacctcatcctgcctgggttccagctcagcctcagaaattactaacaataagtcaatgtcctaatctctctccttgagttgccctatcaggcaatcagatccaccatgcagggtttgctggaatcgagaactggccatggcctgatcacataggacttggcacttataggagttaactctggtctacagttgctggggagagcatacaggtcgccaggccattgccccctttaaactatggcaaagttgctggctggagtttgcacattttgtttttacttaagataacaattttagatgcattccataaatttaagccagtcctcagaggtaagaaatgaaatatgtatttctcatagcactatgtcatcagggccgaacttttgagtgtttaacaattgcttgactttatggtggagtatggctttgtatcttttttagtaatttgggcttgtttgtttgttcgtttgtttgtttgtttgtttttaaggcctcatgctataagccagcctagcttgaaactcatttatgtaacacgggcagcttcagaacttgtggtcatcttcctgtgtcagcctcccacatgtagggatgacaagcatgaggcaccatgtccactgactggcatttaaagggtcactctttggagctttttaccaaaggagtaagaaaagcatcacagatacttcgtttttcggagctttgagaagagacaatgttgttcaaccctcaacatgttttaattgtagcaataaaagttcccttgctgtttgtataattttcaaaacagttacagactgcttcataacaatagccctgtaagatacagcaaggcttttacagatcatgtaacattaatttaccagtaaccagccacacccacagggccataaacaccatgtgttccttcttcccaacaccttgtgcagcactcaggcaagcaagaaagcatacagctgctgctcactgcctgtgctggcaatcgaccagaagccaccgcctcctcccccttaatcttgtgtgtctacagctctgatattactttcctacataaggacatcaaaccaaaggcttgtcctcaaaggctgggcctgtcatagatttgtgattactccactctgagtgcagttgaaaagtccttgctcagtgtgtcctgcgctgcccgcctcacagtgcgaacaattaggtttgaatacctaacagtcaacaccaactctgttgaaaatattcaggtggagggacgacatgaaaagaagttctccacaaagcttttgaatttgagatggagattgacaacaagacccctggtctacacacacatgcactcacacacacacacagacgcacatacatacacatatacacatgcatatacacaccaatatccacatatgcatgtgtacacacacatatacacacacatgcatttacatacacacctaatagtgactcctaccaagccagccagagacaaggccagctcagtaaagtctttggatggaagtcacactattgctcttcaccaaatcctgtcctagtttgtcatcccgttgatatagtaaataccatgattaaaaacaacctagaaagaagtgggtttatttcatcttatacttgcagtcatgacccatcattgagggaagtcgcagcaggtacccttagggagtgtcttagttaggattttactgctgtgaacagacaccatgaccaaggcaactcttataaaaaacaacatttaattggggctggcttacgggttcagaggttcagtccattatcatcaaggttggagcatggcattgtccaggtaggaaggtgcaggaggagctgagagttctgtcttcatctgaaggctgctagcagaatattgacttccaggcagctaggatgagggtcttaaagcccacctattccaacaaggccacaccttctaatagtgctcctccctgggctggacatatacaaaccatcacagggagttcccattaaacagcccagagaagcttataaacaagtaactgtaatacagcagtgtacacagtagaggaaggaataagtaacgtggggttggggacagagaaggcttattgtggtgagacagagtgacagacaggttcagaactctgaactgtcccatgtcaaagtgaagtgcacaagagggaggctggcaggaggcctggagatcctgcaggccacgctaacttctccgcttcctgccctattgccatgggagccattacatggctatagttttctttaaaatgatgtacaattgtcacctagttctaaagataagttcccattacatttcattctctggtcctaagaatttgttccacattgttgttcctcagctgctttcttaaaaaaaaaaacaaaaacaaaagtcagggtttgtagaccaaatgtttaaaacaagagtgaagccagatgggtcaggaagcctgccacacagacagacagacagacagacagacagacagacagactgggctgggtgtgtactcggagaccaggtgcttcttcaaaggtcaggactgtcctttgttctcatgtctattcatcatgatgaagaaaatattttagatggtaggatattagttgacatccaagagggactaaaacggaaggaaatgtatcggcatgactctctgtggagtgcctcgttttcgtttgagaagctggggtgagtgctcactgctgtggaactgttccatcacgtgagtgttagtgtgagggcgtggagacttcctctgacccttcttcctcatctgcgccttaaccttcttcctgtgctcaggcaatcagcaacagttctgcgctggactccactagcccgtgaaaagccagcccagcccttacttgcaatgaattgcatgttttcttactaatcagctccaggtctctttctggataattatccttattgtcctccataaaatgagaagtattaaacagagaatggagctatttaaatgaatacctctagaactgtggagacaggctctccagctgcgtactggctttgcttttaatcctgtagtcaacacaagtacgttcttagagagtttgggggggggggtgcagtaggggggtggagacttcaattacatggcaggggcttttttagtttattttggtttttgttttgttttgtttgtttgtttggttggttggttggttggttggtttggttttttaagacagggtttctctgtatagccctggctgtcctggaactcactctgtagaccaggctggcctcaaactcagaaatccgcctgcctctgcctcccaagtgctgggattaaaggcgtgcaccaccaccacctggcctacatggcagttttgcttttaaatttcatctatgtctagttctgttcttttctttaatgatttctgtctaagaaataaaatttctcccctttttaggttttaaacttatagaaactgtatctttaagaaatcatgcatctcttcctttaatcccagaactcaggaggcagaggcagtcagatctctatgagttcaaggccagcctggtttacagagcaagttcctgaacagccagggctacaaagagaaaaaacaaaaagagaatactaatgctactaaaaataataaaaagaaatcatgcatctcatcctagtcctaaaaactattggctctttaaattatcattttgatgtacatcattgatatcttttaaaggcaatatagtcacttagataaaacccttcatagtaaaggaacatgtgaggccgtctggttctggacatattggcaacattgtgtatccatcagttgggtcaatcacctttagctattgtctaaaacaggattagtctacagtcatactaccctgaacacatttaatctcacttgaaataggaaatatataacacatgttagtgtgtcttactcaaaattaagccatgtggctggctgtctctcctattcactaatattatcacatactgatagaaataaggtagaattcaatattaccaatgtgaaattttctcttcattcttggtatctcagcttcaacaaatccagacgtcatcaagataaattcagtcctggatatagttgccaaagtggaagactattatcttaagggctatgttgttggggccattcacccagttatacaacctgtggggcagcggaagcaccttccagcaagtcacctgtacagggcggtgctgtcccggctgaagctaaggtaagcagagcgcttgagaaaagtcacctcagagacagttaagaatgatgactttctttaatctttttttttaagatttatttattatatgtaagtacattgtagctgtcttcagacacctagaagagggcatcagatcacattacagatggttgtgagccaccacgtggttgctggcattttaactcaggaccttcagaagagcagtcggtgctcttaaccgctgagccatctctccagcccaatctcaagaagagagagagagagagagagagagagagagagagagccagaacagcccccacccccaacgttgtctttactctttggaggcaaataaataccaagggagggtgtgatcgagaaagggaaagtcgagagagattccaaggaacgcccattaaagctgggtgtacctggcaacttcctacaggaaccaccagaagatannnnnnnnnnnnnnnnnnnnaggtcctgaattcaattcccagaaaccacacggtggcttacaaccatctgtaatgggatctaatgccctcttctggtgtttctgaagatagctacagtgtactcatgtaaataaaataaataaaccttaaaaaaaaaaaaaaatggtagctggagcttagcctgcctgcatcctaaaactttcatagtagaagaaagcactacaatgccaagttctcataaattaaatagacatattggcaacgtttcccctgggattcttgggattgaagctatgctttctttaacaagcaaaacggggtctgaaggaccttttgggttgagtacatagttcagtggcacagcacctgtgcaaggccctgcgttagctccacaagaaaactgttgtcttagttactgttctaacttaggtgttgtgaagagacaccatgaccaaggcaactctttaaaagagaaaccatttaattagggagttgcttacgattatcacgtgatggaacacaggcagtggcagtgctggggctggagctgcaggcggaaggcagaagaagaaacactgccctctggcagtgacacccctacaccaacaaagccacacctaatccttcctaggtgatcaactgaagactaagcatgcaaatgtgttagcctaggagggccatgggcattcaaaccagcacagctgctttgagtctctgcaatgaagaatgaaaatggccataatgttgcctcaaattaatatattaaagagtcttgcacaattcttcatctttataaaaactgtcttagggacttctggctgggagaggtacggtgaatactggccttgcaagctttgaggttgagttcaatcccagaacacataaagggtggaaggagccagccccacagagctgtcctcagaccctacacacacactcacacacacacacatacacacacacacactcatacagacacacaataaagtgatacaatttttatctcaaaattgtgtttcctcttcacagtggtgggtgaacagcaatcttactacgtaaaggctaaagaaaatcataagaggggaaagggtgagagaacaggaaaatgggaaaaggaggggagaagagagagcaggcctttacattttcagatggtggactaggggtgcatcagtcaatcgagtgcttgcctagcatgtgggaagcattgggctcattttctggtaccacagaaaccagatataggctcacacgcctgtcatcctagcattcaggagggtcaaaaaataaagtcattctctactacatattaggtttgagacctgtctgagacacttaagttatctaagtattaaaaaaaaaaaaaaaaaagctgggtgatgttggtgtatgcctttagtcccagcactcaggaggcagagggaggcaagctctctgagtgtcaagaccagcctggtctacagagcaagtaccacaacagccaaggctacacagaaaaagcctgttctagggccggtggtttggcggggaaggggggagcgagcagaagttttggaggttttgttgttcactgctaaagatcaaatccaagatctcgcacattctaggcaggtactctaccactgagccatgtccccagccccttcagtctggtttattagaagcagtaactacctatgcatacacacacactcacacacacatacatactcattcacacacacaatccacacacagaatccacacacacatgcacaggcacacaagagtgtgtatggacttcagcctttactagaatataaatgtttccattccaaacattattaagcactttcatttttacacttttgacatttttatgctgtagtaatgctatgtcttgattacaaattccatcaactgtgtataaatgcccttcctgcttttggtgttagataggctcagcagtggctacaacctggcaaaagttagagctcagtaaagacaaagagggagagacagacgtgttgctctgcatttaaataggattgtcgtgctcctgtgcttacttgtgctcctgcccaacagcagtctccttaaattaggaattcaaatccctggaagcttaaattaaggaaatacaaggtaacagaaatctctgtgtgtctgcagcactctgagataagcatcaggaatgaaggaacaaagtgatggccttgaccttgcttttgagccgctcaaggctttcctatggacatagctggaaagcagcagcttgcctctgaccatgcctgttctccttgcagccccaagcattctgcagcaggcggacaaaggcgcgcaaggcttgtgatggaggagtgtccactaacttgtgaggcacaagcaaacgacgctgcaaaggaactcatggacaaggtactgcgtcgaaggaactgagagtgccttcctggggcagctaagaaacagtttcctttcttacctgaaaaccaccgggaagccaggcatggtagcacaggcctgtaatcctggggctgtgcaaggggaggggcgatgagtgcaaggctatcctcagctacaacacgagttcaaagccagcctgggctacatcatgagctccaggcagtctgggctacagaggaggatccagaagattaagaaaccaatggtgccatattccacggaattcaaaatgttgagcctgtgagccattactaaactgcattagccaggaccctatggaggaagagcatgagagtgagtgcactgaagggcttgtccggttggtttatgtagcagtctaaggaggagagcagtggcccccttcacactggggctgccttataccctgaagcagctccttccaaagaccggatgcctaaccagtctcagctggatgctgaaggcctggaagattctggaaaaccactagtcttcagtccctttttgaaggctgaagaaactgggctttaatgtcagacaaaactagcagcagcaatttgctgccagcatggtggactgaagcagcacaggagggcaagagggcagaaggccaaaaaaaaaaaaaagctttgtgcctcccgcttcctttagcggggctgccaccagaagcaccgcccacctttagggtgggtcttctcacttgggttaatctgagcaggaaaaggcttcacaggtgcgccatcaacttggctgttaatcggttccagatcctgtcaaagtgacaaccaagaatagacaggatcataaccaagcgccaggagagcagaccagagggagcaaaaggaagttcggctgcacagaagtttaaccgcaaatgtagcaatagggtatggcaagcatacgtgtattttagtcactgcttaggggagcaggtctgtggaaagtaaattccaaaagtttcagatgaaataaaaagattttctttttttaaaatatgaaaaaaaaccaaaaaagtagacacattcagttgtgaatggaggtgttagcaaaaaaattattttatttttttaagaaaaaataacttgaaaagagatggagggaaaattacaataatgtatactttgaaagctgcataaattaaaaaactgaacactaaatgtagattgaccaaaccagggaagatctatatgtccataaatattctaaattgatagaattttttgttgaaagtttttagtcacattgacattcttataagtccttttcttgttgttgttgttgttgttatcgtcgtcattgtctttggttttgtggggttttcgtttgttttgttttttaaaacagtttcactatgtagccttagctgttgtggttctcacccctcctaatgctgcagttccttaatacagtccctcatgttatgatgcccccaaccagaaaattatttcattgctacttcaaaactgtaattttgctactgctatgactcatataaatatttttagagatagaggtgtgccaaaggagatgcacaggttgattttttttttttttagaccaaactggccttgaactcacagggatcagcctagcagtgcctctgagtgctggaattaaatcagagcagcacacccaggtggcctttatttaatttaaatatatggtgtcaaggacccactccgctttttttcaggtaaagattgtgagactggagtgaggcatgcagactcacatcttccgacctttgagcacttaggatgctgagggcagggggaccctggcttccagagcagcctgagttacaaagagaaaaaggaaaggtggagtgtttctgttgctgccttcaggcggtgacctcacttgtggaggatcacctgtggactgcgactcacactaacagctgttaaccaggtctcttccagtttaggtacaggttaccattcagctgagggggaaggaaaaacccaggctttacagagtgcacaagctgctctctgctactattctggtttttatttgttatttttcctttctgggaataaatccactccagacagtttcttttgaaaacaaaaatgtagctactaagtgagtcttgatagagaaccaccagggtgcttgttttgaatctaacttcctggacaccgttgaagacctactgaaacaggaaagcctgctgttgcagcccctagagtagtggggttcttctctaagagaaaagcttcaggaagcatgcatgtgagataggccatcattgccccgggcatgcacaagagcaatgccaaagattatttttgaacagccactttgtgtgacgacttgattgttgaacagctaaacagttaaagtcaagctttaacaacatattaatgtctcctctatttttagtctgtgtccttgtctgtggtactgagggctgaacatgcacgcctcctgcatgctggcactctactctgggctagatcccacccctgaccattctgtttaatattcagtttgcatttttttttcaggattttaaagcaccccattaaaaaatatcagtcctccaaggcaggcaagacagaccaagatgtaaggcgtggctcccagagctgatgactagagttcagtctctggaactcagggcttagaagaggagaactaactcctacaagctgtcccttgagcagtacatgtgcatcacaccatgacacatacatgtgcacatgggcacgcacaagcacacagagatggatggatggatggatggatggatggatgatagatggatggatggatgatagatagatggttggatgatggatggatggatgaatagatagatgtaactaaaattatccatcctccaagtaaaaatggaaaagacatcaatatatttgttcacagacttccagggaaaacgaagcatatgttagagtaagaaagaaaggtttatttgaatgtctccactgaacccaatacctagagaggacactgactagaaatttacccttcctacttccagaacaccaagccctctcttacctccctcttttctcccagtgcacctgggagagggaaactgtggttacatataagtacccacacagtgtgaactctcggaatgtaactcttaggactgaggccagggtggcatagtcggggcgctggctcctggcagcctccacttccgagctggctcccagaagctccttcaactgcgttgctctgcagtttgttcagttctccctgcctttgaaaatcccatttcattctgtctgggtttccatgtaagtccggggcaacacttcaaacttttagtgtagatgtccacatcagtgaccatgaaaaaccaacactgctgagtcagacacagcagtgcatgcctctgatccctgcgctccggaggccgaggccagcctggggtacagagggagttccaggacagccagggctacacaagagaaaccctgtctcaaaaaaacaaacaaaaacaaaggcttcttcatttttgctttaaataagcaaaatttgtaaattaaatatgagtatttacaaagggagggaagaagacacagcctttgccctggggagtactgccagctgaacacaggagaagaacgatgccacccttaggtcctgggcattgtgagcttagaggagttgagatgataatatcacaagcatgagaatggagatcactattactaagatcccacattgtttcgccacttagacgctccctgcttcagagactgttgactgactgacaggctacatctaactctgtatttggcccagggcagtggcagacatcaggcaagggcagactagaaagcttcattacagatgcaatgaactggactcatgctttatatgtgaatattcataagaactgatcttctaacatctttcagaatcaacatcaaatagtgctgtatgttttttgcttttcaattaatgcattctttaatagtgaggttatatttgtttcagttattttgggagtgttctggaatagtctttaattttgctccaactggaaagatcattgttaatagcctccaaaacccatgctataaaattactaggtcttgccaaatgtggcagaattgcaggggaaaatacagtcctgtttttatcatttttttaaagatttatttatttattatatgtaagtacactgtagctgtcttcagacactccagaagagggtgtcagatctcattacggatggttgtgagccaccatgtggttactgggatttgaactcaggacctttggaagagcagtcactgctcttaaccgctgagccatctctccagccctgtttttatcatttttaagccagatcagttctgtttgataagtcctgctgacactgagacccaggttctcagttggcttctaggggtgcctcggttactagtcagtttattgtcttctaacggcctcctcagagactgaagcttagttggctgggtcatacatgggcttaccttggtcctgccatctctttaaaccccagattaatgccgctgctaaaagagggatgaagtttgttgggctggtctcccagtgctacttgccatctatgcactgtaatggagccagccacgatggagttgcagagtcggggctacacgtgagacaagattcacaagacaactgcaaaggctggaatgaaggagcccttggtggacacttgtctgaaagtggagtggaggaggaacctcagcatgaaagtggacagcatcagacagagaggaacagcagccccagctacgctaacccaaagcggggagaaggtaactgtgagcgggcaagggaggagaatgcattcttacattccccaactacacagttattttaaagaactacaggacaaagttagtgtcagaggatcataaggacattgaactaatctaaacttgtgggttgttaagttattatagccagaagtagggcaggccaatgtttcaggcattgggtctcccagtggcctagccagccagtcgccttcgccctcttctccaatgaaagcagtgacttgaccaaggaagcagcttggtaaacagcctgtgggaatttcagggcaggcctttcccccttggaaaccaagggactcgctttgatcctcattagaatctatgacaaagggacatgacaatgagccagttagtgtaacaatagtgcccacagccagaaataactgcagacaatagtcttgttcttctcggccaagtctcaagttttcccaagaaattgagtattttgctcttttatttttgactgtgtaaaagtttcctgacatctttgcaggattttttttttttttttgtaaaaccaaggagagctttttttttttttttaacatttttacaaatagttgttacatgtagggaaatgtcttttaagcaggggtacaaaacaaatcctagctttctctgtaagtcaagtattttgttgtttaaatacgattaaaaagaagagaaaacccaccacacttatgatttctagcagactttatccaaaggagtaaaaaaaaatataatgcaggttaattgctcaaatctgtgagagtttcacagctatgatttaggatttttttttttaatcaacatcaaaaaaaaaaaaaaaacctaaagactgtgtaaactgtaagttaccctgagctctggagacaaacgcctcaatttctttctataaaggagagagttgcagagcctctctcacgggttgtacaaagggaaacagcccacccagtacctggcacaaactccagcaagttgacagatgctcccatcctttgatcagccttggcccagtgtgcagcggacggagtctgggctttctggttctgagacactttcagtccccgtgcatccatttgagcagcatcttctagaggaagagcaggagatgaatttgcagcagtgtaccgttgaagttgtgctgggtcggcttctctttgggttttgattgtttgtttcttgttgttgctgttaagctgaggaccaaaccctgggccttgtgcttgaaaggcaagaactctaccactgagctaaatcctcaaccctgttaaagcaatcttttaaatggtaaaatatttatacagtaaataactgtacaccgaaaaactaaaagctttcttgagaacaataaataccaagttcatcctagcagttatttttagagattggaattggagaccatatactgctagatactacacagtaggctccgcactgtgtccatcgtcttatttctgtgaagaagtagttcaaggccagtgtgttgtaatgttactaactgtgttggggcggggagggcatagagatggcgtaggcagtaaagcacttgtcccacaaacgccaagtcttgagtctggtgtccatttacccaccaaagtcagatcagaagcgcatgcttacgccctcagtgctggacaggcggacacgacggccagatcagaagctcggagtcagttagagaccctcactcaaaaccgaaggtgcggaagagctgaagcagctgcagcgttaacctctggcctctgcatgtgtagttgcacccagacacaggacacaacacaagcatgcacacagatagacacacatgttttcaattgagcgtggctatttttatgattgtctatattcatttgtatgtttgtaatggctaacgaagaacaatctttaagaattttgaacagtaaggttatgttcttcccttttccctgaccgtctagccccagatggtaagctgtacatggtcttcaatgcttttgaggaagatgcggccagctgggcctatcaggaaggtgtcctgtccatgaaagtgacgcggaagggagctgtcatcagcgctctggacgccaactggctagaactaacgacattttactataagcaaggcttctctttaattgactcttttgtgtgctgggagacacctaaaggtgagttttacgttagtaatatatttatatgtaaataatctggatttggatcaacactgctgaaaatatttttcctttcaagttctatcactgtaaggatgggtataattctttttttaaaaaaaatatgttctcatcattgcacaactttaattgaaaagcttcgtccagtgagatggctcagcaggtagagggagctacagctcagcctcaagccccgggccccaccataggaggacaaacccagtgtcccaagtagagctccgaccccaacacggatacagagcacgcacgtgacatgcctgtgcccccatgttcatgcagcagacacgcagagacaaaatgcgtttggcttggtttggcttggtttggttttctgagacaggatttctgtgtgtagccctggcctcctggaactcactctgaaaactaggttgtcctcaaaatcacagagatcctcctgcttctgtctcccactgcctggctaattttttaaaatttttaagaaaagctttcctattgctggatggtggtggctcgccagttataatagtgagatcctgtcttttaaaacattagtaggggggctggagagacggctcagcggttaagagcactgactgctcttccagaggtcctgagtccaattctcagcaaccacatggtggctcacaaccacccgtaatgaaatctgactccctcctctggtgtgtctgaagacagctacagtgtacatagaatacattaaataaataaataaataaataaataaataaataaataaatctttaaaaaactagtaaaacaagcctggtgtggtggtgcacagctttaatcccagcactccataggcaaagacaggaggacctctgggttccaggccagtctgttctacagagctagttccaggacagccaggactacccagagaagcattgtcacaggaaagagacagagacagagacagagacagagacagagacagagacagagacagagcactttactatccttaagagcaaccctgagcaggtttagaattgtaatgttgtaatgtttgctatggcataggaaccattaagaatcggcacacaatggggggatcggccagcagaaattcccagatacagtgtactacaacagcccagtcaggaagcttggggtgccatcctgtagttagtatacatatttggtgtattcacccaatagttagtgaatttctagctctgtgtgtggagaataattcagagatataggcccattcttttgtttgtctttctctgtagctaaagtgtggtacaaaccagtcttatctatcccaaaaacaaagagttccccaaaaatgactttaacaaagattagtgttcaaagaaatgaaaaacaaatagtgggcaacctggggagaacgcaccccaggccgggatggctgcaaccttaacgctcagtgagactggagcaaaggctgaaggagaaaccaggcccagtatcatgagaccactctgtccttaaaccagtcttctggtgccttccccggtggcaacagatgacaggatggaacctagtatgtccaggagtcatgctctacaagatccttttaactaaagccaatgctaaaagccacgcccaaggagaggcacaggccgtgccctgcagagatgccgagcacacagcaggtgctcaataaatactcctccgtgttttctggttactggaaacttgagtgggcagacagaggctgtttcctagtgggggctgggggaaggagtgtgaaactcactttctgcagctttgagacattagtgagaacattggtgtggcaccgaggctccaaggcagcttattttctgatgactcgtccttcttggcatgcattatatgtcacactttcagtgcggatcatctttttggagactggttttgatccctcacgctgtttctctccctctcttctccatcttctctttgcagtggctaagttggaggcattccaactttcggttagtgacaaactgcctaagggaaagcaaaaatattcttttcagtctctctcaggcattcctgcctcaggcctggcctgataaaaataaaattagctacagcagctgcttagccagaaaccgtctggggctttagttcttagagccccagggcggcgctcccactttgtgcagctggaatgtcttttcagacattcttccacgccatctttgccaaacctctactcacccccctcagcctgcggtctggacactggagtgtgtgtcactaggactttccgaggacactgcagaggggaggctgaccagtgtccgagtctgtgagaaggcagtgtgaagaaggaggcagaactggactctttgttttgaatagttgatgcctgccatcccgagcacaccaggaaacaatgcagatttgctccgtcttgcttctgccatcatcacaaatattgtcagaaatcagacgactatggagaaatggaagcacaaaactcaaccctgtccagaagcttaaaatacattggctcacaaatcacacgggagaaaatgctttacacgcagtggtggaggggaagggataccctgaaaagtcacctacctcgctgggcatgtcagagctggcactaccactgtcagatccgcccctacagtggccttccacacacacactctcagccttttctgttgtgaatgctcccccggacacacacgaggagaatcatgctcagatatagtctgctcttctttatgtgtcacttcttagggctcccctttgattgtgtgtggattctcttcctttcaagatacttaaagaagtacagacggttgataaagtcaaaaggtatctatctttgtttatgctcaaaatctatgtatgtccttaggtgtgttatcatgtttgcaatatcatgtttcaagcaggctgtggacgtaacaaaatatgcacacacacacacattcaaaagtaagaaaaatattcagtgtatacccaacagaatcctgtgacaggagaaccagggaagagtctacaggaaagatgactagagactatcgagatagctcaaaggtcaaggtgctcgcctcctcctgaccacctgagttcagttttccagggcccacatgacagaaggagaaacagaaggagacagaaggagaaaattgactcctacaaattacccccagaatccacacatgtggaacatgcacacacccacacatatatgcacacacacacacacatacaagcatacatacaggaaggtaataaagtgcaactaagaggctataggggtctatagggagcaggcatgtaagagccaggatagactgttcaagacaaagagcacagagctagtgagaagaacctggaaggtctgagtggctggagcagggtatgcagggaaagatggctctagacaaggtgagaggtgggcagggctctgtttgtcaggaaagctgtggcaagagctggcatgtgtgttttccttgctctgtgctgatgctattctacaccttgcatggaataactcgttattacctacacaagcaatcctgtgtgaaaactgatacatgcagccactaaataatgtgcccacatttgcacaactaggaagcagaatggctagcaaggcgctgttaaaaataataataaaccatttttccttttccagttcttccccccagaatgacaactctgagactaaatattggctattaaatgcctagaccataagcgttggctcattccctaactacctggtaacttctctaacccatgtaaactattctgtctgtcacttggttagttacctctccttcacttggttagttacctctccttcacttggttagttacctctccttcacttggtgagttacctctccttcagtcctggccctctcgtctcctcagtgtgtcccttagcattgccctgagttcatctccttagccagctcccctctcatctccctcagctctccccagtctctcttttatctcttattatttcccagaatcctctctcttcctgccagtgtcccaccttctatttcctgcctcagctcattggccaatagcttgtttattgataggtgatcattataagagattctctctacaaggtagaatgtatgctcatttttcatttgttaattaactaatcaatccaattcactagttaattctgtggaagtgtgtggtgtgtgctcgccactgtacacatgtggcagtcaaaggacagcacatgagacgctgatcagttctctccttccacaatgtgagttttagggattaaaatcagatcccaggcttgtctgcaagtctccctaagcagagtatgtgatcttaaccatcatgcagaatagttatttcatttcattagttgaagattttaataaggagtcattgatctgatttgcatttttaaaggacctctctagccccattttgggacatggaccataaatggcgagagtagagaggctgatgtttagttactttgtgatgacaaaacaccataatcaaggaaactcattaaaaaaaaaaaaactatttttaccaggtggtggtgacagtagtgcacacaccttaatctcagcactcaggaggcagggacatgtagatcgctgtgagcttgaggccagcctgatctacaaagctagttccaagtcagccagggcttcacaaagaaatcttgtatgggaaaacaaaacaaacaaacaaaaaacaaaacatttacattaaagaaacctatgcttgctaaggctttcctacacagaagtaagaaatgcatttggctagtgttagtatccaggaaaagggttgggtggggagggaggaggggaacggaagaggggcaaggggagggggagagggagagagagaacagtgtgtcaggccagagcttctgatcatgtgcagcaccatgaattttgacacacttgaaacctggtcatcctgcctccatccatgcccacccccaccccacccccacccccacccccatagtgggcatgggctcattggctgggaagctctggggtttgccatatgaagggccaacgctgtaagcccagcagtgtgtgtgtgggtgtgggtggggggtgtctgcagtgactcctcccccattatctggaggtaagtacccatttatcacagccccacagccttccctgcaactcgtccttgctgctactcccagagctgctgccctagtgtgagcaccgagagagccacctggagtcttattctctagtccagataagccttgaactcagcaaaatccttcctccttagccacacaggcattagctaccccccacagccagattgtttgtagtcttttgtatatctggcttcctttgtacaacatagtttctttgaaattcactaacaatattacattacaatgagcctcgctttcatctctgtgtagtttgggttgtacttgctttcttttaaaccacagggtttagaaatgggtcagtggggtggttccctgagttaaggtttttgcagccatgcctgttggctgggatccacacaaggcttttagaagagaacttggcttcccggannnnnnnnnnnnnnnnnnnntcttagaacctccacaacacacacactggtaggtagatagatgggaagataggtagatggatagataaatagatacatgtaaatttttttaaatgtaaaacttatatttatgctaggtagcacatgccttttatcccagagacggatctctgattctgaggccagcatagtttaggaagctccaggctactctgtctccaaaagaaagaaaaagttacaagtacatatcttccagcattgaagtcagaaaaagtggttttcacactgtaaagttccgaaggaagcagaggggcaggctgtaactatgtaactactgcaatgttaaattagtttaaagttcacatccccgggattcttaaaaaagtcttgaaataagcagctctatttctcagctctaattaactagtgtctgtggtgctctggtgggggccggtcaaagataatggacagataatacaagtagaaaccagctccaactgtaaattatactttactgggcttctacgaactatttttatttttttaaaggtttatttatttattttatgtatgtgagtacacagtagctgtacagatggttgtgagcctttatgtgattgttgggaattgaatttttaggacctctgcttgctccggttggccccacttgctcagtccatgctcgctccagcccaaagatttatttattattatacataagtacactgtagctgacttcagatgtaccagaagagggcgtcagatctcattacaggtggttgtgagccaccatgtggtcgctgggatttgaactcaggacctttagaagaacattcagtgctcttacaggctgaaccatctcaccagccccaaactatctttttttttttttttaagtgcattctctgctgcgttctgcctctgccctaaatggaagtttaaaaaaaaaaaaaaaaaaaaaaaaagcaagctaggtgccaggtgtggtggcacaaacctttaatctcagtacttgggaggcagaggcaagtagacctttgaattccagtccagcctggtccacagagtgagttccaggacagcaagggctacacagagaaaccctgtctcaaaaaaaaaaaaaaaaaatctaccccctccaaaataaagcaaaaatcaatttgctttcaaatttcagcctcttaaaaaattaaaactatgacactaaaattagttttttctttatctttaaacttaaaatatcatctgaaaactgtcagcctttattaaacaggaattttcttagtacaacaaattatttttaatgaaggtggtgacaataaaataaaaattattgtgatggtaaagtagatgattagataaataaattcttgcttgataaattagaaaatatgttccttaataaaatataaacataaggtggagatgatacttggagcacattaagcgatattcatcacccagtcagggtggacaggctgagaatgatgtaagttaattggaatatttgggggagctgggagatggcttgtttggttggtttggttttggtttggtttggtttggtttggttttttcaagttgcaacaaaatgattctgtttcctataaccggcagggaaacttggatatgacaagtgctacataaaacccacagtgtttacctagcacaggaccatgagaaaaatgccttctgttgcaaaataagaggcaaaagaatttccattaaatcctttagttaaggccaggtggctattgtcaactattcaagaaaaatgcagaggggacttcccttaaaacttccttcccagcaggagtcctgggacaatgacttctgttagccgcttcctgtcgctgttgtggggacttgggaattgttcggtgtttatagcatgtgtgttacatgtgtgtacttgcgcaagcatttgtatgtggagactagaggtcaatgtccagttatctttctctgtcactctccaccttattttggggagcagagcctctccctgaacctggagattgtcattttgtctaggctgtcaaagtcatctgcctccccagggctctgcttttatgtggtgttgggcttagtttcctgcctatgcttgcaaggcaggcaggcgctgtacccactgagtcatcgcctaccctgtgcttagaggttctaaagctctggttttcatattatacctgcaagttcaagaatggacatttttcatgttcctgctggtttgtatgatacacatcagaagccaaccttttatttcaaggtgaaggtcatcccagatgcttcttgaatagacattccattcttgctcacattatttagctttgtttctgctgtggtagttccatgtgtgtgtttaattttaattcagtgaactataaacctgtctttacctatggagaaaaagcaaatcttaaaacagaaggactcaaccaaaatacttttgtttaagtgagtcttctctatagagatttttatttatgtttctgtgtctgtgcgtgtgcacacatgcccactcatgtctgtatatgtgcaagtccacatggaatccaaacgagggtataggattccctgaagctcaagctacaggcaattgtgagctacccagtgtgggttctgggaaccgaactccatcctctggaagcagcaagcacacttaactgctgagccatctctccagcccgtcttaatgtttcagaacagcatttcatgtatcctaggctggcctgcagcgtgttgtgtggctgaggataacctgaagctccatagcctcctggctcggcttcataaatcctgggattacacgtgggagccgctttgctcagcctctgtcactgatgctgggacatgcatcatgtaacctggggctacacacatgaggaatggcttccagtcgacaagattttctcccagcttgccaccacgacccttggaagcagctgtaatgtacatatgactcctctgaatgtatcctttccccacaggggaccagttacctaaatctttggaaggcttttttatctacgaagaagaaggatctggagtcccaggttctaacaggagaggaaacgacgccattgtggtggagcagtggacagtcattgaggtgagctgcagattccaacagtctgctttccttttgtgtgtgagttgatgaaagccccccatggccaggcgcatgctcagacacagatggtccactctcacagaaccctcaacaaagaaccgacagacttcctccatatgctgtacccatgttttcaaacatttcagcaaaatagcaaaagtaactgtcggcacctagacaaaagtaggttccccaagtctgcgagtctagccctagacaagatcccctggctcagaaatcctcactacaaaatgccttggcaactggaaaatgccttggcaactgactggaaagagtagtgtagccactcatccagcctttcaccgctgagcaaccaggatggcaggcttggttttaaccttatgaattgttttgttttgttttgttttgttttgagtaaaaacatccaaaggtttttctcttacataccaggccagatgtgtacacacagcactgtcatagtcagaggtgttgctgcggctggggttgcgcatttacaaattcagatgtcatcaactactgcccttgaagtagacagatccctttggacctctgttgaatgtacaaggtccttacagagaacgtctttcaaggaaacattttgactttctggccttacaaagaccataaaggacagaagtcattttcagagaaattgtaaagcccacggagggagctggggaaggtgggtggtgagtaaagctgcgagagaaaaccttcgccagcgcagcggagcaagaagagcggccactcggccagcctggcagcttccctcccacccccagcctcccatcccaggcccaaggccactgctgaacctacttagtaagcctcgtggatcggacgccctagggagcttttaaaatgcagatccccagctccgctcactttagaatctgagaaccgtggctttcccaggaccaaagaaaggccaatggccactgtccactcacttggttttaagaaggcaacagttgcagaaagtgacattttgggggccccatgggctccatgacactgttccactggacacaggcccccccccacacacacacacactacaacactcatcagcccctcatcctcgctactgtgtggccagctgtctttgctattagactgtaagctcttttgcttattcacacagggctgtgaaattaaaacagattacggccccctgctgcacaccctggctgagtttggatggcttctgacaagcgtgttgcctaccccgatattgagacatgacaggtaatgcccgtgcatccacctgcacagctcattctacaacctgctcatttgtgagtaaattaaccaatgctgacttaagcctacgagaaatgcttctagtgtggtttcatgggatttggaggtcagcaggtccagagggtgggtccctgtcattggtattgtcccaagggcctcaaatacacagacatttgagaaatctgcaggggcttctgaaaaacaagagttctctgtctgagccctgggtctacacacaccggtcgacacacccctcctcaacagcctgtgtgtctgtgccttcaaatcactttctggttgttctgcttgtgtttgagtcaaggtctctctctctctctctctctctctctctctctctctctctctctctgtagctctggctatcctggaacttactttgtagagcaggctggccttgaactcacagctatccacctgcctctgtgtcctgaatgctgggattaaaagtgtctgccacccccatgtccattttctccatctctttgatgttctcctaggtgcacttggcctgatacagctaggcacagaccttccgaagtgtggaaaccctgagtctctccttcctcttcccctgaggaaaagtatactccttccttgccattcatttggggatcccagctgggctcacttctaagtatttcccacagtgctctgaatgaatgggcaggacatctggcagccagcccacttctgctgagctccagtggtatttcctgtatccggtcaggaccagtttaggaatgacaggactaagcctaaggctggaactaaaatatattgtgatcccaaggataccttgaagtgggagtaggctgaaacatgaagccagactctggcattttgtgcccaaactgcatgagatcctaccctgcaaccagtgctctgaagactccctccaaacgctgtatgaggagtagctataaggttgctctaagacaaagagagggagaacggtgccaaaactttaccatcatacagatttctcctgcacccagatcctatgggcactatggaaccatggaagtgttcctcctaccgtctgagaggacttatctttatatgctatcagaatggcaaggggctcatggctcactaaatatgcattgggatggcccagtggttatgagtcctgctactcttccagagggcccaggtttgaatcctagtttccatatggtggctcagtttcagaggatctgacgccctcttctggcctccccaggtactgcattcatgcagtatatttaccttgcagacaaaacacccgtacacaaaaaataatttttaaatctttaacttgctaagggattttaaaggtaagttttaggacagtgttagagaataatactgtgtgtatcccaagtgtataggtgtcaaatgtgtctagcaacccttggaccagcttcacagtggttctaaaatatattcagttctggagactatatgctagggaaagggggagggggcttctttgcttctatccagtttcttattatttaatgttttataataaactgacactctccagagtgtcaaagaaaaagtctatctaccagtgaaaaacatctgtggcgtgcgtctgatgctgaagtcatttacaagagagagagtcgtgtttacatttcatgtggtgcaaacacatagccaggagcttgcattctggctggggccagccaagctcatgaattcagtaatttaatacagtaattaagcaacgaggaactttagtccataggttccaaggaagtattaaagaaaaaagatattatgactataaaaattaagcttgatgctctagtcctgaggagatcaaagagcagcttcactgttcagtaaatcctttcccaggagtctgctgctgcggctgctgctgggcagaagagagtaggaaacgttcccgagcagcagccgccctgtgcgggaaggcagacaatagctcctctcagatgccgggagctttggataacttgtttattttgttccttgggtccttctgagttgtcactgtgacaggacgcccaggaaggtgacttaaaggacagacttgctctgactcctcatcactgctctggtgtgaaggcagaaagaacactgctcaccagcaagccacgccctccttcctccagctatgcccctcctccctgagaacccattcagccatgaacttataagttgagggagttagaacccataagatccagtcagtctctgctggaccaccacctggagaagcgtcacatatgagccttttcgggagagacttcatatccaagacacaacaaatataaaacgaagatgaagtgtaatgctgttcactggtcaggaggatttttgagaaaaatcctcacctgaacacatttggctaataagtgaggggactctttgatatactaatatatgtgttataatataattataattatataataaataagaactattatctggggatctaaccctttagcagaaccaaattcctaagaggatgaaatcagttgtccaatcaggataggatggcctgttccaaatcaaaaggttccagaagagataaggtagacagtgccctgtgtgtaagatccgcactgagggtcttgagcgatagggcagcagaagtaagtagaatcataaagatgcatgtttacaaccagaaacacaagtgtcacactctttctttggaggccctgtgcccgaaaaatccatcactaagagccacagtctgttaacagtcccctccttggagacagtatttcaactgtctctgccaactgttgtctaagctgtacctgaatggctcacaggggatagtcccctcatgacaccacagcgtatgcacacactctcagcgctctctaggttgacgtcccgtttcctaggcagtggtacacccccaaggtttataacagaactctcaagaaagatcatgagatcacgcacatggtacagcacgaggctgtaagacgccatgcctataccctttcaaggttgttgcagccagcctgggaacaaggcagattcctttgttattgttggaataacactatcgtaccaggagcccaatcctttttctactagagaagtcaaggtgagagttaccaggaagttcttcaaaaaaaaataaacagttaaggaccacatccgctgagcttacagctaatattacagcctaaagtggggagggacctatagaaacagttcagtggttacgagcacttaatgcccctagagagaccctgggttcagttccaagaacccactgtaactccagctctaggggatccgatgccctttctgacctgcactgggaccaggtgtgcacgcggcacattcacataagtgcaggcagagaactcccaggagcctgtaatctcaagtgaaagtcatccccagctacatagggagttcaagaccagcctgggctccatggagccctgtctgaaaacaaagaaacagaaaacagcagcctggctctgctccaccctaacagctgtagcctccccaccggaccagtgaccacctcatccagaggcattcacttggtttacaggaccaggagtaaattcactattaatctgtgcccttaaaacaattgctgtgggtactggagaggactctgtggttaagagtactgaccactcttcaaggggaccagggttcagctcccagcacccacatggaggcatatgaccgccaaaacacccatacacataaagtagaatgaataacaaaatctcagaaaaaaaattgctgtgactacaacacataagaagtgcattaaacacaagtacatagactgcacctgtgcactcactccggccaacaagcggggttaggcatcgtggagcgcctcccgtgttgctccactgacgacttttgtctgtgtgtagcaatgtgggtgtgcatctgcctgctgtagtgtgctcaccctgtgatggtgctcctgaccagtccctcttagctcaagtagaaaccctggtgtgcacccactgggctttctgtaagtgcaagtgctaggctgggcatttgtttcacttggctacataaatgtgaagccaacccaaataggtggcttctggtttccttggaagcccagaggtagtggggtagggtattcctcttgctcaagcatgaattactgctgtactccaaaatggcaccattctgggaagtatgtagtgatctgtgtggttttcgggtgagttttgtttgttttgttttgtttgtgtttttagattgctgttgttgttgttgttgtgtttgtgtgtacacacctgaatatgcatctatgtgccatttgcatgcaggatcacctggaactgaagttaggcagttgtcacccaccgtctgggtgctgggagtcaaacccaagtgctctggatgagccacaagtgctcttaacgactgacccatctctccagcctcttttatttatagttttaattgggactgaagctaagaacattttcattccatggatcacctgggttctgtagtcaagtacctgttagaatcttttgctcacattaagtttatatttataaattatttaaagttagatgagagccttttatcagttatatattccaactttcaatatgtctgtaacttgtctttttttttttttttttttttttttggtttttggtttttgagacagggtttctctgtgtagccttggctgtcctggaactcattttgtagaccaggctggcctcgaactcagaaattcacctgcctctgcctcccaagtgctgggattaaaggcgtgcgccaccactgcccatcgtaacttgtcttttttctccctgctctctttatggtctgtcgctgtctgtgtctgtgtctgtgtctgtctctgtgtctgtctctgtctctgtctgactgtatctgtgtctgtctctgtctctgtctgtgtctgtgtctgtgtctgactgtgtctgtgtctgtatctgtctctgtctgactgtgtctgtgtctgtctgtgtctgtgtctgtgtctgactgtgtctgtgtctgtgtctgtgtctgtgtctgtctctgtctctgtctctgtctctgactgtatctgtgtctgtctctgtctgactgtgtctgtgtctgtctctgtctgtctgactgtgtctgtgtctgtctctgtgtctgtctctgtctgtctgactgtgtctgtgtctgtctctgtgtctgtctctgtctctgtctgactgtatctgtgtctgtgtctgtctctgtctctgtctgtgtctgtgtctgtgtctgactgtgtctgtgtctgtatctgtctctgtctgactgtgtctgtgtctgtgtctgtctgtgtctgtgtctgtgactgtctgtgtctgtgtctgtctgtgtctgtgtctgtgtctgtctgtgtctgtgtctgtctgtgtctgtgtctgtgtctgtctgtgtctgtgtctgtgtctgtgtctgtgtctgtgtctgtgtctgtgtctgtgtctgtgtcctgggccctcaggcatgcttaggaaagactgcagcacccagctccatgatatcccacaaaaataatttcaaattttaagtatccccgaaggcattatcaagctatatttaggacttttcagtttgaaagtttttgatggtaatgttattttgctttcttatgtttatattaaacatgctgtttacctttgtgcaaccctgaattcattggagtttgttttaagacatagcctttgctgtcctaaaactcactatgcagagcagactagccttgaactcacagaaatttgcctgcctctgcctcccaagtgctagggttaaggcttatgccagtttcactggaatttcagagcaaggctttagtggctcatttttgatatggtgtttaaatgccacaggtcatgaattttctttgcctcttctcctgacatactaacatcagaacctgtaagttcaagcatctaattgccttgtggtgacagggtagaaacttgtttttatcttcctcattattctccattacaatgtactctgcatattataaactaaaatcataactaaatgagaatacagactttttcaaaacagtctaaatgtattatgaagcattaggatcaaaaaggctctcacttctgcagccagagcctctctggggtcatccagccttggccagaagggttcgggtattggggaaagagttagaagtagaaggtcaacagactgttttcattctgacctgggttcagactggccccatcctctaattggttggagagaacccactgtgagcccacctacctgccttggccatgcttctcatccaggcctggttctctgctgtatttgtctacctacagcactgcccagaaatctttcttctttctcctatgaactctctctcccttgaattttctctctgaaagatattcttgattgatattttttctttttataaaagttattttgcactccaccctacattgtactaagtggatagagaactgagtgtttatctttctatctatttgttcatgttatgtatatgagtactttacctgcatatctgtctgcacaccagacctgcaaatcctctacagaaacaagaggttgtgagccaccatgtgggctctgggaattgaacccaggtcctctgcaagaacagcaggtactcttaagcactgagctacctctccagctccaagttacacacttgtatctcttttagtggctacacagaggaagactctggcttatctctcccaggtcttaaacagtgtcgagcataaagaccataggtgttggtgctgtaacagggcttggatttgaacccaggaactatgtggttcccaagtcaagtctttttccagtgtagcctgtgactcccaaacactgacccagtccagtctccatgctgatccctccttatagtccctcacaatttgtccccaaaagttacaccatgcaaagcattttgttctgacagaagatacgttcaaactgaaatgaaactggactctaagaagtcttttaacaataaaactgtagccatctctttctagcgtcctaggggaagatttctaatttccaagttagtggcacccatctgtttggaacgctctgctaaatgtcctgctgaccgctccctctccgtgtagggccagagcttcacccccattcagcttccagagacaaagcacagaatccactgcagcctatagggaaggggtttgtcgggcttctttgcatgataaaagttgttagtgagcagctttagctactacactcgccctaccctcccctcccannnnnnnnnnnnnnnnnnnnacagcgacaggaagcggctaacagaagtcattgtcccaggactcctgctgggaaggaagttttaagggaagtcccctctgcatttttcttgaatagttgacaatagccacttggctttaactaaaggatttaatggaaacacccaccccccacccaccccgcaagccctaggaggcagggaagctcttgagaggctctgccacccagatgacagctaaaaaaggcgaatactgagtggagtggccagtcacaaagccgcctgtcaatggaactggctggggctgaaccatccctctcagtggaaaatataagaaaagtccccatgtgtagctccccaaactgctccctagtttgataatgcataccaagaggcttacgtcatccttcctgacctaataatttcattcctgataattcatctcaaggaaataatccataagaggaagtatatatgcgtgtgtggacatattcttatctataaacataatagtgtgtgtgtgtgtgtgtgtgtgtacatacatataaaatagcatgatttagaactagtaaaaaacttattctctaaaacataagggaagacaataccttctggtgtcttcgttctctgaagatcctggacctgcattaaaactatcattacacacacaaggaataaaggaaatataaatacatggtggtcacaggtcacacaggaaaaaggctggctggtgctgagaaccagagaggaagcaaaaacataaagatcattttctgaaactggtttcatgaaattatattttttgatatattttgaggtttgggggtttcccggggggagttataataactatattgttttacaagagttttgaattaccttaaacttttttattatatttatgtgtacatatatgtctgtgtgaatgaatgccacatgtgtgcaggtgcccatggaggagagaagacgtcagacccctcaggctggaggcacaggtgattttttaggcagctgatatgggtgctgggagatgaactcaggtcctctgtgagacgacctcccctttttaaaaggtctttaggtttattttaagatgtgtgagtgtttcccctgcacatatgtgtatcatgtacatgtatgccctcagagcccagaagggggcatcagatcctctagaactgaagctacaggcagttgtaagatgtcatgtctgggttgggaattgaaccccatcctctggaagagcaaccgctgcttctaactgctccgcccctctctgtccgcagcagtatccacgcttaatctttgagttaaccctccaacttgttgtttagttcatttttgtatgaactatgtctggatatttagcctgcatacttgtctgtgcaccgtgtgagtgcctgatgccaatgggaaccaaaagatggcattggacccctggaactggagttacagccacagtgagccaccatgtgggtgccgagaatcaaacccaggtcctctagaagaaccacaagtgctctaaaccactgagtgatctctccaacgccccttccccacacccattattttttaataagctttgtttgtttgtttgtttgtttgtttgtttgtttgagacagggtttctctgtgtagccctggctgtcctggaactcactttgtagaccaggctggcctcaaactcagaaatctgcctgcctctgcctcccaagtgctgggattaaagacgtgcgccaccatgcccggcattttaataagctttcttgtttttgatttttccaatgtaatttatagagctgtatttcataattattttgggatcagaagattaccccacaaaggatatatgtgggccaacctagttaaatatggaaaaaattacaaattcactgggacaaagtataatgacgcatgtacatgaaaatgctataatgaaatccatttgctgctatcctaactttagaaagtaattaaaatttctgtaggattaaaagaacattcctaattcacaaatactaatgtcactattttaactttcagtgaagggaatttggctaccaagcaagtcgtatttctccaaaggccggttacgtggaactcagctgctcaaaccccagaagtgagtacaaatcaccaatgttcactttctgaataagacacgatagtaaagcatttaaccctcacactctctccagcggtctaaaagtgagttcaggtcaggacactcagactcagcgtggaaacagtctcctgcagaaggatgcaaaaaagaagttgactggttcccccaaaacccattgcaagaggaggaaactgaccccctaaattgtcttctggcccacacacatgtcactggcctgcgtgaacccgcactctcacacacacatactacatacaccaattagtaataaaataaaaattgtaatcgttttttaaaagaaaggatgacacagttccaaagactattaaaatatgccgtcccaacacacagtacgttgacataaggaccattttgagcttcaggcaactaagaaagaacagacccaggaagtttctgcccctttccaacaaagaatggcctctatgccaccatgtagaggtagcaggttcccagtccacttaagcatctgctctccctggcggaaagagactgacaattggaaaggattttctctgacttgaatctgcaaagacaaaccttagtgaaattgcctgctcgtcatcccctggaggctctgacgctgccttccttgccagtcccttgctcccagcctctcagcctctcacacggctgtgccgagttcagatttccacaccgcgccatctccttgactttttcttcttttctacaaagtctctgtgtgcatacaaaataaatctgtgctgctcacctgtcctctgccactctagtccccagcctcagctaccgatcctacggtagagggaaaggggcgtcctccattattcttctaagttttgtgagtcccaagtttctgagtttttaaaaatacatacatttttggttatcttgacctctgacaacatgcaacacatcgatattatctcagtacagtcgcaagctgacactgaccaggctttttttgtttgtttaatggggaagggagttggacagggtgtttctgtgtagccctgtagccatggctgtcctgggactcactttgtagaccgtgccagacttgaactcatggagactgacctgcctgtgcgtcccgagttctgggattaaaggcgtgcgctctcatgcctgcatgtctgctttttactgaaggggacactgagcatggggctccttactcgaggttttgaagctagaacaaggttcttggactggaggaaaactgtattgataaccatagggccctcacacacccatagtgtacgcaatttagctgtgctatgttaattctggagttgactggctgcatacataagtagattgagaggtagggacgtggaccagaaggtaggaggtaggggaggagtgtcatcacttgtgagcagtgtgcccctcacctcacggaggacgaccctggctcgtgagtttattatggagtattctgtcaagaattttaacattctccaaatggtcctcaagtttttcggaagggccatgctcatttgctccccagaatggtcaagctgtcagtctcaaacctagaaatgttcgcccttctgtccctcctgcgggaatgctgggagcacctgcctctgcagccacacacatctgtgaagtgagctgcaccccagccccattttctttaaggcatcaaaaatcatttatattagtaaaactagaagatgtttaggatagacattaggggggactgtccatgaagttaggaccgatctcagatataatagcaaaaccatgatctattagaagtcgataagttagccaggcggtggtggtacacatctttaatccaatgcactcaggagctagcagcaagcagatctctgtgagtttgaggacagcttggtatacagaaagtgagttccaggacagccagagctacagagagaaaccctgtctccgaaaaaacaaagttggtaaattagatttcatcaaaattaaaagcctgtgccacatgacttacaccactaaaagaatgaaaagataagccacagagcacagaaaccttagctatcacatcagtaacaatggactgtatcgggaatacatcaagaatctcaaatatcaacagtaagaaaataacacagatatcaatgaggatatgttcacaagaaataaatacacaaaaagatgctttaattattagttatggcgagatgccaccatgcacatattacaaaagtaaactcttaaatcagacagtaaccaagagctggcaagcaaagcagtcatctctgggagggatgtgagcaaccagcagtctagaagatgctcaggccacttcttaggactgtaactgcacacgcatggctcagcaatccctcctgggtgtttatgttaggaaaacacacatgtgtgtgcacaaatgtgtgcgcacacagtgtatacacaaatatttatagttatcctagtcataattgtccaacgcagaagaaagccgatgtcttcaatatgtggatggataaacaatgatggcacagtcttgcaattaagtactactcagaataagaaatgagctgcagatgtgaacagtaacttagatggatctcatctgttaggctgagttaaaggagccagtatccaaaggctacactgtatcattccatttacatcacagcctgcattaggtgaaccctgcaacaggaggatgtacaggaaagactgggagacgacagaactgctgtagtgtttgttaagtctatgttagttaaagcccataaaagcgtatacccaaatgtcagttttacagttcaggcactttaaaacaaaatcccaggcctagtgaaatgggaagtaaaggtgcttgcttccaagcctgacagaccatctgtgtttgatttcccaggacacacatggcctgagaaggaaactgactcccaaaagctgtcctctgacctttactcaactgctgtggcatacacgcaagggtgcacgtatatgtatgcaacggtgcacacacacacacacacacacacacacacacacacacgaggaaaatgaaattccacactgggcattgtggcacgtgcctatagtcctagtgtcctgctttgctttctgtttctgtggggaaagactactaaccaaaaccaacttagaggaggaaagtgtttatttggcttacacttccataacagcccattgctgggagaacttcctgctggagctcaaagaggagctaggaactagggtctgaagtagagatcacagacaaacactggctggctccctctggcttgctcagctgccttccttatatgatgcatgccctcatgcccagtaatggcacctcccacatggactggtcctcccacattaattaacaactaaggaaattccctctcagaccacctacagaccaaccccatgaaggcaattcctcagttgagggtctctcttcccagttgtctcaagttgacaattgaagctacccatgacacccaactccttgtcaattttgacacacaaacatgtcactttaaaccataacctttcccttcttgtttgtcctccagatcatgttaatagtaatatcacaatataaaatacaacacaactttgaaaatcccacagtataagaaaatcccaccatttagccaggtgtgatggcatacatacgcctttaatcccagcactcaggatgcagatgggtaagtctctgagcttgattgaggccagcctgggctacaaattgaatttcaggacagtcaaggctacatagtgagaccttgtcttgaaacaaataaacaaaaacaaaaagcaaatgatctaacttaaaaagttcaatgtttctggggctagagaggtggctcagcacctaagagcacttgctgttcttccagaggacccaggttcaattcccagcgcccacatggttgttagtcatttgtaactccagtactagggagtcggactctctcttctgactcctcaggccccaggtctgcacatgatacacagacatacaaaacacctacacacataaaataaaataatatctctctctctctctctcctctctctctctcttgtagaaactcactccatagtactggctgtccacagaatcactatgtagaccaggctgacctcaaactcagagatccacctgcctctgcttcctgagaactgggactgaaggcctacaccacacatctggcttcactgcctctttaaaatatccagtctcttaacttgaactccagtaacataaaattgagttaaatacttttagtccaaaaaagaaccagggcacagttactatcagatcagagcaaaaacaaaacccaacataataaggttcaacatctcccagctactccaagagatggagacaggagaatcattttgagcctgggagcttgagactagcctaagaaacagaatgagatccccatctttaataaataagagaggggctagagagatggttagaagggtaagaatgctagctgctcttagagaggacctgggttcaattccagttcccagcacccacgtggcagctcacatctgtaactcctgtctcaggggaatttgacgccatcttctggcctccctgggtactgcacacacatagtaaacacacacatgcaggcaacacacacacatatataagtttaaaaaatttaagtaaaagaaagaagatttcagaacgtttgctttataaattgcacagattacatttcccatgctgtattcttcatgaagcctttctttgggcgtgggcttcttggtgcaatgactccactaagctcagttcttctttctgtttctcaatcctattcttattgtcatgttttggacagatgcctccaaataggttccaggaagtgatagctctgctggaggcggggagggattctgatcaaaagctggagggcagacctatagtcctagaccttggagggtggaggcaggaggatcaggatttcaaggctgctcaaaaccccagctcaaaagcaaaacaaaataagacaaacaaacaaaaaaggatttttgacctccatcagctaaattttccattaatgttttttgtaaaatttttcttcttaaatttttgtttcttttgaaaagttaaataaaactcatagggttttaattatctaaaaatgtctatttcaattttttaaaaattctgcccatatcatttataagaaacaaagggccacttaaaagtatttgccttctgggcctaaggagatgcctctatggttcagagcactggctgagaactccagagaactcgggttcaggctccagctcatgaccctgtcacctccatgtctgcaacatggactctgcaacgcctgcacgcagatgcgcagaaacatagttctaacataatggtttttaaggcagatttattgagaagctgctctcaggcaagttcattggccccaaggatagaggccagggaagtcactgtggggactgggggttgggagagaatgagataaagggcatgctagaagagagagaaggaggggatgaaggagagggagagagaagggagaagaggggagaaagagagaaagagacagagagacagagagcactctggattatatagggaagagtcctaaaataatttttaaaaactctttaaaagcatttgtctccacaagctcagagagcatgggaccccgttcatagaaggctcagaggttgacagcaaactggaaaggactctgaggggcttgaagcaggagcgacacagagagcgcctggggcccctccaggaccccatccctttataaaatatagatattagcgcaggccacagggccctcaggctttgctttgagaacctatctaaacgtgtctggcactgtgtctggcagtatgagaggttgtaatcactttcacagaatgctcttctttcaacagcagattctgctaactatataaagaggcagaagaaaagcccaggaacaccaagtggtccagtcctgtatctcctctaactaaaacgaccatcagctgtaatacagaaatgtggtttgctgatgttccagagcatacacacacctagggagaaacgattatctaattaagtggagggcatcgagcacctatttgcttttaaattttctacatgtttggaacttttcataattataaagttgggggaaattaagtgaaaagcattagctatcaagaacatttttttcatgccgactagttagtaaataactacttactaagctgttccaacgacagtctagatggccagcaaggtggcttagaggtaaaggcgtttgctgccaaatctgtcagcttgagctctgtccctgaaatccgtggagtaaagagaaagggccacgcctacatgtcttccacatggacgccatggcacacacaacataaataaacaaaccgacccccgtaagcatcgaaatccacataggagatgactcccgtaatacttaaaggtgggcaggcactcaggatggggtgggggtggggccatgggctctcccctcaggagcctaagctcctcagccagttggtgcaatgtagaggaaattggaattcccagtttgtgcctcgggcaatgactttctcccgaagtcacatcttctgtggctttgacctgaactgctctatctgtccacatccacttccaaaggaggctggagatgtggtctgtgtcaataccacgtgcttgaacactgccggaagttggcaggagaaagttctgtggtggtgcgtgcctttaatcccagcactcgggaggcagaggcaggtggatttctgagttccaggccagcctggtctacaaagtgagttccaggacagccagggctatacagagaaaccctgtctcgaaaaaccaaaaaaaaaaaaaaaaaaaaaaaaagaaaagaaaagaaaagaaaaacaaagagattgtcccctggaagacaggcagtgttttggtttggtttggtatttgcagtgtggatagatttttatttgaattagtttttaagaggtacatacaatttttaaagatttatttatttatttattttatgtgtgtgagtgttttgcttgcatgtatgtatgtgcacgcctcatgccaggaaagccagcagaggacatccttggaactagagttacagacatttgtgtgccaccacatgggaccaaccacataggaaccaaaccctggtcctcgtgtgtgtgtgtacagtgtgtacagtgtgatgtttcaatgcacatatacatcatataatttttaaatcaagttagcatgcctaccttttcaaatatttatcacttatttatggtgaaaacgttgaaatctagtatacacagtcacccaacaaggccacagcagaccagaacttcctaccctaacttagcttgtgtcaaacctcccccatcctttccccaccccaccccaccccacccccactctctcaagcttctggtagacactgttcttcctgtaattcctatgagatgaactccccatggtctatgtgtcctgtcgttttgagcctggctcgtttccctgagcacagtggcaggtggaagagtgtcgtctcctgagtggataactcagcaggtgatatttctactcagagcatggagtgcagatactcattaacttcattcctccagccctacccaggagtgcgatggctggttcacagggtagctgtctttcagtgttgcatattattttccatgatggccacactagctgtggtggtttgaataagaatgtagactccccacaccccatagagtcatgttaaacgcttatggagtagcactaggaggtgtggccttgttggaggaagtgtgtcattgggggtgggctttgggggtttcaattgcttaggccaggcccagtgtctgtctctctctgttgcctgtcaatctggatgtagaactctcaactacatctccagccaccatgtgtacctgagtgccaccatgcttcccaccatgaggataatggactaaacctctgaactgtaagccagccccaagtaaatgttgtcctttataagaattattgtgatcatggtgtctctttacagcaatggaaaccctgactaagacactaacctacattcctaacgtaattcttttgtttatattaaaacactggcaatggaaagggatgtcctaaagtcaacaggcctgtcacttgagctgcctatgtatcttaatgggtgcagcatgatttagaataatccaggaggcaagcttccagacatgcctgtgagaaattagctagattaggttacctctgggcgtgcccatgagaaatcacctacattagattaactggggtgggaagacagactgtggtttcaaaggtatgacccccatagactcacgtgtttgaatgcttggcccataggcatggcactagaaggaggtggggccttggagttggtgtggtcttgttggaggaagtgtgtcactgtggaggcaggctttgaggtcatatatgctcaagctgtgcctagtgtggacatagtctccttctgctgcttgtgggtcaaggtgtagaactctctgctcctctagcacctgcatgctgtcgtgtttcctaccatcatggactgagcctctgaaacagtaaacagccccagttaaatgctttcttttataagagtggccatagtcatggtgtctgttcacagcagggaaaccctaaggcacagccccaccctgaaagtgggtcctgaactgaagagaaggcagaaagagagctgaccacagcattcatgattctgcttcccaactgtggactctgatcttttcctcatcatgacaaactgtaccctcaaacgcgagacaaaagaaaccaggccggagctgcttttgtctggtattttgacactgcatcaagaaagacactaggggctggtgagatggctcagcggttaagagtaccgactgctcttccaaaggccctgagttcaaatcccagcaaccacatggtggcacacaaccatctgtaacgaaatctcatgccctcttctggagtgtctgaagacagctacagtagtgtacttatatgtaataaataaataaattataaaaaaaaaaagacactaataggatggaccagtcccttttcttttaaacaagagtgacacattaggtatttgttagggtggcactgggtctgcatccaagccagcatcattccctcccaccttgtagagaaagtgtcagaaagaagcagggattaactctagctgcatatgtatcaaaagatggcctagtcggccatcactgcaaagagaggcccattggacacgcaaactttatatgccccagtacaggggaacgccagggccaaaaagggggagtgggtgggtaggggagtgggggtgggtgggtatgggggacttttggtatagcattggaaatgtaaatgagctaaatacctaataaaaatggaaaaaaaaaggcagggttataaataaaatgccatgagctaattccattaggataagaaagcagggttggaacaaatttataatcaaggaaaatatcccttctatgttaactctgagaccactatctggtaattaaaggtcataaacttggaatggactatttattgtagatacaaagacaaaaatacaatattgattaatttatctatacaaaactactaagtaggcagatcatttgtctcttgacaaagccatgctaacttgtgaattaaaaattattgctttaaacttatagtgaaattatggttctaggaacagataatgaatgtttagtcaaacactagtcttaatggaaagaaatgtaaacaattctgctgttattccttacatcttactgatctgtgactttaattattgccttaaaattattattaacttattggaatgtaaaagtatttagaaaatcatgtaatcaattatcctgctgtgacgactttatctgatagttgtataattttttagagacagtatatatactgaaaacaaaaaataaaggttgttggaacttaaaaaaaaaaaaaaagaagaagaagcagggaaggccatgggtgggcctgggaagtcacagggaactgcagggtagggctaggtgggaaatgagccacacacaaacgtgggctgtgctttgtgagccacttgtatgcagaaagagagaaagacagagagggggaggaagggagggaaggggagggagggagggagagtggggggaggagacaaaatatgtcaaagttccaacagtagcgttttgtggaggtgggatgggctttctttttttctttgttctaccaggctctctagagtgtgtgtgcatgtgtgtgtgtgtgtgtgtgtgtgtgtgtgtgtgtgtgtgtgtactattctgtaacagaaagagttttatttaggaaacacacgccttgcttcactgatctactcttgtttttgtaaatgcaatgagtgtactgtgaaaagcacaagacagatggcaccagtgcccatggggcaggacactccgtggcctctccccttcacggggacccctgaagaatgggggactaaagtgaatggtcttccaggattggatgggcttcagactccaacgttttgaggaaatcacaagttggctgtaaattgattgtaaaaaacatttcacatgggtgaggttgtgtgagaagcaatatcattgcgaaagcgtattatcaaacccctagtcttctgacaagcaaaggtgcgtgttctgaagtgcgttaggatacagtgctggctgttttatcaggtagctgtaaagtttaactttacaactgatagccatttacttattaacagttatctaaaagtaaattactatgaatagcatatattaaagaatattctgtttgtttttttaaaggaaattctcatggccgtgagagctggcctctgttatctgacacacaatagtgtattgcaaaagtcacctttgtccctgttgctactgagggctccagggctccctgtgtgagtcagactggaaggttgaggacaagctcaggggatctttgtgcccatgggaaaggctcccactagccaggcttgaggaagtctgcccagtagtgctgtccagacctgtcactgaccagggcatcgctctcaagcctggcacctatctgagagggcctctcaggccccactttgagaaatcagctcaatgcatttttagctggaataaaggacaagggtcaaaggtccagtttttacatttggtgcagcaagggtgtgccaaatggagatgggagcaagaaacttttgccaacaagagtagtattttctaagagtttcataacttcagctttgtcccacagtaaagtgtaatcttagttcctgactaacactaaagtgaatgtgggtaatttgaaagaattctgtaactattagtttggtttttgaatccttgctcagccttacagagctgaggttctgtgattggatcccgagacacactggcagtgatagttcagcaatcccgcagcagcctggatgcccacatgctggccttgaggcctcctcgagggtccagtcccttctgtcacttagagatctttagacctaagtttacatggcagagacatgtactgtacaggaactgtgctgtcatagtcactggtctattgctgtgaagagacaacgtgtaaaaaagaacattaaattggggcttgctcacagtctcagagccttagttcattatcaacttggggaacagagagacagggcaagggagagagagagaggaacaacagggaagaagggagagagcctgggcctggcatgggcttttgaaacctcacccatagtgacacacgttctccaacaaggccacacctcctaatccttctaatcttttcaaagagttctactactaagaattcaaatatatgagcctatgggcgccgttcttactcaaaaaccacatgaaccaaggacactgctagccagcctttgaatctttatcagcaggacacccacagcttcttgtggcacagatgtggatgagctgggaaaggctacagaacaggaatcctgtttgtagcagcacaaggaagggggtctgctgtgacccttagttcctctgttatggtgtctcccaaccataaaattattttcatttctacttcatagctataatttggctatcattttgaatgcaaatggacgtatctgtgttttctgatggtcttgggcgacccctgtgaaaggaccggaagagttaccaacccacaggttgagagctgctgtcctacagaaacacttataatgtgttttctctaggacacactggtgcctcatgacacagacaagaaacccactaaagtagattttctacagtttagtcaccattacaccaccaccaacaacaaaatgcactcccttgattctctctcactttgtttcccaagtacaattgaattcatttctctcctgagaaatgtccacacaacccacgtaccactgagaagggcaagccaagagcagattttaaagccaggcagagaggagcaggtccctggtgctggggaaggtccggctctgagggtggctcggctctgagggaggctcggctctgagggtggctcggctctgagggtggctcggctctgagggaggctcggctctgagggaggctcggctctgagggaggctcggctctgagggtggctcggctctgagggaggctcggctctgagggaggctcctctctgaggatggaccagctctgagctacaccccagctcctatagtcaggagtgggaaagaaagacaagtttcaggttgagaagcggtgagcagagcagaggtgcgcatgctccacgccctgattgacaatctcctgtgtttcagaggaaaggcagccggctgctgaagggtgaagacagaaacaaggtcagcagcaggagcctaggcctggacacaaatgcatcccaagccgcaggaggccgagcccctcttgaggagggctccctctctccgtccagggagtgctggaccaaggaagagcggcccgcacagagcgacagcttctctgggttcagtagcagtgacagtgtcctccgggaactcgatgacggacagtttgaccaggaagagggcgtgacacaggtcacttgcatgtgagttgccaggtgaccccatcagaggccttgtaaatagtaattaaatgactgccatctgactttattttgctactactatcttcatttatgtaatgtttttaatttccaggctcagccttcccctaatctatgtaaactttggcttaacctctgagacaaggaagaataaccagctatttatcagtttaaaagcattcttacatttcactcaactaatacatctgtataaacagatgtctcctctggtcattaagcaacaacctggctcacttccccacaaagggacaaatatcagtatttctcatcaggcctattgaaaaggccgactgtccaaatcatttcaaccaattagcgccttctcaggaagctacagcctcgattaaactgagtaatattctttcctccctatctctgtccctctctcccatggacacagactcatgaaaatatccattccctgcctatagcagttaatctaatttttgtctcttactgttgtatgtccatacaaagcaagccccatttgtcaaaagtctttaaaaaaaattttttttttctttcctatgtcttttctttcaataggccaccaggtggccagtccttcagtaaaccattaactttggcatgattggtcccgatggcctgcctaccagtggcgttaaacagactctcttacgtcagttaaggctgacaggtaaaggcgctcgccacaggagccttgtgacctgagtccagtctctggaacccatagaaatgtagagggaaccagttctacaaagttgtgctctgaccgccacaagcaagtacttgttcctctatgcccttgtgcacatgtgtaccctcgcagtaaaactaatattttttaaagtccctgaagaggggtcactatggagggcactgcatggctgtgcataaccacctgccccactccaatctaggaagaattcaactggctgaaccttcataccctgactgagaacgagtgtccaataaaaggtgactgactggttcatgagaaaaaaaaaagtcattaaaaggagagcccacaatctcaatgtataaaagccatggtctatgaaaacatttcatctatgccaagcaagctggcacacctctaagtatttggcaggcagatgtaggtagatctctgtgagttctaggtcagccagggctacacagtgagaccatgtctcaaacaacaaccaacaaaatctaactttcttttaaatttttaaacaccattgaagagaacaaatatcgatctcaaatggaagtgtgctggctaccactgttaggttcaaatcctgttagacatgttaagcctggaaaaatggtacagcccagacgtcccagtcctgcagaagtggagggggctcacagcccatgtgatgtctataacactggcccactccacatacctcctgctgccaggagccttccatcttgccagcttctacccgggaaagactcgtcttgtacagaacaggggccttcatttaggtatgaaagactgacctccaaaagaactacagtagactgccattaagtaattcacatatttcatatattttattggcttgtcgttgacattgtgagtcatttgaataataaactcttatttgttgttaggctactgtctgactgaacacaaatatgcccatgttttgttttctatacctggttctgttttcttttttttttatttttaaagatttattttttttttttaatgtatatgggtacactgtagccgtacagatggttgtgagccatcatgtggttgctgggaattgaactctggacctctgctcactccagtcccacttgctctggccctgctctctctggccccaagatttatttattatacataagtacactgtcactgtcttcagacataccagaagagggtgtcagatctcattacggatggttgtgagccaccatgtggttgctaggatttgaactcaggacccctggaagagcagtcaattctcttaactgctgagccatctctccagcccttgttcttttcttttctcttttcttttctttccttttcttttcttttcttttcttttcttttcttttcttttctttccttgttttgttttagttagttagttagttagttagttagttagtttgtctgtttgtttgtttgtttgtttgtttgttttttggaaggtgttggttggttggttgattggctgcttggttggttttttgaaacagggtttccctgtgaagccctggcttgccgcaagctggctcagccagagtcccttaacccgagggagaaatcagggtcctggaactcaggtgggcaaggagtcagcgagtgacaaacagacatgaacacaagggtgtgttggaactgaatgtaatttctcaaagcgagcatcagacttataatacagaggaaaaacaaggaagttaggtggtacattagccaaggtacattgaggttatctgttgtataagcactctttacagagaaatccatgcataaaagctgacaggaaccaggcagtgtttacaactgagataagatcagccctatctaaagttagctattcacaggagccaggtgaagaggctaacacacccaggtgtaattttagtctattgtttaacccaccaccaggggtcccttagtaaatacctaattatgctattcctctgggcctagtgaaaaacatgcaccaggagcgttctgttctactaaccctttcatgaataatacaatactccaattcctcctaaaatcacaactcaccttatttctactattatacaatgtagtttgccatacatgactgtaatgagaattttaagtttactttgttgaacttaccctgagatttctagctcttacccagtaaactgcaatgcctgatttctttcactatatctctggaggcatttcgtatgaataagtaacattcttacgaaattccaagcccagggttggctcagcaactgcctaggacattgggatactggtgaaggccaggaagcaatgttcaatctaacttggctatttgtcaaatcattccttgtgggcacctattataaagcaatactgaaagaaagcatgcaagaccctccacactatctcaaggacaaatctggaccacttttgtgctacgggatgccagagactctccaggagaccagtttctgtgaaactttatgcctcaggactgcggccaagcttttggacttgtcatgcagactccactggagtgggtgtggcactggctggcctcaaactcagaaatctgcctgcctctgcctccccactcctcctgactcttccccacccttccctacccctctctgcccccaagtgctgagtgtgccaccaccacctggcccttcattttgtcttttgagacaaggtcttgctacagatagctctgaaactcttagcaatcctcctgcctcagtttctagagtgctgggagtacaggtgctatgctaccatctatctggctttgatatgttctatatgtatcctgtgttatcaaatacttaaatgtacccaaactaagccactttccacgagtttctggtaaagacacaaggaagcccttgcctgctacgctgaagcctcgctgtacatgcagcatgctgctctatcagtgctggtaggcaggatggggggggggggtttctagaagaacctgggttatatattcaagtaggtaggtaggtaggtagggcatagtgatacacacctgcaaccccaggactcatgaagctgacacagcacaaagtctgaggctagcctatgctctaataaacaattggtggactcctgaggaaaacggaaaattactttaaaactctgcaacatgtcctgaagctctgaaaaaaaacatggggacatgctcaggaaagtggggcagttccgctgacaggggtgagaaggtgggggaaagaggcttttatacttctgttgttgcacagggagaatctgaaccattaagaacagagtgtggagggagcagtgtgagccagaaggacgggggaggggagggggaggccaaaacgagatggagggtgtggatggacagatagatggatgtatggcagacagagatagacagacacacatacagagagagagaaagagagggagaggaggagggggagtggagagggatggaggatagagaggcggctcagcaattaagagcaacctctgctcttgtggggaccagtgttctattccagcacccacatcaggtggctcccaagcacctgtaactcagggcagggaagggaatcaggcccctctgactgtacatgcatacaccctgacccagacacatcctaaaaaggtgttgtaactttaagtagagggctggggatgtgctcagtcggcagagtgcttacctagcatgcataaagacctggatccaatcctggcaccacgtagaagaagaagtaggcgttcctacagcagaattctagatttaaggccattcttggctacatagcaagttagatgacagcctaagccacatggaactctgtctcaaaaagaaaaatggaggcccagatgtggtggtacgtgtctataattccagctctccagcggcagaaacagagtccaagggtatctttaacaagttactaaatttgaggttggccaccctgggctacatgaggtcttgtctttaaaaaaaattacatgagaaaagaataaataaaaaggggacagagatagaaatttacaagtaactgacagaaagcttaggaaaatatcaattacttttaatttttttttaaatgtgtacagcatggtggctcacgcattcagtcccagtcctcatgaagccaaggcaaggagatctttgagttagtggttagcctggtctacctgagaccctatctcaaaacaaaacaaacaaacaaaaaaccaatgcaagcacaatttttgttgttgttgtttttaaattaaactcagggtcttgcttcatagcttaggctggccttaaacttacaattctcaggccttaacctctggagttctggcactacaggagtgttccatcccaccaaacctgcatacttatgacttgtttctagggccagcaagatggctcaacaagtaaaggtgcttgctggaacactgggcagcctgagctcagctcacaggacccagtgggcggaagcagagaactgactctttgtaagctattctccgacttccatacatgtgctgtgacgtgtgtgtgtgcacacaaacacatgaaataaataaaaagtataaaaacattgcttttaatttaaggatgattccaagcacctatagaattttcagggtgccccagatagttttttagacatggaaaaatacttctgttggctttaaaatatgatgaccgtaaagtaaacacttcatttatagagcttcaaaacatacagctttagtcagacagtggtggcacacgcctttagtctcagggcttaggagacagaggcaaacaaattaataaaaacatacagctttaaaactagacatagtggttcacacctgtcattccagcactcaggacaccaaggcaggaggatcagcatgagtttaacaccagcatgggctacatagtaagttctaggctaacctggactatcgagactctacctaaataaataaataaacaagtaagctgggcacgatgactcatacctgctatccaagaaatctgacaatagaagcagaaggataggagttcttttcttgaccttcaatacgcagagagttcgaggccagactctgctacttggcttgctctctgacaaaactagacagaagtccaccatgtgtcaagtgttcttgaactggacatagtggcacagggctgtaatcccagctcaaaggagacagaaacagaggaataatgaattgcagggtagtctgggctacaaagtaaaacctcaatttaaaaattaaataaatctgccatatccattagactgccataaattttgaaaacaatttgtttagcttttctcattccaaaggaacttcaaagaatatatgataatcggtatctgtaaatggagtccaattcttgtgtttgttttgggtttttgtcctgttttgacatggggtctcactatgtagccctgggtggcctagaactcactgtgtggatgaggcaagcatccaatgcacacagacctgcctgcctctgcctgttgaatgctgggattaaagatgcgagccgccacatctcctaggagtccaaaccttaaaactgaatttcaaagaaaggtttactttaagaaaggtggacattgttgaagcccgctcccccggcatagcttgactcagagcagggtcatgttgaccactgatatgttctgtatattctgaggtttgctaatcttaagaaattctacaaccataagcagccaggaccaatcacataaaggtcagtccgaactgttctgtgcaggtgtccagaatggcttgagtcagagctgaccaccgggcagcacttcctgcacctgcatgagctcactgtgggctttgcctgtgtagactggccctggggaacatttgaagacaaagtctagctgtgtccctaattgatcagtcttgggggtgtgtgatcaataaaccagctctgcttaactgagattggtgtctgagaggtttgtgtggtgattgctaggataaagaaatatactttaacgtgaactgggctacatttttacatggctgctctggagaagaacctggggcctacaaatgtcttaagatcatctgattcggggccagtgaaatggttcggtgcttgccaccaagtctgatcacatggtgaaaataaaaaactgacctacacacacacacacacacctaaatgtaaaagaaaaagattttggttttttttttttttaaatgattgtgtcagcactcaggagacagatggatctctgagtttgagcccagcctacactacacagtgagttctaggacagctagggctacacagggaaaccctgttgtgatgttttgtatatactcgatccagggactggcaggactagaaggtgtggccctgttggagtaggtgtgtcactgtgggtgtgggttataagaccctcatcctagctgcctgaaagtgagtcttctcttagcagccttcagatgaaggtagagaactctgtttctcctggaaccgtgcctgcctgggcgctgccatgttcccaccttgatgataatggactgaacctctgaacctgtaagccaaccccaattaaatgttgtccttataagagatgctttggtcatggtgtctgttcatagaagtaaaaccctaagacacctgtctcaaaaaaaaaaaaaaatgtgtaatctaaagcgttgggaagcttaggggagagggtctcagacacctggtggtggagacctgagactggaggacggatggcttctttcagatacgggagagttgccagcactgaagagaacaggtaactgggaacttggaaagcaagttcttctgcctgctgagaaacgttgtgtaagaagaacccatcccccactgctgtccttggcgctcacttcactaaaccgcagagccccatgaattcctgagtcacccagtcccatgctgtttctacccaaggaatgctttcctggtccagatagcacatccaaggcccttgcacccatgcagcctgagggctggtgagggctctgatgctttgagcttagagggcctgaagataggctctcctgacacctgatgtcacaggctgtggcctctccaaaggtctcagaaagtgacaaaagtctcatcccacttagggccatcctgctgtgctccagactgctagccagctccttgcctcagtgtttctccatatctgacaactggtgtttagttaaaataataaggacttagtctctatctgccctaaaagttgacattttattcagaaacagtaaaccctgtaaattctatgaaaaatcccagaccagtaacaactgcattccccataccccaaagcaatgcttgaaaaacctcttcactctggtggtgaggcaggaagctctctgacattcaaagctagcctcgactacatgccaaaaacgctgcctcagaaaaaagaaggaaaaaaaggggggggggagaaagagaagaaacaaaggaaaaaaaaatccctcctcctgattcctccaatcctgcccactgcttggaatcatattatactaatatacttaactatgttcagttatgcaaaatagccacacataaatacaatgttaagccaagtgtggtagtgctagcctctaatcccagtatttaagaggtcaagcgagattgtctcaaattcaaggctagcctgggctgcactgggagactgtcttaaacaaacacacacacacacacacacacacacacacacacacacacacacacacacccaagtcaggcatggctggcacacactttttatcccaacactcagagggagaagcaagcggatctttgagtttaaggccagcctgctctgcacattgagttccaggacagccagggttacctagtaaccttgccaaaaaccaaacaacaacaaaaaaactatttaaaagaaagtcctcattgacttctcaatagccaggttgtaaatgcatccatggaaaaccttacgtttgagtctgtctcactgtgtggctggcttaactaatcccctccatggctcagcctcctgaggagcaagagctacagacagcacaggcagaagcagcgccatgcttgaaacccgttgttttccttataaggacagggtctcactatttagcccaggctgggttcagacacaatcctcttgctaggattccaacaagggctttttgtggagcaaagggtcacacccagggtgttgtctgtgccaggtaaacacggctttgagatagccccagccctgaaaaggctttaatatagattattgccaagggttacagcctttttatctcgtagcataagagagcaacataagctataatgcatggtactgtaaaacacaatttacaaaagccgggcgtggtggcgcacgcctttaatcccagcacttgggaggcagaggcaggcggatttctgagttcaagaccagcctggtctacaaagtgaattccaggacagccagggctacacagagaaaccctgcctcgaaactgccccccccccaaaaaaaaagaaaaaaaaaaccccacaacttacatgctattcaatgaaacttcctaacttttgagacaaaaatgactgatgtgatagatcaaaactttcaatcagcgagagtttcaaaaaagaaaggagggagagaaggaaggaaaggagagagggagagggagaggaagagagggaggggaggagggagggaaggagggagggtgaaagtagtaagtcggagccagtgataaggtaggtaaggcacgaggccccttggcctgggttcacttcccaggacccacatggtggaaggagagaatcaactctgcatgttagcctctgaccttcacgcgtgcccacagcatgtgtatgccctttctccacatacaataaacaaatccatattcttcttggagtttttatgatttattttttaattatgtgcacatggtgggtgagtggcatatgtgtacaggcccccaaagagtccagaagagggcgccagagccctgaagctggggttgtgggaagccgtgagccacataacgtggttctgggaatcttcctctggaagacagcaagtattctcaacatccctgacccacttctctagccccttccttcttggtttttaataactcaatgccaggcatggcggtgcacatctttaatcccagcactcgggaggccatgaacttgaacacctgcctttgttctcaaacactgggataacgggcgctcactgttatacctgacccctacgttacccttttgaagccacaaatgtcatattctgtttctcccccataagtcaatgctgtagtctcaagactgctaccattggcatagctgttacctgaaacttattttcagatttgcttctgaaatcataaatcgtttttaagatgcctgcttggctcactcacctatcctggtggatgttcccgatcaggggaaagctcctgtcctgggaaatcactcacaggacacagtgctcccacactgaatctacaatggcgttattcacttactcactcattggatctggattatgacagatgatttcttctgggcagtgagctaaggtttcatcttcatattaaatcactcaaggcataaacaggccaaggccaagcgatgagcggcatccatgccaactgtgactcacggaggctcatttgggttcaacttatggaatcaccaaattagtgcttgcctgtgtaggaggttctgagaagaatggctacattgtgaggttcctggcacacttagaaactagccagtgtgagttaaaggcagatgggactacagccaggcctatttttaatttagaattgtaagcaaagaaaggggctgtttatgatcagccaaaatcacagtctgattcagatagggcctggaagtcctggataccccagcacaattcactctgccggacagaccactgccaaactctaacctcctcctgactcagtgactgaatgttacaatttggcctcaagaaacatgtaggattcacattcagccggtggttcggggagacgtaccttccaccttagaccatggccaagctcatccgtaacttcgcagagacggcaccatcgatggtggctgctgccgtgacttactcgaagcctcgattggccacattttggcactacgccaaggttgagctggttccctcaacccctggtgaaatccctacagctattcagagcgtgaaaaaaatcattcaaagtgctaaaactggtagcttcaaacaccttacagtgaaggaagctgtgctgaatggtttggtggccactgaggtgtggatgtggttttatatcggagagatcataggcaaacgtggcattgttggctatgaggtttgaagaccaatctttaacttccgatttgagttcttatttgaatgttcttggaccatgtgtaacgggactgctatctgaataaaatactaggtgttgaaaaaagaaacatgtaggattcaaaagaggatcatattgttttctgctgggattgattgcagcatcttgcaaaaatgcaacttacctggagctatttaaaatctgagatcacttctgcttcacctttgtgcaatggagagaggggtctgggcactgctttctctcgcggtcctgtccatgcctcccagggacctgcagattcagctctgttgcctgtgcaggacaacctggtctacacggtgagtttcaggccagccagggctacactatgggaccctgtctcaaataaatggtttttcatgaagatgagaagaggtggggctaaaggggctgaggacatagctcagttccagagtgctcacctaacaggcacaaaaccctgggtttaatcccagcaccatggaaactcagcagaaggatcagaagttcaaagtcactttcatctatgacagcctaggccataggagacactatctcggaaaaatta

SEQ ID NO: 580 - DNA, 2539 bp, Mus musculus
tcggtagaagccgggaagcacaggactgaccagaagaaacagaaagaaccgcatcactttgactgactttatcttctatccgtagataatcacaccagagttgcacttttgtctttaattccgtttctggacacctcttttccattcagccaactgggtgagacaaagcccgtcggtgccctgagccgcagaactctggtcgggggctggctggctgtaaattgacgtggcatggaaattctccactaagttgcagcagctcacgagctcctcaaagatcgagcccagcctccgggagctggagctaaggctcagtaacagtaacgttaaagaagaatggataaaagtccccagctcctcgccttggacccgccgctttctttctggctatctgtcatttcgctgaaaaccaaatcaaagcagttagtctgtaactttgttttcgcagcttaaacaacaaaattgaccgcgcttgctcctccggctctcccctgcaatcttaactccttgcagactttgccatggggtgcggacttaggaagctggaagaccctgatgaaagcagccctggaaaaatattttctaccctgaagagaccgcaagtggaaacaaagacagaatttgcttatgaatacgccctgctggactttactttacaagcttcaacaaatccagacgtcatcaagataaattcagtcctggatatagttgccaaagtggaagactattatcttaagggctatgttgttggggccattcacccagttatacaacctgtggggcagcggaagcaccttccagcaagtcacctgtacagggcggtgctgtcccggctgaagctaagccccaagcattctgcagcaggcggacaaaggcgcgcaaggcttgtgatggaggagtgtccactaacttgtgaggcacaagcaaacgacgctgcaaaggaactcatggacaagattaatgccgctgctaaaagagggatgaagtttgttgggctggtctcccagtgctacttgccatctatgcactgtaatggagccagccacgatggagttgcagagtcggggctacacgtgagacaagattcacaagacaactgcaaaggctggaatgaaggagcccttggtggacacttgtctgaaagtggagtggaggaggaacctcagcatgaaagtggacagcatcagacagagaggaacagcagccccagctacgctaacccaaagcggggagaagccccagatggtaagctgtacatggtcttcaatgcttttgaggaagatgcggccagctgggcctatcaggaaggtgtcctgtccatgaaagtgacgcggaagggagctgtcatcagcgctctggacgccaactggctagaactaacgacattttactataagcaaggcttctctttaattgactcttttgtgtgctgggagacacctaaaggggaccagttacctaaatctttggaaggcttttttatctacgaagaagaaggatctggagtcccaggttctaacaggagaggaaacgacgccattgtggtggagcagtggacagtcattgagaggaaaggcagccggctgctgaagggtgaagacagaaacaaggtcagcagcaggagcctaggcctggacacaaatgcatcccaagccgcaggaggccgagcccctcttgaggagggctccctctctccgtccagggagtgctggaccaaggaagagcggcccgcacagagcgacagcttctctgggttcagtagcagtgacagtgtcctccgggaactcgatgacggacagtttgaccaggaagagggcgtgacacaggaagaattcaactggctgaaccttcataccctgactgagaacgagtgtccaataaaaggtgactgactggttcatgagaaaaaaaaaagtcattaaaaggagagcccacaatctcaatgtataaaagccatggtctatgaaaacatttcatctatgccaagcaagctggcacacctctaagtatttggcaggcagatgtaggtagatctctgtgagttctaggtcagccagggctacacagtgagaccatgtctcaaacaacaaccaacaaaatctaactttcttttaaatttttaaacaccattgaagagaacaaatatcgatctcaaatggaagtgtgctggctaccactgttaggttcaaatcctgttagacatgttaagcctggaaaaatggtacagcccagacgtcccagtcctgcagaagtggagggggctcacagcccatgtgatgtctataacactggcccactccacatacctcctgctgccaggagccttccatcttgccagcttctacccgggaaagactcgtcttgtacagaacaggggccttcatttaggtatgaaagactgacctccaaaagaactacagtagactgccattaagtaattcacatatttcatatattttattggcttgtcgttgacattgtgagtcatttgaataataaactcttatttgttgttaggctactgtctgactgaacacaa

SEQ ID NO: 581 - protein, 462 aa, Mus musculus
LLADFAMGCGLRKLEDPDESSPGKIFSTLKRPQVETKTEFAYEYALLDFTLQASTNPDVIKINSVLDIVAKVEDYYLKGYVVGAIHPVIQPVGQRKHLPASHLYRAVLSRLKLSPKHSAAGGQRRARLVMEECPLTCEAQANDAAKELMDKINAAAKRGMKFVGLVSQCYLPSMHCNGASHDGVAESGLHVRQDSQDNCKGWNEGALGGHLSESGVEEEPQHESGQHQTERNSSPSYANPKRGEAPDGKLYMVFNAFEEDAASWAYQEGVLSMKVTRKGAVISALDANWLELTTFYYKQGFSLIDSFVCWETPKGDQLPKSLEGFFIYEEEGSGVPGSNRRGNDAIVVEQWTVIERKGSRLLKGEDRNKVSSRSLGLDTNASQAAGGRAPLEEGSLSPSRECWTKEERPAQSDSFSGFSSSDSVLRELDDGQFDQEEGVTQEEFNWLNLHTLTENECPIKGD

SEQ ID NO: 582 - DNA, 70708 bp, Homo sapiens
tgggaacgaggccatatttttggaatatattcaaatccctaccatgatcttcccagagattttttaaaccaacaatgacttatctttaagggcaacttcatttgaaactatcttctcagagctggaccatcaacaaatgggcaaatcaccgatgtctatttgcgtgtttacttgcaccaggccctgggctcatgttttacagttattttcacaataactctatgaagttaatattattctttattcttgtttcagaaaggaaaggtaacttgttctagatcacatgcttagtaaatggcataatcaggattcaaacccaggtgaattgcttccagagcctaatgctcttaaagagaatagtgtactgcctctctttctacataagaggacctcattacaaagcaaccaatggttgtagagcacttactgtgtgccagacactctctaggaaccaagattaatttattaatcctcctaacaaccatataaggaggattctgattattcccattttgcagatgaggaaactacggcacacagaagggaaataccttactaggtgtggcagagctaggatttggatcccggaagtctggtgctggagtctatggcctaaaccactgctccatgagtaccctggagctctgtttgtgaaatatattaatagtacgcccaagttttctttcagtgggtcttttaataagtatttttaggtacttaccgtaatgtcatctctgtgctgggtgctacagttttatcaaaagacattgacctccagataggagaacatgcacatttgaaacagttgaatattaatgtaaagcagtgggcccaaaacaaatatgagttgttttgtttttttttgagacggagtctcactctgttcccaggctggagtgcagtggtgtggtatcggctcacttcaacctccacctcctaggttcaagcgattctcctgcctcagccttctgagtagctgggactacaggcacacaccaccatgcctggctaatttttgtatttttagtagagacagggtttcaccatgttggccaggatggtctcgatctcttgacctcgtgatctgcctgcctcggcctcccaaagtgctgggattacaggcgtgagccaccaagcctggccccatgatctttacataagcttatgttcaaatatgtttattagcactgatgtacaacatttgttctccctttctaacttttctggatttctcagtttgtaattcctcctgaaacttttatgtgtgtgtgtgtgtttcttgcattaacatttctactatggtaagacttaagacaatatccttactttattgagagtgcaagaagatgtggattagaccagaaaagcagaacttattccaatgatgcaaaatttttctgacatcaccagaaacgaggtatttcttgggaacacattctgcacctaaacaggaacctctttaagcatcaattttattctattatagctatcttctttgtgattattttaacatgttgtataattctgcttttaaaaactgttctgaaacaacagaatgaaagggggatgacttcattattgttattggtttaaactaatgacatatgtaaagccctttaagtggccccagactaatgtttgtatagttttttgtttttttgttggtttgcttgtttgtttgtttgttttttgagacagagtcttgctctgtggccaggctggagtgcagttgccccatcttggctcactgcaacctccgtctcctgagttcaagcaattctcatatctcagcctccagagtaagtgggattacaggcatgcaccaccactccaggctaattttatatttttagtagagttgacgtttcaccatgctggccaggctggtctctaactcctgacctcaagtgatcctcccaccgcggcctcccaaagtgctgggattacaggcatgagccaccatgcccagcctatatttgtatagttattttatccagttttgtaattcattttattccctctggtgtcatctgtctcttttgctattatcattgtgtccttgctacttctaacccagtgggtctccaagcttccaccaaaaggcactggacatgagatgctcttcggctgtatatacagacacagaattaaacattggatcacttaaacagaagagtatgcccttttccatcttatttaagccttcccatcagtttggagttaatatgtctttaacacccctctaatggctaatttttctccttttttgtttttgatttttttgtttgttttaagacagaggctcactttattgtccaggctggagtgcagtggtgctatcatggcttactcaagaagttgcagcctcaaactcctgggcttaagcgatcctcccacctcagcccccaagtagctgggacttacaggcatgtgcaatcacgctcagctaatatttaaattttctgtagagacagtgtctcattatagcccaggttcgtctcaaactcctggcctcaagtgatccgcccacctcagcctcccaaagtgatggaattgcagacatgagccaccatgcccagcctaattttccttggccaggcctgtggctcagtctttggcaaataacattatctagctagaatgtaataagttttcttttcattgtatttatttgtatgacagctttctacttaagataaatgatcctggttttatgttatatgagtgatataaattctttttgaaataaatttattttgcttaaaaattaaaattagaagaaaattttaaggatatgaccaaaattgtgaaagtgtacttagacaactaaagtttgggaaacaccaccccagttcaatgagcagttggttgagagagttgttaaggggaggtggctccatgcctttcttatggaaaaagtggatggactttttcagaacttttttttggtaaattgaggttatttctactgttctgttattgcaaaagtaattgctttgccattgaaagcaatggcaaacaccataattatttttgcaccaacccaatagatttttgaagttgctggcagtctgctttctagtaaagttgaacaaaaatctctttcacctctattgttttagcctttttttttttttaactaaccagatagatattttttaatgagcatgtcagagtctcactctgccctgccacatgcagtttgggggagtattcccatgggtaactgagtcttccattgcttagtcagtgttctacctgccagcctcttctgtgtgacagcccttcagatatatccagatggtgccctgttcctcacatattattttgcacagttgaaagacacccgtcagggtctccagacccctcattatcctgagcactttcttttgaatgtactccagcttgttactgaatgtctctaatttcacccctaaattgaaaacagtttacttatccattcaacagatattaattgaacatctgtctgctaggcaatactctaagtatagagatacggcactgaacaaagcatgaatatccctgccctcacagagctttcatcctgcccttgtgggggaggcagatattaataatataattaggtaaatagtatattctggttattattatttggatagttattaatgctaaagcaaggaatatactaatgagatggtctgctcaataaagaacttagtgagcctcctgcctttggaggtaatttttttccagatagccaacgatcacattagattaactcttggcttataattagtttgcagtcagctacagaccacaggatttcccctgcccccttcagtgaaaatatattaaatcagaattctgtcactctgtgttttgaacttagactttatccctgttagatttttttgtttgggagacctttgtaccaccaaacaaagagctcttcaaatcttcattctcttagctaatatatacaccatcccttctttgctatataattaactctaagacaccattgattataaaacacactattattttatgtaccattaagaaagaaaaatgcaccaattaaactataactattttctttcagtaattttagtttttacccatggcaaaagctcttttagacattttaaacataagtatttcattatatatctctcttacatacataagaaaaggaaattaagtgaaatgaagatatttctaaaagttcctcacacttaagacctgactcttctgaatcacttttagaacttagagccctcatttccccatttttccacgtaatcttcctatgagcggtcaagagtattggtaatgctgcatttcttaagcaagtgctagggttttctttcaagtagctgacacccattctgctaagtttgagactggggctttcctcatattgccagaggctaccaatggaaagttttcaagcagccaccaggactcatattcttttcttaagtgatccttgaacagtttgttgactgaaacttcaagcactctgggttgtccagccatgccacatggaaaaacaatcaactttgcacaggtattgacaagcacatcataattaccacccggcctacagtattgaaagataccaagaggatttccaagacctattattgggttcaattttataatttataaagacacaccttcacaaaaatgaaatgctcacctctacttatatttgtaatcaaccacaatctatggacttttgtgtttcactttagtcatgtaaatattattttttaaataagccttaaaattccttacaccatcattgctttttaggttttcattttgcaacctacgttgctggataatcaagtaaaactgccaggaaagtatcaaagttctttatttttcttgcatcatttttgaggaagaaagtatatgcctttttaaccaaaaaatagatgccattgtactttttaaaaattgttgacttaaacataagaaataaacctataaaactcctagaagaaaacagaagaaaagcttcatgacactgtacttggcaatgatttttctttttttttgttgtttttgtttttgtttttttgagatggagtttcactcttatcacccaggctggaatgcagtgacacgatagctcacttcaacctccgccttccgggttcaagcgattctcctgcctcagcctcccaagtagctgggattacaggcatctgccaccatgcctggctaatttttgtatttttagtagagaaagagtttcaccatgttggccaggctggtctcaaactcctgatctcaggtgatccacccgctctggccattgaaattgctgggattacgggcgtgagccactgcgcctggcctgacaatgatttcttggatatgacaccaaagcacaggcaaaaaaagtaaaaatagataaatgggactatatcaaacttaaaagctttggtgcatcaaaggacagtcaacagagtgaaaagtcaatatgtggaatgggagaaaataatttcaaatcatatacctgataaagggttaatatccagaatatataaataactcctacaactcaacaacaaagaaacaacccaatttttaaatgagcaaagggtttgaacagacagttctccaaatggccaataagatgtgaaaagattctcaatatcactaataattaggggaatacaaatcaaaaccacaataagttatcaccttatacctgttagaatagctactatcaaagaaacaagtgttagtgaggatgcagacaattagaacacttgtgtactgttggtgggaatgtaaaatagttcagccatcatagaaaacaatatggagtttcctcaaaaacttataaatagaattaccatatgatccagcaatcccacttctgggcatgtatttaaaataatcaaaagcaggatctcaaagatatatttacacacccatattaatagcaacattattcacaatagtcaagaggtggaaacaacccacatgttcatagacagatggataaacaaaatgtggtatatatattcaatggaatattattcaatcttaaaaaggaaggaaatcttgtaacatgctacagcgtggatgaaccttgaggacattacactaagtgaaataagccagtcacaaaaaggcctacagtgttgtaaagatacgaggaagattcccaagccaaggcacatcccttattcttagattgaattttacaattttcaaaggacacactttcacaaaaatgaagtgctcacctctattcatatttttaaagttatcaaccacaatctatggacttttgtgtccatatgattttgtgtcaatatgattcctcttatatgaggtatctaatgtagtcaaattcatagcaaaagaaagtggaatgatggttaccagggtctgacaggaagtaatggggagttgtttaatgggtatagggttttattttttcaagctgaaaaagttctggagatttgtttcacaataatgcgtgtatacttaacactactgaactgtacactaaaaaatggttaaaatggcaaatttttgtttttcctacaatttttatacattttaatatatattatatatctttttattgtagtaaaacatacatgacatgaaatttaccattttagctattagtaagtgtacagttcagtgacattaagtacattcatattgttgtgcagccattactacaatccaactccaaatgacatttaattgggtagtgaagggggtattatggagctaaaataaaattaattactaactgctgagtatctggtaaaaatacagaaccattgaaatactttcaaataatctatatgtagtagcaacttaagtgcctctttgaacttcgtaggtgccttttttgtgtgggcttctgccgttcttcactatctgggatgacagtaagattgcaaagaacagagtgttgagctgcctaaatttccctgaagtctaacccaaagctctgggagggtggacttttctcaaccctgagttcttgatttctggggtttccttccaatcagtggtgctaaggtagacgaggtaggcaacatgaggcaacatgtgccctgacagtgactccaaccaagtcagcaagagcagcaaggccagcagtatccagaagtactcccaagcccacaagctcatgtgaacttttctgaataaaagccacattcttccccttcattaaatcattatttgtggtacaatcttctcccagatttctttctggatttcattcaaagatggagctaattaaatcccattagctccacctctaagtattttttcttcatttgcaacatggctttttctcattgtaatatcattaaaatgaggaacatgtggtgaagccttatgctagagactcctgaagtaaatatgacctttacctctatttatttggattctcagtatgttcttaaccatccccacttccatgatcaaaagaatttttacaaattccacgtcactgcctatgtttttctctgttttgtctctcttctccaaggcctagatagtgtgaacaattgttcctgaaattgctaacctaactttttttatttccactagctaatcttgattgcttgccttttttatgcaataacttcatttcttaattccccttatgagcagtatttccaatttaacatagtgacctaaggaacatgctagacatagaaagacatgaatacagtaggttcctttcccttaaggaattctcagtctaacagccaagacatataaacaaataactataatacaatctgataagcacactaatagaaggacatgcagcccagaggaaggaataattaactcaggctgggagaacagggaaggaaatgaaggcctggtggcatgaaacagagtggcaggttcagaaacaccaagtccttccagcatcccaaagcaagacacgtaagagaaagactaacacgcgtggaggctgaatcaagaggcagaggccagactatgaagattcttttgtattacactaagacatttccacttcctgcagtaaacaattttctttaaatttttttaagattagtatatagttctaaaaataagtttaggttatgtttcattccttagtgttaagagttgcttccattttgttatagtttttcagttcctttgtttagaaatcagagttggtagtcaaaatactaaagagcaaaaccaaatgaatcacagaattgccacaccaacaagcagagctgggctgtttacaaggaagcccagctgtttcttcaaagtccaagatcattctctttgttttcattcctattcataatgatgaagaagatatattgtaaataaaatattaatttaaatccaaaagagggtgaaaattggaggaagtggacccttcctggtttatataacttttctgttgagcgcttattttagtttttgaagttggcgtgaatacccactgatggtggatttgtctcatcatgtggatactgatgtaaggggaggaggggatttcctctggcccttcctcctcatctgcttcttaacctccttcctgtgctcaggcaatcagccgcagttctttgccagacaccactcaccacactgacagaggtcaacagccaactaggctcatatctggaattaatttcatatgtcttgttacttaagagataatcaaaatgcaggtctatttctaggtattacttcttgattgtttttcatacaatgagaaatattgttgtagcaaataaagttgttatttaaattaatactgctggatcattaagaacattttctcaaataacacactcttttccttttactactctaaagtctgtacagatagtgctattctatagtttctacagatttgctatccttcaaggaatggtttaattgcaaatcaattttgcatttaaatttccactacgtttagaatttttatttattaaagagactactggatatctgtactttttcattcacctttactcaagcatttacataagcaccatgagaaattatatgtttagcttcccagataaacttaaaacacagtgctttgaaagagtaattagaaataagaaagccttgacaagtgctgcctaataaatgccatttctcccatttttagttattagattggtatgaattttatttttaagaaattatgcatctcggctgggagcgctggctcacacctataatcccaacactttgggaagccaaggcagcaggcttgcttgagctcaggagtttgagatcagcctgggcaacatggcaaaacctcgcctctacaaaaaatacaaaactcagccgggtgtggtggcatgcacctatagtcccagctacgtggaaggattgtgtgagcccgggaggtgggggctacagagagccacgattgtgccactgcactccagcctgggggacagagtgagaccctctctcaaaaaagaaaaaaagaaaagaaaagaaattatgcatctcatcttgtttagtcataaaaatgactggctcttcaaattattgtatctcctatgtatgtcttcaatatctattaatggaaatatagtcactcaaatgaaatcctaaaaaatgaaactgacctaattgaaaaaactcataagacattgtatttctgctttagacatatgggtgatattatgtatctactaatttgtaaggtcacttttccttttttctgaaatgactttaaaaatgtataaatacatgttaatgtaactttatctgagattaagccattggagttttttttttttttttttttttttgtagagacaatgtcctactatgttcctgttatgttgcccaggctggtctcaaactcctgggctcaaacaatccccctgcctcagccttccaaagtgctgggattacacgcatgtgccattgcacccggccaagatcttttcctattcattagtattatcacccataggtagaaataatgtataattcaatcttaagaatatgcaaatttctctttgcttttgatatttcagcttcatcaaacccagaagtcatcaagataaattcaattctggatatagtaacaaaagtggaaaactattatcttaaaggatatattgtcggggctattcatcctgttatacaacctgtggggcagcgaaaacacctacctgcaagttacctatacagagtggtgctattgcgcttgaaattaaggtaagcacactattcaagaaagaggcaggtgagggtgacagttctctttgtctaaaagaaaaaaaaatttgaatcaagtggcagagaataaaggacacatgggggttttagtttaaagcacattttccagcagtggaacctggattgaagcaaggaaatgttacacctccttccttaaaactcctgattgatttttgcttcttgcagacaaatgtgtcctaagtgaggatgtcagtgaacaaagggaaagcaaaatagattccagaggcacctagaagctcctgtagccacttcagcagatgcaggagaagcagtgagctacagatactatcactaggctaaagagctgaccagacctaccaagtccactttcactgagctttctgactgtcctacattgttttattaatagtggcaacagaaactatctctacattctaaaactttttttttttcaagacagagttttgctctggttgcccaagctggagtgcaatggcaccaactcagctcactgtaacctctgcctcccgggttcaagcgattcttctgcctcagcctcccaagtagctgggattacaggctcctgccaccacagccagctaattttttgtatttttagtacagatggggtttcaccatgttgaccaggctggtctcgaactcctgaccgcaggtgatccacccaccttggcctcccaaagtactggggttacaggcatgagccactgcacccagcccattctaaaacttttaacgacagaaagacctactatgacaagttctaacaaattagatagacctcttgttaacctttttccaaaatctaatttaaaagctaaccattgtagtgttttttattttaatagctacttttccaaacaatactgcaaccatttttgccagcctagattgtaaatttgatagttttcatggtaaaatactgttgttctttccaattaagaataaaaataaccagacaaatatcttagattaacacattaaatttttttacacaaccctttaattaatatgttgcttaatgacagggatgcattctaagaagtgtgtccttaggctgctttgtcattgtgtgaacatcatagagtgtacttacacaaacctagatggtatagcctactatacacctaggctatatggtatagcccattgctctgagactccaaacctgtacagtctgttaccgactgaatactgtaggcaatggtatcacaataataagtatttgtgtagctaaacatacctaaagatggaaaaggtacagtaaaaatacgttactctataatcttacgggaccaccgctgtatatgcagtccattgttgacagaaacatcattatgcagtgcatgactgtatatcaaaaccatcctaaagaccagggaaaaaactgcattttctctttacagtgatggatcaacaacaatcactttaagagagggctaagcagagaaggaaaaatgaaagtagaggaaaactaagaaaataggaaaatttcaaaaaacaagaaagagacttaaaaaaattccaggtgtgattttaagaaacactatctcccatggagtaattgcctactttaacatgtctggcagggtgtgtacaggcttcagctttcactagaatatgaagcctcatcagatatttactagtttaagcattactaagcaaacatgacatttttgcatagtaggattgcttatgtcctaattacaaatcttatcaaccatgtgtgaattatcttttctgcttttaggattacttcagacagatttagcagtaccctggcaagccgaagaataagcaaagaaaaaagatcagaaaagaagaaaaagggaaaagggcaatatttatttgcatttaaatggaatttttacttctgcttttgttcgataagatataacaacaatctaaaattatttcttataagtttattaaaactacagacatgaagcttttctttctttctaactgacaaattaaattaatagcagtttaaattaaggaaatttgaattaatagaagttattgtgcttttctggtatttttatataagaagatagccatcaggtttgaaataataaaaaatgattaccttgaccctgtttgtgagttgctcactcattttcacatgagcatattagctgaaaagcagcaattggcctccaaccataaacatattccctctgttacagcccaaagaattcggcagcacccagtggacaaagacgcccaaggctcgtgattgaggaatgtcccctaacttctgaggcacaaacaaatgacgcagcaaaagaactgatagaaaaggtactaaatttatgcactttttcatgggatattgacaaacatttggtatttcatcttcatcaattcccttttttaccctaaaaagaataaggaaatgacaggtaacttttctaccagaatttaaaacatatcgaagtacttgtgccaaatggtaaagcgtttaaaacagaaatacaagccagtgaaacaaaatggacaaccagaactaaatttaaacaaatataagaagtttaatgacaaacctgatgaaataaaatggaggaacaaccattatttaatgaatgctgttgggaaagtaggcaattgttctgcagagaataaattccacatttcagatgagataaagaggtaattttttaatataaaaaaacaaaagaaaatggaagagtaaatatagtcaatgaatagattaaggagtttgagtatataaatataacttaactgtactaggaaaactaagcttaaaaaagaagaatcaaagagaaatctgcaacagacatgtcctataggaggttcgttttcaaaatatacattacaggaaaggaatacaaattcatgaaagtaatatgccgtcttaaatggacagagagagacaatggacagcaaatataaaagaaagaaacgtcaataattaggagacagttggtaacaggttcaacctaataatgtttaatgtaaataaaaactgagaactaatacctcaccagtattaaaccaggaaatttaattaaaatccagtattagcaaagctttaagacaagttaaggccaggtgtggtggctcacacctgtaatcccaacacttttggaggccgaggcaggaggatcacttgaggccaggagttccaagaccagcctaagcaacatagcaagacccccaactctacaaaacctgaaagaaaaaaaaatcagcaggacgtggtggcacatgcctgtagtaccatgtactcaggagggtaagacaggaggatcacctgagcctagaagtgagcctgcagtgagctgtgatcaagccactacactccagcctgggtgacagagcaagactctatctctaataataataacaataataaaaacaaagaaaagctaacattcataatacaactggcattgtaattaatgcagtattcctgaatatctatttagtaagaagaatcataaatcccattttgtctttttttgttgttgttgttaaagaaaataggctggagtatagtggcacaatcatagctcgctgcagtctcgaactcttgaactcaagcaattctcctgccttagccaccctggtagctgggattgtaggcatgggacaccacgcccagccaatttttttattttgtaaagacaggagtctgtattgcccaggctagtcttaaattcctgggctcaatcgatcctactgccatggcctcccaaagtgctgggatcacaggtgtgagccaccatgcctggccataaatcccattttattttttaatcccctccttaggaattgattttaagaaaataattgaaaaggggaagaaataatttttatacaaagatatttaaccaacagtgaataagggtccaaattctcaataactggaagactttgaaaaagacaatgatggattaatataatagaatattttataggcattaaacatgacaactatattgactgtcaagagagaaaagtctatacaatataacttaattgaaacttaaatgaaaagttaaatgttgtatatgtattgattaaaacaaaaaagttgtacattcataaatattctaaattgatgggattttatggtgaaaggtgtttcttttccactgcattgacatatttataaggttttactttttatttaaatacatacagctaaaatctaaagcatttcctttcaggtaagaaactgaaatgtgttcacttgtttctctagttgtttccaagcgttaaatactatgtatgtaagattatctgtggtttggggatagtcagttatagttgctaatgattatttcccatttaggcacaaagtcactattcaataagggtttttagtctttgagactaaattttataaacaaactacgcatattgtttattagcactattctgggaaattttttttctggtaataaatccactccagcaaatttcatttgaaaacaaaaatgtagctactaatttagtcttaatagatcaccgtcagagcccttgttttgcatttgacttcctggacacagttaaagatctatttaaacaggaaagtactgttatttcagcaattagagcaacagggttatttcattaagagaaaagcttcaggaaacatagcacatgaaatatttgagcattgctccgggtatgaacaagagccatagatgaattgccaaatattatttttgagcggctgccttgtgtaaagagttggttgttgaacagctaacttttaagtcaagttctaacattataccagtgttcactctaattttaaaattcagtttgtaagtatttttctcagaattttaaactaaaaataacattttaaaaatatcaatcctccaacttaaaaatggaaaaaaaattaatactttatttgttaccagtcctttccagataaaagttcctagtaatagaaaaaagtttttctgcatcttttcactcaaatcaactaacaagacctagaggaagcactgacggtaaatgcacccatttctacctgcagaatatgccatatctctatccctccctcttcttctctcccaggacaactgatataaaggaaaatttgtggttgttttaaatggttacaatctcaatatgttaattcataggaacaaatgctgtttcaccagctccagtcccttgtcctagctccacacacccacactctctccccgctctcagaattctcctgcctcacaagctggagctgagtgaattaagttgcccccattgactgggcattgctctctgttctgccccagttcttcctggcttttctcactccatttcattctgactctaaatgtttgcatttgcaacctccatcataattctttttctttcttctcctcccaggtaacatttacaacatttaatttaaatgtttaaaacagtagccatataaaagacattgctatttcttcatttaactaatttaacaagtacttatagagcacctatgagtagaaaacactgcaatacaaagaaggataagacacagtcccctacgtcagccttcaaaggagctgccagttgaacacatgaagaaaatagaacaaagaaacgaagtaaaagcagagaggaacaggccttaggtttttggctgttacatttcaacaaaagctaactcttaccgatatgtcaatgggaaaagtgctgagtgtaaaaataagcattcctgggggaggagccaagatggccgaataggaacagctccggtctacagctcccggcgtgagcgacgcagaagacgggtgatttctgcatttccatctgaggtaccgggttcatctcactagggagtgccagacagtgggcgcaggtcagtgggtgcgcgcaccgtgcgcgagccgaagcagggcgaggcattgcctcacttgggaagcgcaaggggtcagggagttccctttccgagtcaaagaaaggggtgacggactcacctggaaaatcgggtcactcccacccgaatattgcgcttttcggaccggcttaaaaaacggcgcaccacgagattatatccggcacctggctcggagggtcctacgcccacggagtctcgctgattgctagcacagcagtctgagatcaaactgcaaggcggcagtgaggctgggggaggggcgcccgccattgcccaggcttccttaggtaaacaaagcagccaggaagctccaactgggtggagcccaccacagctcaaggaggcctgcctgcctctgtaggctccacctctgggggcagggcacagacaaaaagacagcagtaacctctgcagacttaaatgtccttgtctgacagctttgaagagagcagtggttctcccagcacgcagctggagatctgagaacgggcagactccctcctcaagtgggtccctgacccctgacccctgagcagcctaactgggaggcacccccagcaggggcacactgacatctcacacggcagggtattccaacagacctgcatctgagggtcctgtctgttagaaggaaaactaacaaacagaaaggacatccacaccaaaaacccatctgtacatcaccatcatcaaagaccaaaagtagataaaaccacaaagatggggaaaaaacagaacagaaaaactggaaactctaaaacgcagagcgcctctcctcctccaaaggaacgcagttcctcaccagcaacagaacaaagctggatggagaatgactttgacgagctgagagaagaaggcttcagacgatcaaattactctgagctacgggaggacattcaaaccaaaggcaaagaagttgaaaactttgaaaaaaatttagaagaatgtataactagaataaccaatacagagaagtgcttaaaggagctgatggagctgaaaaccaaggctcgagaactacgtgaagaatgcagaagcctcaggagccaatgcgatcaactggaagaaagggtatcagcaatggaagatgaaatgaatgaaatgaagtgagaagggaagtttagagaaaaaagaataaaaagaaatgagcaaagcctccaagaaatatgggactatgtgaaaagaccaaatctacgtctggctggtgtacctgaaagtgatgcggagaatggaaccaagttggaaaacactctgcaggatattatccaggagaacttccccaatctagcaaggcaggccaacgttcagattcaggaaatacagagaacgccacaaagatactcctcgagaagagcaactccaagacacataattgtcagattcaccaaagttgaaatgaaggaaaaaatgttaagggcagccagagagaaaggtcaggttaccctcaaagggaagcccatcagactaacagcggatctctcggcagaaaccctacaagccagaagagagtgggggccaatattcaacattcttaaagaaaagaattttcaacccagaatttcatatccagccaaactaagcttcataagtgaaggagaaataaaatactttacagacaagcaaatgttgacagattttgtcatgaccaggcctgcccaaaaagagctcctgaaggaagcactaaacatggaaaggaacaaccggtaccagccgctgcaaaatcatgccaaaatgtaaagaccatcgagactaggaagaaactgcatcaactaacgagcaaaataaccagctaacatcataatgacaggatcaaattcacacataacaatattaactttaaatgtaaatggactaaatgctccaattaaaagacacagactggcaaattggataaagagtcaagacccatcagtgtgctgtattcaggaaacacatctcacgtgcagaaacacacataggctcaaaataaaaggatggaggaagatctaccaagcaaatggaaaacaaaaaaaggcaagggttgcaatcctagtctctgataaaacagactttaaaccaacaaagatcaaaagagacaaagaaggccattacataatggtaaagggatcaattcaacaagaagagctaactatcctaaatatatatgcacccaatacaggagcacccagattcataaagcaagtcctgagtgacctacaaagagacttagactcccacacaataataatgggagactttaacaccccactgtcaacattagacagatcaacgagacagaaagtcaacaaggatacccaggaattgaactcagctctgcaccaagcggatctaatagacatctacagaactctccaccccaaatcaacagaatatacatttttttcagcaccacaccacacctattccaaaattgaccacatagttggaagtaaagctctcctcagcaaatgtaaaagaacagaaattataacaaactatctctcagaccacagtgcaaacaaagtagaactcagaattaagaatttcactcaaagccgctcaactacatggaaactgaacaacctgctcctgaatgactactggatacataacgaaatggaggcagaaataaagatgttctttgaaaccaacgagaacaaagacacaacataccagaatctctgggatgcattcaaagcagtgtgtagagggaaatttacagcactaaatgcccacaagagaaagcaggaaagatacaaaattgacaccctaacatcacaattaaaagaactagaaaagcaagagcaaacacattcaaaagctagcagaaggcaagaaataactaaaatcagagcagaactgaaggaaatagagacacaaaaaacccttcaaaaaattaatgaatccaggagctggttttttgaaaggatcaacaaaattgatagaccgctagcaagactaataaagaaaaagagagaagaatcaaatagacacaataaaaaatgataaaggggatatcaccaccaatcccacagaaatacaaactaccatcagagaatactacaaacacctctatgcaaataaactagaaaatctagaggaaatggataaattcctcaacacatacactctcccaagactaaaccaggaagaagttgaatctctgaatagaccaataacaggagctgaaattgtggcaataatcaatagcttaccaaccaaaaagagtccaggaccagatggattcacagccgaattctaccagaggtacaaggaacaactggtaccattccttctgaaactattccaatcaatagaaaaagagggaatcctccctaactcattttatgaggctagcatcattctgataccaaagccgggcagagacacaaccaaaaaagagaattttagaccaatatccttgatgaacattgatgcaaaaatcctcaataaaatactggcaaaacgaatccagcagcacatcaaaaagcttatccaccatgatcaagtgggcttcatccctgggatgcaaggctggttcaatatacacaaatcaataaatgtaatccagcatataaacagagccaaagacaaaaaccacatgattatctcaatagatgcagaaaaggcctttgacaaaatttaacaacacttcatgctaaaaactctcaataaattaggtattgatgggacgtatttcaaaataataagagctatctatgacaaacccacagccaatatcatactaaatgggcaaaaactggaagcattccctttgaaaactggcacaagacagggatgccctctctcaccgctcctattcaacatagtgttggaagttctggccagggcaattaggcaggagaaggaaataaagggtattcaattaggaaaaaaggaagtcaaattgtccctgtttgcagacgacatgattgtatatctagaaaaccccattgtctcagcccaaaatctccttaagctgataagcaacttcagcaaagtctcaggatacaaaatcaatgtacaaaaatcacaagcattcttatacaccaacaacagacaaacagagagccaaatcatgagtgaactcccattcacaattgcttcaaagagaataaaatacctaggaatccaacttacaagggatgtgaaggacctcttcaaggagaactacaaaccactgctcaaggaaataaaagagtatacaaacaaatggaagaacattccatgctcatgggtaggaagaatcaatatcgtgaaaatggccatactgcccaaggtaatttacagattcaatgccatccccataaagctaccaatgcctttcttcacagaattggaaaaaactactttaaagttcatatggaaccaaaaaagagcccgcgtcgccaaggcaatcctaagccaaaagaacaaagctggaggcatcacactacctgacttcaaactatactacaaggctacagtaaccaaaacagcatggtactggtaccaaaacaagagatatagatcaatggaacagaacagagccctcagaaataacgccgcatatctacaactatctgatctttgacaaacctgagaaaaacaagcaatggggaaaggattccctatttaataaatggtgctgggaaaactggctagccatatgtagaaagctgaaactggatcccttccttacaccttatacaaaaatcaattcaagatggattaaagacttaaacattagacctaaaaccataaaaaccctagaagaaaacctaggcattaccattcaggacataggcatgggcaaggacttcatgtctaaaacaccaaaagcaatggcaacaaaagacaaaattgacaaatgggatctaattaaactaaagagcttctgcacagcaaaagaaactaccatcagagtgaacaagcaacctacaaaatgggagaaaattttcacaacctactcatctgacaaagggctaatatccagaatctacaatgaactcaaacaaatttacaagaaaaaaacaaacaaccccatcaaaaagtgggcgaaggacatgaacagacacttctcaaaagaagacatttatgcagccaaaaaatacatgaaaaaatgctcatcatcactggccatcagagaaatgcaaatcaaaaccacaatgagataccatctcacaccagttagaatggtgatcattaaaaagtcaggaaacaacagatgctggagaggatgtggagaaataggaacacttttacactgttggtgggactgtaaactagttcaaccgttgtggaagtcagtgtggtgactcctcagggatctagaactagaaataccatttgacccagccatcccattactgggtatatacccaaaggactataaatcatgctgctataaagacacatgcacaagtatgtttattgcggcattattcacaatagcaaagacttggaaccaacccaaatgtccaacaatcatagactggattaagaaaatgtggcacatatacaccatggaatactatgcagccataaaaaatgatgagttcatgtcctttgtagggacatggatgaaattggaaatcatcattcttagtaaactatcgcaagaacaaaaaacgaaacaccgcatattctcactcataggtgggaattgaacaatgagatcacatggacacaggaaggggaatatcacactctggggactgttgtggggtggggggaggggggagctatagcattgggagatatacctaatgctagatgacaagttagggggtgcagcgcaccagcatgtcacatgtatacatatgtaactaacctgcacaatgtgcacatgtaccctaaaacttaaagtataataaaaataaataaataaataaataaataatccttaaaaataaaaaaaaataaaaaataaaaaataagcattcttaagttcccaaaaattatttcactgatattatatcatgtgcttcagaatcctattctttaactgataggatttaatctaatcctatgtgtttggcccacataggagacaataccataaagacataagccgatcagaaagctttgtaagagtagtggtataaattgggcttgtgctttatacctacacattcgtcaagaatcagtcttttaacatttttctttgataccatcaaacaagcaaaactatatgtattttgcttttaatttaataaacctttattaatgaagatgtatttggtaatgttatttttaggaatttcttggaataggttttaattttgctccaactggagacaccattgttaaacggtctgcaaaaatcatgctacagaattattagttcttcccaaacagtggcccttcagggaaaaataattcctgttttcataatttctaaagtatatttggttctgtttgaaggtcatgatgatcatgtggcatggtcttgggggcagtgctattttacaggtgattcattagtttatgaatgagtcttgtcactggtcaagttactccatcttctagtggatttcctcaataagcctaaaggttaattgataaagtaatcaatgaaaatagagtttacattttgttctgccatctctttttaaatatcagattaatgtcgctgctaaaagaggaatgaaatttgttggattcatatcacagcattattctccatctaaattctgcaatggaaccaaccatgatggagatatagaatcgatgctacatgtgagacacggttcagatgaaaactgtagaagttggaatgaagggacgttaagtgggcagtcatctgaaagcggaattgaggaagaacttcatcatgaaagtggacagtatcaaatggaacaaaatggcagccctacttcctctaaatcaagaaagggagaaggtaatagacaagattagtagaaagagaatatactatagtttaagcaaaataagtttttgaggttttttttagaaatatgagtcaaagtaaattgctaaagattataatgactaaatgaactaataaaaacctcatgatttttaaaagttattacagctagcaataaggcagggcagttttttagacagttgtctctggcagaacataaaatgccatccacataatgaaactttgtgttgaagattggtttctatttagtcatccaaaactccctcataaattggaggctgtacatgtgtaccaaataagtgagtctattaggtctaaaaagctgttctgatttatgtttgtactaataaacagcatgtgagaattttcattttggcctttcccatttcatggatggttttaacctttgaaattaattggctttctttgatcatcaactagaatgtgaaactggcacatcataatgaaacaattaatataacaatagtgcctgcatcctaaaataactttgaacaacagttgtattcttctgtgccagctagcaagtcttccaaagaaactgagagtattttattcatgcatttgggaccattcaaagttttctgatacctttgtgggcatgctttaaaaaagcactatcagagaaaagcaaaggctacatataccttagcattaacaacatgggctctggaatcagatacctcaatttctttataaaaaggggtaatagtaagaactccctcattgggttgttgtgagaagtaaataagaaatgtctacaaagtgtttgacccagtgcctggtacagaataaactctatattaactgctattaactgatccttccatcagtgttggcactggaggagcacgccttggtgtcaggctttctgggttatgttttgatgtgcttagcatcctatacatggcagagattcatttagccacataagctccacctcctgaagaaataactgggagcatttaccaacttagatcgcacccatctccaccatcatcaccaccaccctcctcttttctcacccattccctagctaacaatgtccctgatttttctgcaatgtaaaaagtataggaatgtgtattagtctgttctcatgctgcaaataaagaaataccctagactgggtaatttataaaggaaagagatttaattgactcacagtccagcatggctggagaggccttaggaaactgacaatcatggcagaagggaaagcaaacatgtccttcttcacatggtggcaggagagagaagaatgaaagcccagcaaagggggaggccccttataaaaccatcagatcctgtgagaactaactcactgttattagaacaggatgggggaaaccgctcccatgattcaactatcactatctgatccctcccacaacatgtggggattatgggaactacaattcaagatgagatctgggtggggacacagccaaaccgtatcagaatgtaaaagtgaacaagaggtatcagaattatggtcagagagctattcactatcttccacccattcctacctttaaactccatgtgagttcccacccttactttgagcaaatcagatgtctatttctattcctttaagttctaaatccaatatagtacttaatgtaactatcaatctttagattcctctctctcagtatttttaaagtatgtacttctcaataacttttctgtagcagtggtttttaattagaagagggagaatgggggtagcaataattcacaaaagacctctttgagtatctggtgaaatccatggaatccagatacttttgtctgtcataccggtgatgttaagcttcctaaaacacaaacataggtgtggatccactgaccctacgttaagaatttgccaattcctagtaaagcagaagatatgatccagcatttccatgtctgttctagggtcactctcacacatgtccaaagagatacaaagttggtaataacagaaaaattggaaatattgcatatgtccaccaaaaggagactagaacattggcatactatgtagcagttaaaataaacgaataagatctatatggttatttacatttcaaaggcatgttgaacaaaaggtcaattcatatctacagtaggataccatttttaaaaaaattttcaaactgtaaaatgttacacatcatttatggttatataagtgtgtattaaaagattaaaagcttgcatgagaatgataaacaccaacttcattatagtacttatttctggagaatagaattagaggataccacatagtagcctcaaccgtatccatttctcatttctttgaaaaaatagtctgaaacaaatatagcatattattgacatttgattaagctgagtgcttgtttgtatgcttggaatatctcatgattagtgaaaaaattaagaatctttgatcaacaaaattataattttccccttttttctccttctgaatgcctagcctcagataacaaattgtatacagtcttcaatgcttttgatgatgattcaacctcctgggcctatcaggaaggcatcctgtcaatgaaagtaacaagaaaaggatcagtcattagtacacttgatgctgattggctggagttaactaccttttattataaacaaggcttgtctttaattgattcttttgtattctgggaaacatctaaaggtaagttttatgttaatgatattttatatctgaggaatttgaacttgtatcaaaatcagtgaaaatgtttttacctctcaagttctatggctgaaaggacagataccattcctaaggaaataaattccagctgttacacagatatgtagctttaatttaaaagcttaaagctccttcagcacaatggacacttaaggagtgtgggcagaaatataacgtaaaatgttcactgttgggttgtaattgggaaaccactgtgtgattgactaggagaattttccaaataagatgtactataatagtccaaacgggaggtttatgatggcatttcgtgtttactattcatatttattacattatcccaattttgaacactatctaccatgtatatagtcagtctatacctgattctttctataatttgtacagaaaaatcatctttggtttagaaagtgacgttggctctgttcttacttctgtcttcaccttgtctttcatccctctctagccttcctcatttagttacagtggagtatgtaattatttgtgtctatcacaaaaataaagacaaactataaaatattatcaaaaatgactttctaggaagtttttttaagagatgagggttaaaaaaagaaaaaggaaaggtagtaatgagactagaaaaatgcattaggaaaggtgaagtttaggaaatccaggataattaggaactcttaaatctatgaggttagaggaaagaatgaaaagcaaataagatctccctataccttactattgttaaatcagcctagtatttattaccttaactgatccaactacagactttggatgatattttaaattatcaggagtcatgttccaataggcccttttaactagcagtattaaggaccaaacgaattggagcacccagaaatacaataccttgcgtaatgcttagcacatagcaggtgctaaataaacatttcttagtatttttcagtaggccaggcactgtggctcacacctgtaatcccagcactttgggaggccaaggcaggcagatcacttgagtccaggagttcgagactagcctgggcaatatggcgaaacctcatctctacaaaaaatgcaaacgttagtcaggcatggtggcagccacctgtattcccagctacccaggaggctgatgtgggaggatcacctgagcccagggaggtcaaggctgcagtgagccatgattgcaccacaacattctagcctgggtgacagagtaagacactgtctcaaaaaaaaataaaataaaataaaataaaataaaataaaataaatatgtgtgtgtgtgtgtgtgtgtgtgtataaaaattaaaaatatttcttcatattttttggttattggaagcctcttccacttggtcttttatttattttttattattattatactttaagttctagggtacatgtgcacaatgtgcaggtttgttacataggtatacatgtgccatgttggtgtgccgcacccatcaaatcgtcatttacattaggtatttctcctaatactatccctcccccatccccctgccccatgacaggccccagtatgtgatgtttcccaccctgtgtccaagtgttctcattgttcagttcccacctatgagtgagaacatgtggtgtttggttttctgtccttgcgatagtttgctcagaatgatggtttccagcttcatccatgtccctacaaaggacatgaaatcatccttttttatggctgcatagtattccatggtgtatatgtgccacattttcttaatccagtctatcattgatggacatttgggttggttccaagtctttgctattatgaatagtgccacaataaacatacgtgtacgtgtgtctttatagcagcatgatttataatcctttgggtatatacgcagtaatgggatggctgggtcaaatgatatttctagttctagatcctcgaggaattgccacactgtcttccacaatggttgaactagtttacggtcccatccacttggtcttttatagcaatagcaaagtttcataggaaggacatgggctttagaatcagacagaccaaggtttaaatcctatgtcttctacttattagctgtgtcatcttcggaagttagttgagctcactgagtctcagtttcttaaagaggaataaaaatactcctactttttctgttgtgatgatgtaacaagatataataaatgtaaagtgactcccagaatgcctagcctacagtcagagttcattttctggtgttagttttctttcctgccacttgttatgtgcaattacagtacttttagtgtggatcatctatttagaggttggtttatgcttcataatatctctctctctctctctttctctttctctcttgtttctcttctctccaaaaagtttagttgaagccatttcaaattttggtgtgtgactaactgctgaacagaaaaacaaaacatacacttttcacaatctctctcaggcatccctgccttgggtcttgcctgatgaaaataaaattagccacagcagttgccagccaggctctgtgtggcttttgttcttaaagcctcagaagctatttagagagccccagggagactccctctctcagcagctcatggggtggagggggtcacggagacgggggtgcagaatcttcccctctcagcagctctggaatgtctcattagacatttgacattgcaggctatggcaagcccctcacaagccacgtcagtctatggggtctggcaactgagcatgtcatttgggactttcctgggagtacacagggaagttgccaaggggaaattgtgaccaatatctgtgtcactgtgagaagcattcagaggaagcagggctgaattggtcgctttgttttggtatgtttgatgcctgacatctaaagcacatggggagggtggtgggggcagacaatgcatattttgtttggtcttgcttctgtcctcttccaaaatattgtcagaagttagcccaccatgaggaatggaagaacaaaaccagacagcgctcagaaatttaaatatattaccccacaaatcacgctgaataaaatacctccttccagaaacacgggggggcgggggggcgggggacagatgttcaaaaagttttctacttcagcagagtgtaaaagttgtaagatctgtgaaattccttctcagtgtccctccacactcactctaacagccttttctgctgtgaagcacaccctgggacacacacacaattagcctcgaggttcctacacttccccagcctccaaatgccccaccaccgccagagcatagtctttccccaccttaggataccacatcttaaggctacattttgattttttaagaattcttttcagacttcacttgttattcatttcaatctttccactcctataaaaatgtttgtgtggcactagtagaggagaggtagcacaatgaagagtgaggatggagttataacattgaaactcatttcatatatgccaggacccatgccaagcactgggtttataatactcttccctacttacaaggcgctagccgtatggcatcgggcagtcaggcagtgaaagtgtcaaaacatatatatctaatttcaaaactaagaaaattgtgtaacatgaccatagaggatattatggcgagagtaccagggaagaactcacttaaagaggtggtcgggaggtcccctctgagaaggcagcaatcacactgagactgggcagctggagaggagcagacctgtgagaaccagaggtaggccattctaggccggagaaacacatctaaatgtacaaagaccttagggcaggaaagaggaactgggaaaaggtctgtgtttctggagcaaggcaagcaacagtatggctctggacacaatggaagaggtaggcagcagccagtccctacagggtcctaaacaggaagaatgcaatgacagcagctaacatctattttgtacttgctatacaccagcgttgtgctaagcattttgcattcattaactcatttagtccccacagcaacctgtgaggtaaagatgattatggctgggcatggtggctcacgcctgtaatcccagcactttgggaggctggggtgggcggattacgaggtcaggagtttgagaccagcctggccaacgtagtgaaaccccgtctctactaaaaatacaaaaaatgtgctggatgtggtggcgggcgcctatagtcccagctactcaggaggctgaggcaagaaaatcgcttgccaggaggcagaggttgcagtgagccgagatcacaccactgcactctagcccaggcgacagtgcaagactccgtctcaaaaaaaaaaaaaaaaaaaaaagaagattattccttttttttattttaactttatttatttatttatttatttatttgtagatggggtctcactgtcacccaggctggagtgcaagggcacaatcatagttcactgtagccttgaactcctgggccgaggcaatcctcccacctcagcctcccgagtaaccaggactatatgcacgccaccacacccagctaattttttaaatttttttgtagacatggtctcgctttgctgcccaggttggtctcaaactcctggcttcaagtgatcctccagctttggcctcccaaagtgctgggattccaggtgtgagccatcgtgccaggccatgcttattctccttttacatatgaaggaactgaagcacagagattttacataaggtgcctgcattcacacaactagaaagtggtagagccacctagatggagtgtgtgcttttaccaagatatttattccaattcattcattaaagatttaaacagggagtcataatctcatttgcaatttttaaagaatttctagcaaggtgcggtggctcacgcttgtaatcccagcactttgggaggccaaggcaggtggatcacttgaggtcaggagttcaagactagcctggccaacacggcaaaacgctgtctctattagaaatgcaaaaattagccgggcatggtgggtgcctgtagttccagctactcaggaagctgagacaggaaaatctcttgaacctgggaggtggaggttgcagtgagccgagatcacaccactgcactgcactgggcagtgcagcctgggcaacagagtgagactccatctcaaaaaaagaagaaaggaaaggaaaagagaggagagaaaagagaagggaggggagaggaggggaggggaagggaggggaggagaggagaggagaggagaggagaggagaggagaggagaggagaggagaggagagaggaatttctttgccctcattatgagaaatggatcacagagggcaagagtggaagtgtggtggggaggctgttaagaggctgttgcagtgctccctagagagatgatggtggagatggaaagaagtggataggctaagattctttttagagttaccatatgtgcctgccctctacttcaaagatgctcccgggcccacctctgggcagttgaataccaaaaatgacaggggaaccaaaaaaactaaaatggagtgttacctctctgcacctttacaggaatgtcaatatcatatccagctaaaagacaagacatgtccagaaaagtaaaccattccctgggagcccttcaaacatgtgcttttcaaaccagggttcaagtaccctcaggatattcagccttgtgccaaggagtacacaagttcacaagtttgcagaatataactcttcctggagtgtcaatattactttaagattgagtggcttttatgtaagatgaatatatttgaaaagaatgggccagcacagtggttcatgcctgtagtcccagtactttgggaggccaaggtgggagaatccctgggggcctggagtttgagaccagcctgatggtagagggtcttgcctctgtgttgatggtggctgactgatcagggtggtggttgctgaaggttgggggtggctgtagcaatttctaatttaatttttttctctttggggatagagtctcgccctgtcacccaggctggagcacagtgatgtgatctcagctcactgcaacctccgcctcccaggttcaagcaatcttcccacgttggcctcttgggtagctgggaccaaggtgtgcaccaccacactggctatttttttagagacaggatctcactatgttgcccaggctggtcttgaactcctgaactcaagtgatccacctgcctcagcctcccaaagtgctgggattacagcatgagctactgcgcctggccagctgtggcaatttcttaaaataatacaatgaaatttgctgcatcaattggctctttcttttttttttttttttttttttttgagacagagtctcgctctgtcgcccaggctggagtgctgtggtgagatcttggctcactgcaagctccgcctcccgggttcacgccattctcctgcctcagtctcccgagtagctgggactacaggctcacgccaccacgcccggctaattttttgtatttttagtagagatgggtttcaccgtgttagccaggatggtctccatctcccgaccttgtgatccgcccacctcagcctcccaaagtgctgggattacaggcatgagtcaccgcgccacgccagctctttctttcacaaaatttctctctagcatatgatgctgtttgacggcattttaaccacagtagaacttctttcaaaatgggagtcaatcctctcaaaccctccaattgctttatcgcctaaatttatttaatattctaaatccttcattgtcatttcaacaatgttcacagcatcttcaccaggagtagattccattttaagaaaccattttctagactgggcactgtagctcacacctgtaatcccagcactttgggaggccgaggcgggaggatcacttgaggtcaggagttcgagaccaccctagccaacatggtgaaaccctatctctactgaaaacacaaaaatttgccagccgtggtggctcagacctgtaatcccagcactttgggagaccgaggcaggtggatcacttgaggtcagtagttcgagaccagcctgaccaacatggtgaaaccctgtctctactaaaaatacaaaattagccagacgtagtgacacgcctgtaattccagctactcaggaggctgaggcaggaaaattacttgaacccgggaggcagaggttgcagtgagccaagatcatgccattgcactccagcctgggcaaccaaagcaaaactctgtctcaaaaataaataaataaataataaattaaaatgcaaaaattagcctggcatggtggtgcacgcctgcggtcccagctactcaagaggctgaagcacaagaatcagttgaacctgggaagtggaggttgcagtgagctgagatcgtgccactgcactccagcctgggaaacagagtgagactccatctcaaaaaaacaacaacaacaaaaaagaaagaaaccactttctttgctcatccataagaagcaactcatccattcaggttttactacgagattgcagcaatttagtctccatttttaggctccacttctaattctggctttctcattattttcactacatctgcaattactttctccactgaagtcttgagcccctcaaagtcatccatgaaaattggagtcaacctctttcaaactcctgttcatgttgatattttggcctcctcccatgaatcataaatgttcttaatggcatctagaatagtgaatcctttccagaaggttttaatttattttgcccagatccatcagaggaatcactatctatggcagctatagccttacaaaatgtatttcttaaatatatgacttgaaagtcaaaatggctccttgatccatgggctgcagaatggatgttgtgttagcaggcatgaaaacattaatcttcttgtatatcttcatcagagctgttaggtgaccaagtacattgtcaataagcataatattttgaaaggcatctttttttctgagcagtaggtctgaatagtgggcttaaaatattcagtaacccttgctataaacagatgtgctgtcatccagcctttgttttccatgtctagatcacaggcagagtagatttagcataattcttaagggccctaggatttttggaatagtaaatgagcattggcttcaacttaaagtcaccagctgcattagtccctaacaagagagtcagcgtgtcctacgaagctttgaagccaggcattgacttctcctctctagcaatgaaagtcctggatgacgtcttccactgtaaggttgttttactgacgctgaaaatctatagttttaggccaggcgcagtggctcacgcctgtaatcccaacacttcgggaggctgaggaggttggatcatttgaggtcaggagttcgagatcagcctggctaaaatggtgaaaccccgcctctactaaaaatacaaaaattagctgggtttggtggtgtgtgcctataatctgagctacttggaaggctgaggcaggagaattgcttgagcctggggaggtagaggttgcagtgagccaagatcatgccaccgcaccccagcctgagtgaaagagtgagaccttgtctcaaaataaataaataaataataaataaaaatctgtagttttgtgcagccacctttatctattctcttagctggatcttctagataacttgctgcagcttctacattagcacttgctccttcaccttgcaattttatgttatggagacagcttctttccttaaacttcatgaaccaacctctgttggcttccaacttttcttccacagcttcctcacctctctcagccttcatagaatggaagagagttaggatcttgctctggattaggctttggcttaagggactgcttgtggctgctttgatcttctatccagaccactaaaactgtctccatcatcgagaagtctgttttgctttcttatcattcattcacttttattttccttcaagaacttttcccttacattcacaatttggctaactgacacaagaggcctagtttaccgcctgtctcagctttgacatgtcttcctcactaagcttaataataattcccagctttcgatttaaaatgagaaacttgtgactcttcttttcacttgaacacctagaggctatttcggggttattaattggcctaatttcagggaatgggggcctcgagaagagggagagagatgggggaagggccagtcagtggagcagtcagaacccccacaacgtttatcagttaaattcaccattttatatgggcatggttcccggtggcccaaaacaattacaatagtaacatcaaagatcattgatcacagaccaccataacagatagaataataatgaaaaaggttgaaatattgcaagaattactaaaatgtgacaccaacacatgaagtgagtacacacctttggaaaaatggcactaatagacttgttcaatgcaggattgccacaaaccttcaatttgaaaaaaaaaaaaaaaaaccggtatctgcaaaacacagtaaagcaaagcacaataaagcaaggtgggactgtgctagtgcctcccaatattgagagcaagaaaacacacctggagccacaaagcccagagttttcacattatataatcccaaagtaagaaagaaggagattataattaactatgtaattatcacaggatacaactaattttaaaacacatacctctaaaagggaacttggggcatgcacaattgtagatgatctagtgatgccctaaactttcaatcagaaacaaatttgattccactggtcacttcagtgtgacagtaaataagtacacttaaaggaaatgaaatagacactgtaattagaaaaccagcttgaactaggaaactaaacttcactgggttttttgtttgtttttcatttttctgttttgttttgttttgtttttgagatggagtcttgctctgtcacccaggctgaagtacaatggcacgatctcggctcaccgcaatctccccctcccgggttcaagcgattctcctgcctctgcctcccgagtagccaggattacaggcatgcgccaccatgcccagctaattttgtatttttagtagatatgggttttttccatgttggtcaggctggtctcaaactccctaccgcaggtgatctgcctgcctcggcctcccaaactgttgggattacaggcgtgagccactgcgcccagcctactgggttcttgggaaccactctgaacaatgcaaattcttcatggtgttctgccctaaccatgaattatgtcaaaaaaataataataatgatttatctcttaaaatttatagcctgataatgaaaattaaaacagaaaattacattaaaattacttttgtcttttttatctttaagcttaaaagatcctttgaaaagtttgcaggcctttagaatttagagagctgtcaaccagggaaactttaatgtgacattgtgctacacaaaaaccgaaatgtttaagcagcacatgaccatgggaaaaatgtctcctatagcaaaataggagacaaaagaacttccataaaatcagtttgtgtaggccagctggttattgtcaactattcaagaaaaagtcagagaggccctcccttaaaacttccttcccagcaggaattcttttgacaatgacttctgtttagggtcttcctgtccctgtttttcttatttttttttttaacccatcattgaggtaaagaattgttctgtgtttaggtcttttgaagtaatcttacctagcattaattttaatattatgtctttaatttcaaatattaacagttttatgctgtttctcttaatggttataattaacatgcatacaacgtatagatccgaaaccaaattttgatttcaaaatgaagatcacatccagatgccttttagattgattttccactcgcttctcactgtgccacactattttaccttgtttttgctattgtagtttttatatgtatagttggattttaattcagtgaagtaaaaaaaaaaaaaaaagtgttgctctttggggagaaagaaaaactttccaagaggaggaggagattattgattcagccaaaacaaatgtttttttttaattttattttattttattattgttattattattttttttttttaattgatcattcttgggtgtttctcgcagagggggatttggcagggtcacaggacaatagtggagggaaggtcagcagataaacaagtgaacaaaggtctctggttttcctaggcagaggaccctgcggccttccgcagtgtttgtgtccctgggtacttgagattagggagtggtgatgactcttaaggagcatgctgccttcaagcatctgtttaacaaagcacatcttgcaccgcccttaatccattcaaccctgagtggatacagcacatgtttcagagagcacagggttgggggtaaggtcaccaatcaacaggatcccaaggcagaagaatttctcttagtacagaacaaaatgaaaagtctcccatgtctacctctttctacacagacacggcaaccatccgatttctcaatcttttccccacctttcccccctttctattctacaaaaccgccattgtcatcatggcccgttctcaatgagctgttgggtacacctcccagacggggtggtggccgggcagaggggctcctcacttcccagtaggcgcagccgggcagaggcgcccctcacctcccggatggggggctgaccccccccacctccctcccggacggggcggctggccgggcagaggggctcctcacttcccagtaggggcggccgggcagaggcacccctcacctcccggacagggcggctggccgggcagggggctgacccccccacctccctccctcccggatggggcggctggccgggcggggggctgacccccccacctccctcccggacgaggtggctgccgggcagagacgctcctcacttcccagacggggtggctgctgggcggaggggctcctcacttctcagacggggcggctgccgggcggaggggctcctcacttctcagacggggcggttgccaggcagaaggtctcctcacttctcagacggggcgtccgggcagagacgctcctcacatcccggacggggcggcagggcagaggtgctccccacatctcagacgatgggcggccgggcagagacgctcctcacttcccagatgtgatggcggccgggaagaggcgctcctcacttcctagatgggatggtggccgggcagagacactcctcactttccagactgggcagccaggcagaggggctcctcacatcccagacgatgggcggccaggcggagacgctcctcacttcccagacggggtggcggccgggcagaggctgcaatctcggcactttgggaggccaaggcaggctgctgggaggtggaggttgtagcgagccgagatcatgccactgcactccagcctgggcaccattgagcactgagtgaacgagactccgtctgcaatcccggcacctcgggaggccgaggctggcggatcactcgcggttaggagctggagaccagcccggccaacacagcgaatccccgtctccaccaaaaaaatacgaaaaccagtcaggcgtggcggcgcgcgcctgcaatcgcaggcactcggcaagctgaggcaggagaatcaggcagggaggttgcagtgagccgagatggcagcagtaccgtccagcttcggctgggcatcagagggagaccgtggaaagagagggagagggagaccgtggggagagggagagggagagggagagggggagggggagggggcaacaaatgttttttaattgaaatgtttttccttcagtttcctatatgagttatttaaggatttagatggttttatgagccacttagtatttacaacccttcttaattgtaccctcttcctcacaggggaacatttgcctaaatctttggaaggattttttatctatgaagaagaaggttctggagttccaggttctagtaggaaaggaaatgatgccatcgtagtagaacaatggactgttattgaggtgagctgcagttttctgacaatttagctttacatatataaatataatatataatatatatatatgtttggtttgggtttttcatttgtttgtttgtttgtttttgtttttgtttttttgagtcagggccttactctgttacccaggctggagtgcagtggcaccatcacagctcactgcagcctcaacttcccctggctcaggtgattctccaacctcagcctcccaggtagctgggactacaggcctgcaccaccatactcatctaatttttttgtattttttgtagagacagggtctcgccatgttgcccaggctatatatattttattttacatgttaaagatcttcagtgcctggcacatgcagtatccttaaacacatatttgtttagtgtttagaatctcattacaaatgcatgaacaaacttctttcggatttgtgaaaaggtaatttgctttatccagtgttaaatgtttttgcaagatagagaaataattaactatgcataagcagcagtaagttcccaaaaattttaagccaaaaaacatcgcctggcactgagcttctctttacagcattctgtgacaactgattgaaagaaaaaaatttggtcactcaactagtgttttatctccaatcaaccaatgtgactgaggttttttttaaccttatgaatgactttcaaaggcaaaaatatccaaaagatgttctctctctcgccaggccaaatatgtacacacagcattgtccttcacaaacagagatgacattgctgctgatgttgtgcaccctgaattcagatgtcactgaatggactgtctttgaggtgtacacactgaattcaggtatattctgttttgtgtttgaggccctccctgacaggctgtttcagggatacttttacctttctgaccttacacaggttaaagagacatagcccattttcaaagaaactagaaaacccattgagtggggaaaaaggatttgaggaaagaggtagagctcttagcaaaactcaattccaaattaagaaaaaagcagtgaaaagactccccacacccaagcgcctctcatcttcaataccactattgtcactctccactcttgtcctcacttcctggtccctagacccatgtttctgaaatgtgttctagaaacttcttggatccaaatccgctaaggaactcgtgttaaaatgcagcctctgcctgacacagtggctcacgtctgtaaccccagcactttaggaaggtgaaatgggaggataacttgagcccgggagttcaagaccagcctgggcaacatagtgagaccccatctctacaaaaaattttaaaattaaccaggcatagtgtcatgcacctgtagtcccagttactcaggcggcagaggcaggagaatagtttgagcccaggagattgaggttaaagtgagttatgactgtgccactgcaccctagcctggatgtaggaatgagaccctctctttaaaataaaataaaataaaataaaataaaataaaataaaataaaatgcagattcccagctccccaaccccatgtattaaatttcgagaaccactgccctaacaagaccaaaggaaggcccaaacttcagacaacgggatggaaacctctctccattactagtgtttctaacttggttcaattatcagaaggaagcagagcagaacatgaagcccaggaaggctgcagcggatgaaagtgaactcccctcatcctaacacgcatcaccctttgttgtaattgtgtagttggttgtctttgccattagactatgagctcttatacttattcatgcagggatgtgaaatcaaaacagattatggccctctgctgcacactctggctgaattcggatggcttctgacaagcgtgttgcccacacctgtattgagacatgacaggtaaggcaaaagtatccttacatactatcatttaattctaatatataacttcatctgttagatagttcaattcaacaaatatttgtttaatgcctacagaaaacattacactgagcttcgaatttgattttatggaccttagaggttagtaaatatagtccttggcattatagatgtataagctgttaggctctgcagcacatatccaaaactgttctcaccccagcccacagccaggtttaggacacagtagggttccagagtgagcaggatggaggagcgcttctgccacctcccctccagtgtggtgagttagttccccttggcacatggacttggtagctgtttccattaaaataaatgcctacattagaaccaaatgccaatattttgtaagtactaactttccttttccttttctccttttactaactttcctggaaaggaaaaattgaatcttacttttttgagagagggaaacagagaccaagtaagtcattatgtaaaatgctttgctattcctgggacccagagatgtgtcctctgcccgctttggcatccaggaaatgactgactgctaaggctgtcctgcctgggcaggtgactacctgcagaggacagcacagtaccaactaggccttcccttttagcagagtcaattatggttcaacattctgagtgatttgcaggtgtgactaaggaaagcaacttccccttccttagtctaacccacttcactcaccttttctggccttcccggtttagcaacttagccctgtccagtatcccagtaccccacaacatttaaaaacctttgattggcatggctttatctgaaaagccacaccttcttcgggtagggaaaggaattaaggtggatataaagtaaagaaactcaagtttaaagaacaaaaaaggaatgtttgaagtaagcaaagcaattaatctacttttcttcccagagctctatagtaactgttctcaaattgagtgatgactccttgaagcatgatttcccagccttttgtactctgtgacatatctgtcaaataacagaatagtaataattctcaagattcagtcttcacaaaacaggagaattccatgacacccccgccctcaaccttgcaggatgtgtgacaggggtgtggcttgtttgttcaccctctgcatgctcaaaccacttacaggaggggaagcacacagatgggcaggtgcaggagctggggtgagtgctgtggggctccggccccatggtagcgtctaggggtgggtgcctgtgactcccaaagcccaagtaggcatgtgttacagtgatcttttagttttgccatctgcagagggcttaagtgttaaccagctcagtgtcctctcagtacctaggtccttgtccagcgtccaggaagaaccaagttgcacagggaattgaggacagtgattgtgcaggttttattgagggtagaggtgggatgcagtgggaagatgatcatcttccggagtttgaccgtccagcagccgatctcctctccaaccatctccagccaaactcttctcagcattcagatgctccttctcttatctctgccacgccattctgaattttaaattttaaaaatcaaatttaaaaggcaaaaagtcaatcaataaataaaaatatgtggaagctgtacatggtttctggccctgaaggatcttgtgagctggttaagcttacgtttcatatgtacaaaacaagggacttacattctggtcagggcagatcaagcttatgtattgtgtaatataatacagtaactaatcaagggctagatgaggtgtcttagtctataggttctgtaggaatattaaaaagaagagacattttaaactgtcaaagttggatgggatcatcaaatactaaagagattagagggcagcatcatcactatttagcagatttccatttaggaagatgctactaactctgtatagaagatagcagaaaaatgtaattttaacattaattgccattatgcaacaaggctcactacaactctcaatgtctactcttcttttgtatgccaaggagcattgtgcaatattggtgtttattttgttcctttgcattttgtaatttgagtcctgccaagtgcctgcaacacaggaaatataggatgaaggtcatttggtaacaaggattgttggtaaatcttgtttattctctgcctttttattcttgtgcaaatatactgtccctgtgacaagtcacatgctgttcttagctgcttcagtacacacaacgatagtaatcatggtcaatgatgtcatctttacaaataaagaaaagtgttatatacagttgaccttggtcaaaatagaggatagagcccgaagtttttagtctctgacactagaggaatggttatgagctgcccaggctttggagctaagcagatcttgttttaattatagcttcatcattgtttagctgtatgatttgggcaagtcatctaacctttttaagataaatttccttatctgaaaaattggacaataatatcaactttagtggattatcactatgactaagataatacacgcaaagtacctatacagggcctgggcatattaagctaatgaattagggctaatgttttgggacgcaatccttagcagaaccaaaatttctgataagttgaaaccaatgttcagggatggtagcttggcctgtcctaaatcaggatgtttcagaaaatgtaaatactctagttcactatatacaaaatcagcactgaagatgacaagataataaaagcaacagaaatacataatgacattattaagatatcttcttacacatattctcacacccagaaaaaagaatgtctatcatcatcttctttttgcggcccacatgtcgaaaacataacttaaaattactgtcagtgaaaacattcttccttacatgtgtttgtcttatatgcaacaacagagtcttaagtaatttcaacattctccctactcttctgtcacctaagccatacttgaatggcctatatataagctgtttttccctcactcaaatatatcctgttattggattacatacatacagtacgtccctaggttaaagttgttgcttcaattaccctaggcaatatcacaccactagggtttaaagctgcattaccatggaaacgtcatgatgctgtaatcttatatcaccacattattccagagttattgttgttggtcctgaaaacatgccagaatcccttcttaattgttatcactattaataataccaatgggctcaatcctttttccttcaagagttcaaggtgaaagttgacagtaactcttcagagcaaatttggtggaggaccaaaccagctgagttagcagctaatattgttaaaccaccaaaataaaggagaaggaggagctaaagttccctctgtttggctacctcaaaacagcagcatggctcccctctccaattctggagtgtgggcaggaatgtgcattgtaacaggaatcccaaagcaatttttatgcactttcagaaacactgaattctaaccttacactgagagagagaaagtgagggtaagggagggggtgagagagagagaactttagaacacaggatagaagaaagacatgcactcatttatatccagaaggcagaatttaaaggcaggggacttttggtccagctgaatcaagttgtactataccaagaacattaaaaaacctcatcctcaagtgaacctaatagacacctacagaactctccaccccaaatctacagaatatacattcttctcagcacatcacacttattctaaaattgaacacatgtttggaagtaaagcactcctcagcaaatgtaaaagaacagaaatcacaacaaactgtctctcagaccacagtgcaatcaaattagaactcaggattaagaaactcactcaaaactgcacaactacatggaaactgaacaccctgctccttattgactgttgggtgaataacaaaacgaaggcagaaataaagatgttctttgaaaccaatgagaacaaagacacaacataccggaatatatgggacacatttaaagcaatgtgtagagggaaatttatagcactaaatgcccacaagagaaagcaggaatgatctaaaattggcactctaacatcacaattaaaagaactaaagaagcaagagcaaacacattcaaaagctagcagaagacaggaaataactaagatcagagcagaaatgaaggagatagagacacaaaaaacccttcaaaaagtcaatgaatccaggagctggttttttgaaaagaccaacaaaatacatagaccactagccagactaataaagaagaaaagagagaagaatcaaatagacgcaataaaaatgataaaggggatatcactaccgatcccacagaaatacaaactactatcagagaatactataaacgcctctatgcaaataaactagaaaatctagaagaaagggatgacttcctggacacatacaccctcccaagactaaaccaggaagaagttgaatctctgactagaccactaacaggttctgaaattgaggcaataattaatagcgtaccaaccaaaaaaagtccaggaccagacggattcacagccaaattctaccagaggtacaaagaggagctggtaccattccttctgaaattatctcaatcaacagaaaaagagggactcccccctaactcatttttgaggccagcatcatcctgataccaaaacctggcagagacacaacaaaaaaagaatattttaggccaatatccctgatgaacaatgatatgaagctcatcaataaaatactggcaaaccgaatccagcagcacatcaaaaagcttatccaccacaatcaagtcggcttcatccctgggatgcaaggctggttcaacatacacaaatcaataaatgtaatccatcacataaacagaaccaatgacaaaaaacacatgattatctcaatagatgtagaaaaggcctttgacaaaattcaacagcacttcatgctaaaaactctcaataaactaggtattgatagaacatatctcaaaataataagagctatttgtgacaaacccacagccaatatcatactgaatgggcaaaaactggaagcattccctttgaaaactagcacaagacaaggatgccctctctcaccactcctattcaacatagtgttggaagttctggccagggcaatcaggcaagagaaagaaataaagggtattcaattaggaaatgaggaggtcaaattgtctctgtgtgcagaagacatgattgtatatttagaaaaccccattgtctcagcccaaaatctccttaagctgataagcaacttcagaaaagtctcaggatacaaaatcaatgtgcaaaaataacaagcattcctatacaccaataacagacagagagccaaatcatgagtgaactcccattcacaattgctacaaagagaataaaatacctaggaatccaacttacaagggatgtgaaggacctcttcaaggagatctacaaatcactgctcaaggaaataaaagaggacacaaacaaatggaagaacattccatgctcatggataggaagaatcaatatagtgaaaatggccatactgcccaaggtaatttacagattcgatgccatccccatcaagctatcaatgactttcttcacagaattggaaaaaactactttaaagttcatatggaaccaaaaaagagcccacattgccaagaaaatcctaagccaaaagaacaaagctgaggcatcacgctacctgacttcaaactatactacaaggctacagtaaccaaaacagcatggtactggtaccaaaacagatatatagaccaatggaacagaacagaggccttagaaataacaccacacatctacaaccatctgatctttaacaacctgacaaaaacaagcagtggggaaaggattccctatttaataaatggtgctgggaaaactggctagccatatgcagaaagctgaaactggatcccttccctacatcttatacaaaaattaactcaagatggattaaagacttacatgtaacacctaaaaccataaaaaccctagaagaaaacctgggcaataccactcaggacataggcatgggcaaagacttcatgactaaaacaccaaaagccaaaatagacaaacgggatctaattaaactaaagtgcttctgcacagcaaaagaaactatcagcagagtgaacaggcaacttacagattgggagaaaatttttgcaatctatccatctgacaaagggctaatatccagaatctgcaaagaacttaaacaaatttataagaaaaaacaaacaaccccatcaaaaaatgggtgaaggatatgaacagacacttctcaaaagaagacatttatgtagccaacaaacttatgaaaaaatgctcatcatcactggtcattatagaaatgcaaatcaaaagcataatgagataccatctcatgccagttagaatggtgatcattaaaaattcaagaaacaacagatgctggagaagatgtggagaaatagggacacttttacactgttggtgggagtgtaaattagttcaaccatgtggaagacagtgtggcgattcctcaaggatctagaattagaaataccatttgacgcagtgatcccattactggttatatgcccaaaggattctaaatcatactactataaagacacacgcacacatatgtttattgtggcactcttcacaatagcaaaatcttggtaccaacccaaatgcccattaatgataaactggataaagaagttgtgacacataaacaccatgcaatgctatgcagccataaaaaaaggatgagttcatgtcctttgcagggacacagatgaaactggaaaccatcattctcagtaaagtaacacaagaagagaaaaccaaacatcgcatgttctcactaataagtgggagttgaacaatgagaacacttggacacagggaggggaacatcacacactggggcctgttgtggggtggggagctgggggagggatagcattaggagaaatacctaatgtaaatgatgatttgacgggtgcagcaaaccaacatggcacacttatacctgtgtaacaaacctgcacgttgtgcacatgtaccccagaacttaaagtattaaaaaaaaaaaaaaaaaaaaaaaagtctggtcccagccaggaacagtggctcatgcctgtaatcctatcactttgggaggccaaagaaggcagatcacttgaggtcaggagtttgagaccagcctagctaacatggtgaaaccccatctctactaaaaatacaaaaaaattagctgcgcgtggtggtgtgcacctgtagttccagctacccaggaggctgaggcacgagaatcacttgaaccagggaggcaggggttgcagtgagccaacatcatgccactgcacgccagcctgggtaacagagtgagactctgtctcaaaaaaaaaaaaaaaaaaatctggtccctaaggacaagatgtgaataacaagagaaattggtcttctcactgtgatgctgagctctgctcccctcttccattttctgcagcccctgtagaacaggcccaacagcctcatgggcatcacagctcagaagcactggaagtctgtggagtcccaatctcaatctcaatcttcatgtggcagccaaagcagatgttgcacatttatatacatgcagttgagggagaggttaggatttggcccattctaatgcagttctctgctcttactaatttaaattttgcagaaacagtgtcatgtaattccatcatgagttaaactcatagtaatcttgctgtgagcagtattttgataaggccacattcttaaaataatcaattttgtctattatatatacttccagttaccatcgctctttctcatctgaacataaatgttaaacattttgtggggtgaggaggagttgggacaactaaactgtagcagtgcccttttctttgtttttaacacatactgatacctgagaaacaaattcagggtcataggcaaaggaactttgtgactaagcacatagctgcaaagttggaagccaaaatttaattttataattttccttttaaaaagcaaaattttatttcagttttcaaaagcaagaattaactcatttacttttgagttgcaaatgttaagccacgacaattaattaatgtgtaagatgaagcaaaagttaacataaaatacaaattaacaattctatttcttctagtctaatgaattttggaactataaatgaaagctttattattattattattattattattattatacttcaagttttagggcacatgtgcacaatgtgcaggtttgttacatatgtatacatgtgccatgttggtgtactgcacccattaactcgtcatttagcattaggtatatctcctaatgctatccctgccccctccctccaccccacaactgtccccagagtgtgatgttccccttcctgtgtccatgtgttctcgttgttcaattcccacctgtgagtgagaacatgcggtgtttggttttttgtccttgcaatagtttgctaagaatgatgatttccagtttcatccatgtccctacaaagaacatgaactcatcattttttatggctgcatagtattccatgatgtatatgtgccacattttcttaatccagtctatcattgttggacatttgggttggttccaagtctttgctattgtgaatagtcccacaataaacatacgtgtgcatgtgtctttatagcagcatgatttataatcctttgggtatatacccagtaatgggattgctgagtcaaatagtatttctagttccagatccctgaggaatcgccacactgacttccacaatggctgaactagtttacagtcccaccaacagtgtaaaagtgttcctatttctccacatcctctccagcacctgttgtttcctgactttttaatgattgccattctaactggtgtgagatggtatctcattgtggttttgatttgcatttctctgatggccagtgatgatgagcattttttcatgtgttttttggctgcataaatgtcttcttttgagaagtgtctgttcatatccttcgcccactttttgatggggttgtttgtttttttcttgtaaatttgtttgagttcattgtagattctggatattagtcctttgtcagatgagtaggttgcgaaaattttctcccattttgtaggttgcctgttcactctgatggtagtttcttttgctgtgcagaagctgtttagtttaattagatcccaaatgaaagctttttatgagagtgtatttcacaagtgactgagcagttacagataaacccactcttttgaaactggcttagttgtattgaaactgatacagattcatgcatttattttaacaagaatgttctttctgttcaactcaaatatttcttgagtgcctaatatgtgcaagacagtattttacccactctaggggcagacatacaggaactcatactctgctttgagaaacaaaccagttcatgacaggtcctgccatgaaggtctagagcatgtattctcaacgggagtgatatgtccccaagatgatgaaaattggttattgagagtgtgagggggtgaaaaaagtctcagctattacaatggtttgtggccctccaaaaggccacacagtatatacacagatatacagcatatctttggtattaaaatttaatggggagatattagggggaaaatatctgaatattgctcctcagggaagcaataatgaaaaaagagttgactataaggcaggtgaatatggtagaggaatcaataaaggaggagggcaggtctgtgaagctcatgatgtctgagggggcaccgtgatgaaagaatagtgcttccaaaagcagttttagaaaggaaaagtattccttgtggcagatagggctaacttggaatagtaaatgattttcctctaagataccagcactaatctgttggtagtggctgcctggaacgctgcaataaggattctgagactagaaccagctcagcaaaaaaaatgtggcattcaattagtgatgtctactatgtgcatgggagcggacgttgcagtatgaataccacagattatttgctttctctggcaaccttaagcaaagcaatgtcagaaaagtgcaggatatatttaaagaagagtgaattcaggtgaatgaattcctaaaaacttctcatttaaaacccaacaaattcggccaggcgcggtggctcacgcctgtaatctcagcactttgggaggccaaggcgggcggatcatgaggtcaggagatcgagatcatcctggctaacacagtgaaaccccgtctctactaaaaatacaaaaaattagccgggcgtggtggcgggcgcctgtagtcccagctacttgggaggctgaggcaagagaatggcgtgaacccgggaggcggagctggcagtgagccgagattgcgtgcactctagcctgggaagacagagccagactccgtctcaaaaaaaaaaacccaacaaattcaagactgatttttccaaaagaataaatgtaaagggggagggagcttttttatcatgtataaatctacaactattcttctacatgtcacccttaaatatactattttaaaacaatttttgtgatataaaacactcatatagaaagtgcataaaacacacgctgggtgtggtggctgacatctataatcccagcactttgggaggcccagatgggtcacctgaggtcaggagttcaagaccagcctggccaacatggcaaaaccctgtctgtactaaaaatacaaaaattagccgggcatggtgtcacatgcctgtggtcacacctacttgggaggctgaggcatgagaatcgcttgagcccaggaggcagaggttgcagtaagccaagattgcaccactgcactccagcctgggcaacagagtgaggctctgtctcaaaataaataaataaataaataaataaataaataaatagaatgtgcataaaacacaaatgtgcataattatgcacaaagacctgtgtcatcacagctggccaaaaaaatagaatatcacccacaccctagaagcacctcatgtgtctccccatcacattcacttcctccacacagagataacattatccccacttttaggatagtcatatccttgcttgcctaatagttttaccacttatgtatgaatccctaaacaatacagtttagttttgcctgttttttaactttatatgaatggaatcatatcatatatattcttttatgtgttgctgctttcacttaacattgtaagttttacctatgccgtgtgcagcagtttatttattcattctactatgtatgtgtccattcagctgctggtggtttgctgtctccagttgttggctatgacaaacaatgctgttctgagtatgagcagagatcttggtgcacacatgtgtgagtttctagaagcagaattgctgggtcatagggcacttctttagctttgttagataaataccagattcttttcaaatagattgtttccatgtacactcctactagcagagtgtcagagtcaccattgtctcaacacaaaatattatcatacttttaaattttgccattttgatcgagagtatgtagtgtgatctcagtgtgactttcatttgtagtttcctaattacttgctgagattgagcacatttacatatgtttattggccacttggatttttctttcataaagtacctgtctttttgcccacatttaaaattctatgtttttttgttttttgtttttgcttttttgagacagagtctcactctgtagcccagactggagtgcaggggcatgatcttggctcactgcaacctccacctcccgggttcaagcgattcttctgcctcagtctcccaagtagctgggattacaggcacccaccaccatgcctggctaattttgtttttctttgtagtttttttagtagagacggagtttcaccatgttagccaggctggtctcgaactcctgacctccagagatccgcctgcctcacctcccaaagtgctgggattacaggcgtgagccaccacacccggcctaaagttctattcataaggccaggcacagtggctcacacctgtaatctcagccctttgggagactaagctgggaggatagcttgggcccaggaattcaagaccagcctgggcaacatagcaagacccccatctctatacaaaatttaaatttaaatttaaaaaatctctacctataacttacttaaatataacagataaagagtcctttatttgttatgcatgctgcaattatcttcactaattctgtggcttgtctttttactctatgatgtctttaattaacaaaaggttttaattttaaaatcgacaaatgtacctatctttaccctttttagtatattgtttaagaaatctctcccttcattgaagttagtgtagaaaggaaagagtgaattattttaaaatatgagactttttttattattatactttaagttttagggtacatgtgcacaacgtgcatgtatacatgtgccatgttagtgtgctgcacccattaactcatcatttagcattaggtatatctcctaatgctatctctccccactccctgcaccccacaacagtccccactgtgtgatgttcccgttcctatgtccatgtgttcttattgttcaattcccacctatgagtgagaacatgctatgtttggttttttgtccttgtgatagtttgctgagaatgatggtttccagcttcatccatgtccctacaaagaacatgaactcatcattttttatggttgcatagtattccatggcatatatgtgccacattttcttaatccagtctatcatttttggacatttgggttggttccaagtctttgctattgtgaatagtgccgcgataaacatacgtgtgcatgtgtctttatagcagcatgatttataatcctttgggtatatacccagtaatgggatgactgggtcaaatggtggtggcgcacacctgtagtcccagctactcaggaggctaaggcaggaggatcacttgaacctgggagacagaggttgcagtgagccaagatcacgtcactgcactctagcctggcaacagagcaggactccatctcaccaaaaaaaaaaagatcttggcttttatatcttaaagaatgtagaacaactttctcccacctatccataaattctaagtactatagctctcaaagatgcttgaaattatgggcacatattgaaccaagaagaagttcaagttgtccttgtaacttcctacaaaaaaatttttttaatttaattatcagctgggggcagtgactcacaccagtaatcccagcactttgggaggccaaggcagacagatcacctgaggtaaggagtttgagaccagcctggccaacacagtgaaaccctgtctctactaaaaacacaaaaaaaaaattagccaggcataatggcgcacgcctgtagtcccagctacttgggaggctgaggcaggagaatcacttgaacccacaaggtgggggttgcggtgagccaagatcacgccactgcactccagcctgggtgacagagcaagactccatctcaaaataataataataataaaaaaaagatagtgtcaaactataaatagaacttttttttagtttcatttttgttgcttgtttgtttttacaactagtactagtcactgttgaacaaaactgaattcatttgggggaattttaaggcaaagctttcaatgattaatcttttatgtcacactttaataccacggatcatgaacttgctcctgtctcttcttccgtttgccacactaacatcaggacctgtgtggtttgcttaagtagtctaattggcccaagaaaaatgaacatttgtgtttattttcttcattattctccactataacttctgaacattataaggtggaatgcttaatttaggatgctaaataaaaatctggaatttggtaaaataagcttagacttatccactaattataaagttttctagtcagaatagaattaaactaacccacatcttcctgtagtcagggcttcagtgagctctacaagcaaatgtagtcactctacatttgcttgtagagctaatgcagtattgtagaaagagtgggaactagaggagacccaagacaaaggtcttaaaagctgagtctcaatttccctatccataaaatagagaaaatgtctgctctgcacaccttaaaggattatcataagaaacaagcatgttaatgtacacagaaaggacttggaacgctgagagcactacaggagtcaaagttgtttttattagtttagtccaagagatcttctgttagtgggaagacccaatcttcttgatagtcatgctgttgtcacagcaaatccctctccctcaaatgacattcacatagaatcttctttgtgctttcttatgaaatgcatagaagaaggcagggaagagaaaaggaaacatttctgagcatctcctatgctccagggtccatatccagggtgtaggaactttacatctactatctcattgacaatgttcaaccacttctgcctgcagagaactcagcctgccctggctgacctgtccttcatgcagcctgtgccctcgtgctgaccacagcaccagggatcatctgctgccctcagagatgaagggactagtcaatgttctcatcacttctctgtagactgttctctatacttgtcaccaaaacagtttgtactagaactttttcagaatttaaattactatctctaaatcaagcatattttccaaagttgcctttgttttctaatacatcaaagcatgactgtccattaaagtctaaaacagaaccagaagattcttaaatccctctcaggaagatactaagtcacttacttaactaacagcaccttttggatgaacctttttgtagggaataagagatgtgggctctgtcctctgaaaccatccagggcatttgaaacatcctctcaggtgccataatgaccaccagtttgctaagggaaaaatattctatcccaattctgtaaatagaattatctcaggaaccactgagaaccataagggacttacttgctttaccaaataggcgtccctctataaggcttcagacctctttcccttaggtctaccgtgattagagcctcgaaaccaaaacaagttccacatggtctcacagctggtctgaaagtagcaggacctattttaaatcaaaatggccctcagaaaaccagggacatagaagtttccgacatatctcaaattaaggatctgactatgaggacgtccccaagaggtaggcagatgctgaccttccaaagtcttatttgagcatctggatgctgtctaaagttgtcagcctttgacaaaccatctccatgtttgctgttttatctcattagactccccaaacagcactccccatagggccactggaaggcattactcgtcagtttcaaccgaacagttttaaagctcgtgcttaggccaggcgaggtggctcatgcctgtaatcctggcactttgggaggccgaggcaggtggatcacctgatatcaggagttcaagaccagcctggccagcatggtgaaaccccatctctactaaaaatacaaaaaaaagccagatgtggtggtgtgtgcctgtaatcccagctacttgggacgatgaggcaggagaatcccttgaacccgaaaggcagaggttgcagtgagcccagatcataccactgcactccagcctgggcaacagagtggagactccgcctcaaaaaaaataaaatataaaataaaatcaagctcgtgcttaaaaagcttctgccctttcagaggcaattccccttcacaccacaggagggataggtttgacagtgctcttgcctcactgaagtagctgtggagggttcgccctcccctgtgccacatgtttcacctctctgcatactgtgttaaatatcaagtagaacgctggcagagagaatcctatttcaaacatacaggcaatgattctcaacccaggatcgagcagtgtacttcacaccatctgaggacttttttccttgacatacacccctaacccacctacctccacctccaacccaccgagcctttgataagccacctccttcctctttctccttctcacactgcctcgggatccgctggtagagatactctttcataatttggggttgctgccagaaattgtgtcacactgcagagggagtaagtaactcctcgcccacattccaaattcgtttatattttagacaagtcaggtcaggaataaattggtaaactaaagatggtgaaaaatatgtgtcctcagcatggctctaggcagcctatccagctaaaattgtccaaaacatttaaggacacaagtcacattagaagaatatggtaaggctgggcgcggtggctcacgcttgtaatcccagcactttgggaggccgaggtgggcggatcacaaggtcaggagatcgagtccacggtgaaaccctgtctctactaaaaatacaaaaaatgagccgggcatggtggtgggtgcctgtagtcccagctactcgggaggctgaggtaggaaaatggcgtgaacccgggaggcggagcttgcagtgagccgaggtcgtgccactgcactccagcctgggcgacagagcgagactccgtcaaaaaaaaaaaaagaagaagaagaatatggtaaaatagacatcaaggatgcttccagaaaataagccctttttgtttccacactccataccaacaggaactgttggtgggttttattattcaaggaaaacagtgaatgcctttgatagtagcaagtatcaccaagtaatccccaaggcctgagaagtccacacttccaagtctgtctcttctggtgatggttcccaaatttactgtgcatcagggccacctgggcagcctggtgaaatggagattccaaaagactggagtggaccctggaatcaacaggcacctcaatgtttggaatgcacggtaaagtttgtaaagcctgccgtaggtcaaacatcagatcttagtgcattcagaattgccccatccacagttagtgtgaaagaactccctgtaaggtctccaacaatccctaccccaatgcgttcctgctttctcttcaagaagaataattctaccctgatccctgcttcccatcttcggatcgttccagacctggttctttcatgtaattctccacctggatcacacacctggaacattacccagaaggtctcttctgcattcccacgtaccctgtcccttgaatttgtttttcttttttctttacttttctttcttttaagataggttctctttctgtcacccatggtagagttcagtggcgtgatcaatagctcactgcaccctcaacctctgggctcaagtgatcctcctacctcagcctcccgagtagctgggaccacaggcatgtaccaccacacttggataattttcttttaatgattttgtagatacaagagtctcagtatgtttcccagactagtctcaaactcctgggctcaagggatcctcctccatcagcttcacaaagtgctaggattacaggcatgaaccaccatgtcctgctgtcccttgaatttgctctctggaagatattcttgattctgaaacttttctccccttcccttaactgcaccctatatttcactaaatgaatggaaaagtggaaggaaatcacagttgttgtgttccttcttgtggcaagcacaatgggaggctcttcatgcactcttattcttcacttatcacttattgaggtccctgatagaaaaaaatcagagaggctgggcgcagtggctcacacctgtaatcccagcactttgggaggccaaggcaggcggatcacctgaggtcgggagtttgagaccagcctgaccaacatggagaaaccccgtctttgctaaaaatacaaaattagaccagtgtggtggtacatgcctgtgatcccagctactcggaaggctgagggaggagaatcacttgaacccaggaggtgacgttgcggtgagccgagatcacgccactgcacttcagcctgggcaacaaaagcaaaactccatctcaaaaaaaaaagaaagaaagaaaaagaaaacacaatttacggattaaatgattaaaggcgtcagctattaggtactatgacagagtttggatttgaacccaggaactgtctggttccaaagccatggctttttccagcacacttcatgctcccaaaacatgtgaccagctttttctgtacacatgctaatcccgcccgtgtaccaaagcctcatgatgatttgttcccaaagttactacatattttataaaagttttttgttccaatcaaagataaggtcaaaatggaatgagattagactagaaacagcctttcaaaaataaaaaagaagcagtctcctgttatcactttgaggaagatttgatatttctcaaaattcagtggtatcagtaaggctgggattttcaaatggtatgcagttgacatataactctaaagccagagtttcagtgttgcattcattttccagaaaaagggctcagcataaaatgcagctaatagtaaggttttgttggggttttttgcataataaaagtcgtaactgagcaacattagctacagacactcctccccataaatccatggagactctgtgaaaagcatttcagaggaatacaaaccccaagcagtctttggcaaggggtaatttgccatgatgatagttaaataaggagaatactgagtagctgactacaaagaagcatctgaaaataaatctagctatagttgaagtccctcaattgaaaatggatgtaaattttctcacatgtggcagcctaaattagtctcttctgtttataaggcaagtttgacaatgcataccaagaagcttaaatcataagatttgacctaataatcccactcctaagtattcatttcaagaaaataattcataagaggaatatgatacatattttttataatagcatcatatatttataactggcaagaaactggaagcaaccttattttccaataataaaagaaaggcttagtacattttggtatcttaattctttgagttattatgcaaccattaaaaataggattacagtgtacaaacaaggaaaagagcattcagtgaagggcatagaaacaaaatataaatgtgcagtgatcacagacatgcaaattacacaagctgataaagactaagaggggaaacaaagaaatgaaaatattgatgttagcttggtgagattacaagtgtctttaaacattaaaattatttccttttatagtgaccatattcagtttttaggggtttttcctgtttttccagatgtggtttttatagaattatattttacattctttccatcactggaagaaaaaaaagatttatattttataattatttttggtcagaagattattttacaaaactacatatggaatgttctagccaattatgaaatatagagaattactaactcacaaatactaatactattgttttaatttgcagtgaagggaatttggctacaaagcagatcgtattccttcagaggccagttatgtggaattcagctgctcaaacaccagatgtgagtaaaattgatgctttattaactgaatgttatattgaagcatttaatccttaaactctcattgtaattccaaataagaaagcgtggacatgatatggaaacagtcctctgaaccaacctataagggaaatgtgctagcaatcaggcaacatgaaatagttccaaaggggattataatatgccatcacaaaatatgccactttggcaagaggattactttgagctgaaggcaattaagaaacagcagacacaggaggaactctctgtcctccacctttctgctgaaaaacaagggcacacatgtcactttataaaggcgacataaatttccatttgtaaacgtgtctaatcaccagagacaattcacactgaagagtctgcaaaaacaaaccttactaaaataagcttgatcttccattcgtttaccccatgtatttgccttctcacaatttacttccccagaagcccaaactccttttccctcatctagtcacctgtccacaacttaccaccctttgttaaaatggtatataaactcccaggtcttctacaccaaactgcctctttgggtttttgctacttttctgtgaaaagactgtgtgcattgaaaataaaccttttctcctgttaatatgtcttttgtcagtttaatttgtagttctcagctactgaacctaagaggagagaggaacagttttttctgcccttacagttctaaatcttgtgaatgaatgtgcctgatcttgcaatgcatccatgcaaccttggctatattgacctttggcaacacttttcttttatgttatctactcaagtttatattttttcagcactttgctgaagggctattctgatcctcaagtcaccttgatcttactggatgcacagctggaatacaatgattgaatgaggcaatctgtgcattaataaagcataacttgcaaaacaagaaatttgaaaatggaccagaaaactatttaaagtgattctttttctgtatctaaatcaagaaaacgttgttttatgttttcgggcaaagctgcagagatttgaaaaaagaaaacattgtttagtacattttaaagttatctaaactatcaaagagctagattgactgtgtgtataatacagtcatgctaaattgtctcacattaattttggaaagaggctggctgggtcagtaggtaaatcggtagagaggtagagaggttgttgggaagacggagaggcaggagaatagaatgaccaagtacacagaattagaaaccacattaaagcccacaagtgagcactgcaaccctccacaacaatgaggatgactcaagttcatgagtttattaaaaaatattctgtctaggccatgcacaggggctcacacctgtaatcccaacactttgggaggctgaagtgggagaactgcttgaacccaggagtttgagaccagcctgggaaacattggcagaccctgtctctacaaaaaattaaaaaataaattaggcaggcatggtggcacatgcctgtagtcccagctacttgggatgttgaagtgggaggatcacttgagcccaggagttcagtgctgcagtgagctgtgatcatgccactgcattccagcctgggtgacggagtgagaccctgtctcaaaaaaaattaattaaataaaagaaatattctggcccagcgtggtggctcaggcctgtaatcccagcactctgggaggcggaagtgggcggatcatgaggtcaagagatcaagaccatcctggctaacatggagaatccctgtctctactaaaaatacaaaaattagccaggcgtggtggcacgtgcctgtcgtaccagctacttgggagcctgaggcaggagaatcgcttgaacccaggaggtagaggttgtagtgagccaagatcgcaccactgcactgcagcctggcaacagggtgagactctgtctcaaaaaaaaaaaaaaaaaaagaaatattctgcctaaaagaagcaaaggtgggtatatgcagagaatggccagaaaaagttgtcctttcttcttcccccaaagcaaacttctcatcatgtcacacccttcttattcttttttttttttttttgagatggagtctcactctgttgccaggctggagtgcagtggcgcaatctctgctcactacaccctcctactccctggttaagtgattctcctgcctcagcctcccgagtagctgggactacaggcacacaccaccaggcccagctaattgttgtatttttggtagagatggggtttcaccttgttggccaggatggtcttgatctcctgacctcgagatccccccacctcggcctcccacagtgctgggattgcaggtgtcagccaccacacctggcctctttctttctttttaacattctacaaatggccattatttttaggaaaaaatcatcagaattcacagcctcatggggttttgatttactgagggccatggagttgtgcttgtgaagatgtaagacccaaatccagctacctcacagtctcttttacttaatattagatataaggtttttaattccccaaaaatatgcaggccctttttgtttatcatgttttacttttttatgagacagggtcttcttgtgttgcccagtctggtctcaaactcctgagttcaaacaatcctcccaccttagcctcccaagtagttagggttacaggtgctcaccactgtaccaagctcttttttgtttagctttagatactatccagtagtctctagtcatagcttttctttgggtaatctttatatttcactgaaatgtaaaattactggttcatttatataatgggaagtatatatagttggtttgtatcaatgacaaatctaataataatatattttataacttacaattcctcttctaaacggatttaccatttcttcatttgacaaatgtttaatttttctaacaagaaaccgcaggatcttgagattatttcagggtagaacttgtaggtaggagtcaaagtgtctaacagctataacagaaagctgatttgcaaattcagtttttacttaaggaaacaatttcttactctatctcagaatggtagtaatactttcaggacagtaaactattaatatcaatatagagttaatttattaccaaaatgttaatttagctatctcatatatattttgtgaaagttgtatttacaatatgccttgaaaaaatttatgcagtcacagatccataatagcactgttctttgttaataccctgaaatcagttattgtttggaaggggttgatgggaagactgctttgtttataaagtctttcaaagaattttttcaaagatgtttagttttaaaaacagttggtagatatttcagacattacaaatgttgtcctaggattgtcaatgagttttcattaaacaatagatttcatgggctgatagaaattaacctagagtctgacctttgaaaaaaatttcttcagccaggcacagtggctcacgcctgtaatcccagcactttggaaggccaaggcgggcggatcatctgaggtcgggagttcaagacccgcctgaccaacatggaaaaaccccttctctactaaaaatacacaattagctgggcgtggtggcacatgcctgtaatcccagctactcaggaagctgaggcaggagaattgcttgaacctgggaagcagaggttgtgctcagctgagatcatgccattgcactccagcctgggcaacaagagcaaaactccatctcaaaaaaaaaatttttctcttgtttcttttactaagactaatatcaagacttttcctacccaatttcactgagcacagaacagtactgttattgagaggtgacagagtgctggcaaccctcgcagccctcactcactctccgcgcctcctcagcctgggcgcccactctggccacacttgaggagcccttcagcccgccgctgcaccatgggagcccttctctggtctggccgaggccagagccggctccctcggcttgcagggaggggtggagggagaggcgtggagggagaggcacggggcaggaaccagttctgcgcacagtgcttgcaagccagggcgagttccagatgggcgtgggctcggtgggcccacactcagagcggccggctggccccaggcattgttagcacccaggccagcagctatggagggtgcgccgggtcccacagcagtgccagccctcccacactgccctcgatttttcaccgggtcttagctgcctccccgccgggcagggctcaggacctgcagcccgccatgcctgagcccccccgctccaccaccgtgggctcctgcaccaccggagcctccccaatgagtgctgccccctgctccagtgtgcacggtcccacggaccgcccaagggctgaggagtatgggcacactgcgcgggactggcagacagctccacctgccgccccagtgcagtatccactgggtgaagccagctgagctcctgagtctggtggggacttgcagaacctttatgtctagctaagggattgtaaatacaccaatccgcactctgtatctagttcaaggtttgtaagcacaccaatcagcaccctgtgtctagctcagggtttgtggatacaccaattggcactctgtatctagctaatctggtggggacttggagaatctttgtgtctagctaagggattgtgaatacaccaatcggcactctatatctagctcaaggtttgtgaatgcaccaatcagcactctgtgtctagctcagggtttgtaaatgcaccaaagagcactctgtatttagctaatctagtggggaaggtggagaacttttgtgtctagctcagggattgtaaactcaccaatcagcactctgtcaaaacggaccaatcagctctctgtaaaacagaccaattggttctctgtaaaatggaccaatcagcaggatgtgggtggggccagataagagaataaaagcaggctgcctcagccagcagtggcaacctgctgggctcgtcttccccacttggggagttttgtttttttactttttgcaataaattgtgctgctgctccctctttgggtccacactgtctttatgagctgtagcacttactgcgaaggtctgcagcttcacgcctgaagccagccagaccacgaacccaccgggaggaacgaacaactccagacgcgccacgttaagagctgtaacactcaccgtggaggtctgcgggttcattcctgaaccagcgagaccacgaacccaccagaaggaagaaactccgaacacatccaaacaccagaaggagcaaactccggacacgccgcctttaagaaccataacactcaccgtgagagtccgtggcttcactcttgaggtcagtgagatcaaggacccaccaattctggacacattatgttcaacaaatccatttcatgcccttgttgtgggggaggaaattgaggattgcacaatgaagaaagcgtatcattggatttttttcttcggaagttatggagacctttacttttggaatttgttttatatttcacagatcttctgcagtattctagatacttgtgactgtttttaaacatgaaaaatgtcatttcaaaatatttagaccctcatttactacctcagttttctctaagctattaagagaattcattttagttaaactagaaaactattaggaaaaaacataggagaaaatctttgtcaagtggagttaggcaaagagtttttaggggccaggtgcggtggctcacacctgtaatctcagcattctgggagcctgaggcaggaggatcacttgaatccaggagtgtgagaccagctggtcagctcagcaaaaccctgtctgcaaaaaatacaaaaattagctgggcatggtggcgcacacgggtaatcccagctacttgggggagtgggggtggggggatcgctggagcctgggagatggaggctattgtgagccatgatcgcgccactgtactccagcctgagcaacagagtgagaccttgtctcaaaaaaaaagtttttagacataagaccaaaagcataatctatttaaaaattgaaaaaatataattcatcaaaatataaaacttttgttctgtgaatgacactgttaacagaaggaaaagacaagccacaaactgggagagaaaaactcatatatcatatacatgacaaacgattttacccaaggggtatcaaggactctcacaattgaagagtaagaaaagaacccagttaaaaaataattaaaagactggaacacctcaccaatgaggatatgtaaatgagaagtaaatacatgaaaagatgcttaaatcactagccattagggaagtgcaaatgaaaactcataatgagatatcatacacctgttaaaatggttaaaataaaaaatactgacaataccaagaactggggagaatgaggagcaatcagaaccctcatacacagctgctggggatgcaaagtggtatatccactgtattagtccgttttcacgcagctgataaagacatacctgagactgggtaatttacaaaagaaagagatttaactggactcagagttcctcatggctgaggaggcctcacaatcatggcagaaggcaaggaggagcaagtcacatcttacgtggatggtggatggcggcaggcaaagggcttgtgcaggggaactccttttttttttttttttttttttttttttttttttgagacagagtcactctgtcacccaggctggggtgcaatggcatggtctcagctcactgcaacctccgcctctccagttcaagcaattctgcctgcctcagcctcctgagtagctgggattacaggcgcgtagcaccacacctggctaatttttgtatttttagtagagatggggtttcactatgttggccaggctggttcaaactcctgacctcgtggtccacctgccttggcctcccaaaatgctgggattacaggcgtgagccactgtgcctggccccatttttaaaaccatcagatctcatgagatttattcactatgatgagagcagcacggaagagacccatctctgtgattcaattatctcccatcaggtccctcccacaacacgtggaagttatgggagctacaagatgagatttggttgaggacacagaaccaaaccatatcatccaccctggaaaacagtttggcagcttctcaggaagttaaacagacatttaccatatgacccagcagtccctgtcttgggtgtttaacctagagaaataaaaacttacgttcacacagaaacctacacacaagtatttgtagcagctctgttcgtaatcacctcaaactggaaacaacccaaatgtcttcaacaagtgaatgaataaacaacagtggtacatccatacaattaaatactcagaaataaaaaggactgggcatggtgtctcacctctgtaatcccagcactctgggaggccaaggaaggcggctggccatgaggccaggagtttgagaccaactggggcaacttgggaccccatctcataaaaaagtaaaataagataaagtctgtctctacaaataaaaaataaaaatgaataggaaagaacttactgatacacataacttggattaatctcaagacagagtgaaactccatctcaaaaaaaagttttatgtactgtttctatacatcgtctgtgtgcatgcaaacatatatatgtagagagagaaaaaaataggaaaatatgccgaggttttaacagttgtatttctgggagatggaattataggtgggttttgcttttttctttgtttttgtcacattttctatattaaatgtgtgttatttttatgattgaatgaaatttttatttaggaaacacacaaatcttttacagcaaatctactcatatttttgcagatgtgggtaagacagtgtgaaaagaataaggtaagagacttgggctacagttccgggccagctattcatgaccttggacaaatcctgttttctttctgggtctgggccccacctctgtagaataaggggactgaagtagataatctccaagaactagttgggcttcagacttctacagtctaagttatgagaacatcacagtttggtttgttggaaatgttattatttaatgtgaaatgagggtggggtaggagaggtgatatgattgctgaagatgtatttattaaacttaacatgtcacacgtgtctgtgtgaagagactaccaaacaggctttgtgtgagcaataaagctttttaatcacctgggtgcaggcgggctgagtccaaaaagagagtcagcgaagggagaaaggggtagggccgttttataggatttgggtaggtagtggaaaattacagtcaaagggggttgttctctggcgggcaggggtggggggtcacaaggtgctcagtgggggaacttctgagccaggagaaggaatttcacaaggtaatgtcttcagttaaggcaggaaatggccattttcacttcttttgtgattcttcaattacttcaggccatctggatgtatacctgcaggcttgggctcagaggcctgacattcctttcttcttatattaataagaaaaataaaacaaaatagtggtaaagtgttgggacggcgaaaatttttgggggtggtatggagagataatgggcgatgtttctcagggctgcttcaagcaggattaggggcagcgtgggaacctagagtagcagaggtcaagttgaaggaggattttgtggtaaggggcaatattgtggggttgttagaaggagtatttgtcatatagaatgactggtgatggcctggatgcagttttgtatgaattgagaaactaaacggaagatacaaggtctgaataagaggagaagaacaggtattaaagaattaagaattgggaggacccaggacatccaattagagggtgcccaagggggttcagcataattacttgcttggttggagagttttggtgctctatccttgagtttttttatgttgtcttacaccaggccagattgatttaggtaaaaacaacactcttctttaaaaaatatacagagtcctcatgtttcagcagtgagtaagtcaaggcctcggcggttttggaggacaacctcagctagagagtcacttgggcctgaaggactgataaaatttgtgatacgtctgtgatgctagcagagaagtcattagagaggctacgaaaggtcatgacagaggttgaaatgcctgctattccagtaccaagaacattagtggacgcagaaagtcctaaactgacaagcaagggaattagtggaataactcttttttgtcgtgtcagtgtcatgtggggaacaggaagctcttccgtcccatttgcaaattgaattttgggagtaaggaaaattaatgtgcatgtgcctgtccaattagcaggtagacacatgtaggtagaggatacacagaggaagaagagaccttgtataaagcaaaactggaaatgcaaagtaaaaagatgagaaggagtgctgaaagaagtgtcttctacccagactcctagggatccagctagggcggcagctgtcagaggttttaatggggactgatagggtaactgcttagagggggaggttcgattttcatggtgtgtgagaaaacgatgagtatctacaaacaacttttcactgttatttatggggctgggtataagtaaacaagaagagggcctgggaggagagtctgacgagcaaggggaaggtagccaaggttggagtgaaatacagggtaagtgccttcgtaagcaataattactgctaatgtttttaagtttgcccgtattgatagagggcttatctgtaatacggagctgggaggctccaattgtttcagtggtgtgtgtagttgggctttggagatgaagagtgaaggaacatcacgaagg

SEQ ID NO: 583 - DNA, 1117 bp, Homo sapiens
ctctttgcttttgatatttcagcttcatcaaacccagaagtcatcaagataaattcaattctggatatagtaacaaaagtggaaaactattatcttaaaggatatattgtcggggctattcatcctgttatacaacctgtggggcagcgaaaacacctacctgcaagttacctatacagagtggtgctattgcgcttgaaattaagcccaaagaattcggcagcacccagtggacaaagacgcccaaggctcgtgattgaggaatgtcccctaacttctgaggcacaaacaaatgacgcagcaaaagaactgatagaaaagattaatgtcgctgctaaaagaggaatgaaatttgttggattcatatcacagcattattctccatctaaattctgcaatggaaccaaccatgatggagatatagaatcgatgctacatgtgagacacggttcagatgaaaactgtagaagttggaatgaagggacgttaagtgggcagtcatctgaaagcggaattgaggaagaacttcatcatgaaagtggacagtatcaaatggaacaaaatggcagccctacttcctctaaatcaagaaagggagaagcctcagataacaaattgtatacagtcttcaatgcttttgatgatgattcaacctcctgggcctatcaggaaggcatcctgtcaatgaaagtaacaagaaaaggatcagtcattagtacacttgatgctgattggctggagttaactaccttttattataaacaaggcttgtctttaattgattcttttgtattctgggaaacatctaaaggggaacatttgcctaaatctttggaaggattttttatctatgaagaagaaggttctggagttccaggttctagtaggaaaggaaatgatgccatcgtagtagaacaatggactgttattgagggatgtgaaatcaaaacagattatggccctctgctgcacactctggctgaattcggatggcttctgacaagcgtgttgcccacacctgtattgagacatgacagtgaagggaatttggctacaaagcagatcgtattccttcagaggccagttatgtggaattcagctgctcaaacaccagatg

SEQ ID NO: 584 - protein, 373 aa, Homo sapiens
  VARIANT (1)...(373): Xaa = Any Amino Acid
LFAFDISASSNPEVIKINSILDIVTKVENYYLKGYIVGAIHPVIQPVGQRKHLPASYLYRVVLLRLKLSPKNSAAPSGQRRPRLVIEECPLTSEAQTNDAAKELIEKINVAAKRGMKFVGFISQHYSPSKFCNGTNHDGDIESMLHVRHGSDENCRSWNEGTLSGQSSESGIEEELHHESGQYQMEQNGSPTSSKSRKGEASDNKLYTVFNAFDDDSTSWAYQEGILSMKVTRKGSVISTLDADWLELTTFYYKQGLSLIDSFVFWETSKGEHLPKSLEGFFIYEEEGSGVPGSSRKGNDAIVVEQWTVIEGCEIKTDYGPLLHTLAEFGWLLTSVLPTPVLRHDSEGNLATKQIVFLQRPVMWNSAAQTPDX

SEQ ID NO: 585 - DNA, 100610 bp, Mus musculus
  misc_feature (1)...(100610): n = A,T,C or G
aacttgaactgccactttggaaaccaatttggcagtttctcagaaaattgggaataggtctaccttgagacccagctataccactattgggcatatacccaaaggatgctccaacatataacaaggacacttgctcaaatatgttcatggaagctttattcataatagccagaaactggaaacaatctagaatgttcctcaatgaaaagagaatgtggtacatttacacaatggagtataactcagttattaaaaaccatgacctcatgaaatctgcaggcaaatgggtggaactagagaagattatcctgagtgaggtaactgagacccagaaggacaaacatggtgtgtactcacttataagtagataatagctgtaaagtaaaggataaccatgctggataatccagacccaaagaagctaagtagtaaggaaggctcaaggtggggcaagcgaatctcactgagaagaggaaataaaatagacatcatacgtagatgcgggggtggggggcgctgggggagaactggacagggaggggcggaacaggagggatcaagtaagaagaggacagagaaagtactgggaaagacaagtggaattgggagtgggtagaaatctctgggacaagctagaaacctagagcaatagaaaaatcccaggaatctatgagggtgactcctagcaatggggagtaaaacccttgacctccaatttgttctgtttacaagatgttgcaggggtaaagatggagcagaaattgagggaatgggcaaccaatgactgttccaacgtgagatccatgccatgagagggagcccacccctgacactgctagtaatattctgctacacttgggagacatgagtctagcataactgtcatctgagaggcttcacccagcaattgatggaaacagatgcagagatccacagccaagcattaggaggagcttggggaatcctgagaaagaaggggaggaaggattgtaggagccagtgggatcaaggacactacaagaaaacctacagaatctactaactttgacccacagggactcagaaagactgaagtgccaacctgggagtgagcttgtatgggactgacctaggccctctgcacatatgtaacagttgtgtagctgggtcttcatgcgggactcctaacagcaggagcagaaactgtctctaactcggttgcctgcctttgggaccctttccccctactagattcccttatctagccccaataggagaaaatacttgtagtcttactccaacttgatgtgccaagctggttgatatccatgggagacccccccttttctgaagagaaattggtgggggaaggaaaggttgggaaggaaggactgggaggagagtagggaggggaaactgtggttgggaaattaataaagtaaattaagtaagaaagttaattaatatgtttatgtttgtactcacagattagcagtgcctttctgcattggacagcagttaatgcagaggctgttaactagccaaagtgttgagaataagtggtttttgggtgctcagccctaaatggaacaactgcatcaaactcctcccacaggctcagggacatctcagaaatgggagtaggatgctatgaaatgctgtcctctgagcatgacacgggcggatgaactcacagcagttatggttatccacacaagacctatataaaattaatccaataaaaccactcaatattctagcccctctaaatggaatcaatggattacaaaattttttttaaattaaggatatgtaggtggaaggctatgtgttgagggtatagatgagaggaatacagatgggaattggggtagagatgatcaagatacaatgtatacccagataaaattgtcaacatgaataagagattaaaggattctttttaaagtagagaaaacaaaaatgtctgctttatcccattgtcttgaataagacctaagagagaagaaagactttgcaaaagcctgcatctcactcttttaccacagagccttccgctcattctaaagtggacaatttccaaactgtgtacccaagcaccccagaggctagtggcaggggtgcaaaccagagcctcacaggcctcccctgggtctccaggctacagaggcaccttctcctcaatccctttacatccccagagttcatgcaaacaaagttttctttgcttgaaaaactctctctggagaatttaggtcggttttcagtttcccagaatttaatacatttgtttacctgattcatggtactttcatatcacctgaatctaatacctgaatccaacctcggtactcaaaacgggttctctcctctgaacgcttgtccttggaggatttaataacaatgcatatttttgggagcaccgtgatacacgtgcttctatcaccggcagcttgggagctctcacgtggggcaaccctgtgttctctgtagccctcacccaaaggggagagcaagctgctgaacagcacgggaacagttaaatacactccctcggtgtttccccttccgtgggagtggccataggaagggcctgtcagctgtctgcagggggcccacctcctccatggcctcctgcattctcagttctcagaggtcagctcccattcacctctcaggctttcagtctcctcctgtagacgcctcttctgttctggtggtaaacagatggggggggggacagtaagcagggggagggaaaagttcattgtcattgcaaacgtgagaaccttctccagtcagctagtactttttatagtccctggggacacaatagagaactgaatattacatccctgccttcctggagtttacattcaagtggaaaaaaaaaagcaatttttaaaaagtacacagtagccatgttaagaagcaatgaaggctggagagatggctcagcggttaagagtactgactgttctcctggaggtcatgagttcaaatcccagcaaccacatggtggctcacaaccatccgtaatgagaaacaaatagaaaacctatgggccagaataagggggcccgagtgagtgggaagggaagggagggggggaagcaatgagagagccagcaaggtagaccacacctttactcccagcactctggaaggagaaacaggcatgtctctgactttgaggccagtctgttctacatagagaattccaggccagccaagagcaatgcgattggtgttgtttgatgattgatgatgatgatgatgatgatgatgacgacggatgatgatgatatgatggaggaagaagaagaagaagaagaagagaaagtggaggaggaatgttgtccatgaaaccaagcaggctggctagtgacaagggtgctacttgagaccaggtggtcaggaaaggttcagtcccgggtaacaaaaggcaccagccaagtcaatcaaactctgagcaaagagttgagccaaagtgataacatccaccaaggctctgggccagaagagttcagcctactccacaagcaggaaaggggacagcacggcagaacggcgagcaaggggaaccacaagtaaggagctagatgctgggccagttcacaggctttctgtggcaggcatacggagctttgctaagtggatttgggcaccactggaagatcctaggtagagacagacaacccagctttaagcagaaaggaggtagtgaggactttccccctcggaacaagagcacctgagtccagcactagaggtgggctagaaggcttagcgcactgggtcttataccccaggccccagagtgctatcagagggtttggaaatctaacctggagggcctaattcacagagatctccaacttccacacccaaagacttacccaatctgcccagcaagttttttaatacacatgactcaccacacaaacacatctgtggatctacacagactggggatcctcaagagctagtccttagaattatcaagaaaccagagagctgacagccctgttgaattgggagtgttctctggactccatggactgagaaagggaaagttctggcttgaagcctcatcacacagtgaatgctcattctagcatcgaggttctactctaaagatggtgctcatgacctcatgaaaggtgttctagaagaggggggagtcgtcagctctcccaaaaccagaccacagaagcagcaagccttgggcatctctttagctacaccatgaaaacagcagatgtacttagaaggttttcatgcaggcgcagtatcttctccaccatcggcctatctgtacacttagccttctctcaacccaggagaccccggcttagttcccagggcctcagggtgccttgaacagatcacactttttccaacacaatggtcttgagcatagagaagcaagaaagacgtggaagggccaagtgagtagacaccccacatcttcacctcaacgagagcacagactgagctcgtctgtatgttttcctaggaggcttcattttctcataaagaatgcaagacaagcaggggagattcggggacaggatcttgggaagcttgcagctagctttctactcggtccctttgggactggggcagggtgcagggtttgaggcaatgcacagagcaggtttaagcttaggttgtttgtgggtttcaaaggatgctctcgggtttcagagaaagcaagagaagaggtataggttgcatcctgagccagctttcaaagccaaggttggtgggaggtgaggcatgggattaggaggccctagacttaaaaagccatgaagcaaggagttctccactccaagctgtcccagctggggctccaggctgcccgcttccacctcaatcctttctgttcatttctgtagctggtatccgagccaagaggccaaactcaccagagccatgccttgcccagcccagatttcggatgatctggagttctttgtgaacgggaggaaggtaagcgacccgtaaagttagccctgcgacttgcagcaggaaacccctgactccaggggctccaggaatccgatctgagcctctcctttctgggacaagaagcttagctttacgaacccattttgacttctcttttctcctcgaagccaacaactgggtcctggcatagtgggaggcaggagagtcttgggattctttgcatacccctgggattctaacatggcacttcactgcataacctgatacaaattacttcacctccctgagattcggagtccccctgtggcctgtgcttcccacagctgttgtgaaattggaaggaaagctgcttctgtccccaggcaggagcccctgaggcacgagacacagaagcagtacgccctactgcatggtttgcgtttttgaactctagaagttttttatgaatccatctttgtaattctgtttatcaaatcaatttctctaaggccataattctcaaccttacaaattctgtgaccctttaatacagttcctcatgttgtggtgaccccccaaccataaaattagttttgttgctacctcataactgtaattttgctactgttacaaatcatacgcatccgtgttttctgatggtcttaggggacccctgtgaaagagttatttgatctctaaaggggtcatgactcacaagttgaaaagccaggaggcccctctttccctaggttgcagtctgttctgggaatatagagacaaggacagagcctctcgtggctactttcactagtagcctccttcctagcctcaccacccctcacacgggacactggctgctcttagtggccaagcccttcttgtcatgagccccattctactttccaagggcccacagcttctctgaactcttgccacctcccctccaagagcctctcgaacctctgcctgcacacatgtctgcactcaggagctggcccaggaaagcagccacagggctgttcatttgcctgcatgtgctctcagctgagtgcagcctcgccaggcacccaccaccacatccttctgtgacaatcactcatggctttcccattgagccagatccagttatgatcccagaatgacacggctgtagtcagaacagagaataaatcaagagatagaggggagaggggaacaaagaggaggggagagtgttgtgttttataaaaagaaaaaaaaaataggagagaccagagatgtttgatagaggcaaggtatggtgtggaggaaaggggtgcctcagtgggcccatgctgaggtatcccttccccctgagggaccagccacacgatgctatagtacagaaaagagtttattcagggcatggggaggggagttgagagaaagggggagagggagagaaagagagagagggagagagggagagagagaatagtacatgagagagagaggagaggggaatggggagagagggagagcaggaggagagagcaagagtaagagggcaagagagtgaggaggggacaagcagccccttttatagtgagtcgggcatgcctggctgttgccaggtaactgtggggcagagctgagactaagtgccaacagagcggagggaaggggaggcagtctgtgtggtgggagtctgttagatatttctatggggtggggtctgattacattctcggtaattgtttgtaaagggcctagtgtgagaggaagggcattggagggtaggttttgttattattctagtgatgaggtcctcccccccccccccgccccagccccagttctcaccttagaaatatatgcctagagatttctattccttgaggtgtacaaaaatgtgtgttccccttctgaggagaaaggaagaaggcagtgttggcccacagaaccttccttgcctgtcacacagctgaatgacgagaggtgctcacatgacatcccagggcaaaagcaataactatgctaaaggatacaacagggaaagagaaaacaagcaagttcctgtgtgacttgtgatgtgaacaccgcctttccaggggaaggatgggccctgagtaaggtgtcgaggccaccagcaggccactccaatggcaggggaccagcaggccactccaatggcaggggaccagcaggccactcaaatgtcaggggaccagcaggccactccaatggcaggggaccagcaggccactccaatggcaggggaccagcaggccccagagcctctccaggacaacagtaactttcccccacggactttctgcgacaaattccagaccccagagatcatccagagttccctaccaggtatcccagaaatggcagacacatcccacccacctcccctccctataggaccactccccatcccctgaacaaacacattccaagtttaaaatacttctaaagattctgttgggaggttccacgaggccgggcaacagagcagaagtgaaaaatacaaagtgcagatatgtttcaaaagtggaaaaagtccagagacagcatcccacagcgtcccacagcgtcccacggcttccaccacacaaatcacatttctacacgggccttgtgaggctcctctcctgtaaataaacacggtttcccctctgagcaggtctggtctgctccatcctacctcctccatcaaacagatggagcagactgccacagacattctgctgagtcagccattcaatcccataatccctcctgtttccaatgcaggtgacggagaagaatgtggacccagaagtcactctgctggccttcctgagaaagaactggacccttctgatcacagtttcagccatgtttatagatgccttgtagaatgtatggagtgcgttagctgctgcggttgtgaggtctccagccctgtcacccttgcctgcttttgcttttggcagtggctttaagaatatcagattagttgggctggtgagaggagaaagcttcccggcattgcttacgtgtgattgaatagtgtgaaatagaagctaagccgtacacttgggctctgccatccaccggagtgttacataatagaggcttgggttgcctgtgacctgccccttacaaaaccagattctcagattcagcaattggatacgacaatttcttcaccttacatctattttcttacaccagatgtccccaccatcttatatgctggaacacagctcttcataatgataaacatattttaattagtaagcccaatgaattgctcggggaagccaaaacataaataatgaaactcagggacaggagcaacagattgatgaaactgccccgaacaagctttgtgtgaaagcccacgtggttgctaattagccaccaatatttgaaagtcaaaacattttatgtttgaaataatcaagacttccatttgtcatggcaagtggaagggtagccagcctgtcacacagtagctgtgcttagagctgagtgaaaactgtcattggtcccctctctgaaataagactcagggactcgttttcccacccaggccctctttacttagataatacaactgaaccaccgtgaactgatgaaccaacagaacagagagagagagagagagagagagagagagagagagagagagagtagcaaggagttgatgagtttaaagccttttttagccacaactgatcaatcttatgtggaaacaggagaagaaagataaatgcagaggcagagcccagctttgggattatctggagagagttagaaagaaagatgctcacggtgggacccagaggcaagataacagacctagagactcatcacccacttcaggtgcaatgcagccagaggaaggctgggctattacaagccaaaattaataacgtattgagttgttaaaaatagttcttctccccacaattacatgaccagaaccagaagaagacaaaaataccttgtactgaagtagggtctgtctaaggagttttaccttaacaagatgtatatagtgagctcgcctgacaatgtaggtatcactccttcttctctgcaaatagaaacaagccagaatgggctagtttgcccgggaccacatagctaagcaatggcttctcagacagggtgtcatcccacaaagacctttcacactggtgacaccctaaggaagcagctagctcagaggcaaaatgtctgctttgcatcttttccttgacgccttccttcccagtatgcctcacaggaactaaggatgcgtgtggaacaggaggctgtggggcctgcacagtgatggtgtcacaacacgatccggtgtgcaagaagacaaggtagctacccagggtccagtagccaagagagaggtctatccctgcctgacttctgttctaccacataactaagaaagaccagatcctagtgtcccactgaaggaatccccaccaatgctgtgagccctttactctgattacgtaactatgctaacggccttctgtatatcacttctgaaacttgaacttcatccacatctttggttcaaaacacagatcccccaacatggttaaatgactttactcagagagcttaaactaacaagaaaatgaatgcagagtgcactagtataggcaaaaggcaaaaagcctttgcttgtgatgcggccattgctcaacaaagactaatagaagttcagccacccttctggtgacatgggtccttccccacttggggaaagggagtttaatgattaagagctctcaggggatctattttaaggctgtaaagatttttctggtattcaggatgtgtccaggtacacattaaggacccccagttctcataggtgtcatagaatgagcagagagtgctttgacttgctcttatctgtcacccctgccgtcttcccacctccccatttcaccagagctgtcacctctgcagtccctgtctcccatgccccccaacctggccatcagagttgcccttcttagttcctggttctccatggtgcaggactgtgtcactttacttggttttctttgtgtttcccacacaaagacacttctccgtcatggcatgcctggtgcccctgtgctccctgcatggggctgctgtcaccaccgtggaaggtgtgggaagcatcaagaccaggctccaccccgtgcaggtaagcacacattctaatcttctcacttctgaacttcactttgccaaaggctgtgcagactgtctgtcccacctccaccttctgggtcacaatgtaggagctttggacagctatgccaggcaatggtggtgcacacctttaatcccaatacttgggaggcagaggtaggtggatttctgagttcaaggccagcctggtctacagagtgagttccaggctatacagagaaaccctgtctcaaaataaacaaaacaaacaaaaaacaaaagagagagagagagagagagagagagagagctaaaacacaccttcatttgattaaatggtcatcatttattgcttcttctatttgaataatattaagattttaaaaaccttgtctgaaaccaatttaatataaactgaagtggatattgaacacaggctatagaatagatgcctctgaggggctggggatatagctgttgatagagcacttgcctaccattcatgaagtccttggaatggtggcgcatacttataaccccagtactggggaagtagagacagaaggagttccaggtcatcctccactacacagtgaggtcaaggccagcctggaatacatgagatgctatatcaaaaaaccatacccatggctggagagatggctcagtgttaagagcacttccagagaatccaggttcaattctcagcacccagttaggtcaattatatcagcttctaactccagtgcccagggggtctaatgtcctcttctgacttctacaagcactacacaaatatgttacacgtacatatactcatctattatccatatatatccatgcacacacacatatggtatgccctatcaacggccatatccccatcccctcagagacatttactctatagcctgtgttcagtatctactctagtttatagtacaattggtatcagacaacgtttttatgagataaaattcagggatcattccctgtagcataaaggtttgaggcgtaaaaatcagcatttggctgagggaagtctgagagcaactccctagaggacggggacactccccctccagcactcagcctgctgctgaagcggcagtgttgggttgaacggtgatgtgacatgtgctggcactgattctcctgtcattgtcgtgggagtttgggaagccacagtcagatcaaccaatgctcagggattttaggcaggagaagccccagggtttcttgatttaaccacttgagagtcaactccaaagaggtcagtaaagataaaggacccagaaaagagtctgctaggaagtcgtacaagacactcgcagctaagtccacacagtgggaccccaggcattgtgcactgaatctagagccaagcttccaagctttggtgttcacaagagtcacctggaacttgctaaaagttcagattctggccaagcagtttggagcagggacctgagttccccaccatttcccagaagaccatagatcacgcttgaaataacagagaccaaaatcctcggtccctgaaagctaagtcttttgagctgacacagaaaatattaaggaagacaacaggagatcagcaatggtctccatgtcagtcaaagccgcacagcctcccatgagatctaagccgtggaagatgtacgggtgttcaagaaaaccagttttgaaacttacgtgcaccctcctaataattactaattcctggataagtgttctcactgggagtgccggctgcacactgctaattcccaaacagaagtctcagagcatctgaccctgaaaagtaattaaagttgtgagcggtaacttctgaacctcttgcctttgggagctgcctagaaaggggaatatacagaactggacaacggggcggggcacatttgctcagagggtgagaatggtacagatttgtggaccctggagagaatctgaggcggcagatgtgaccacaaatgtatgcttccaggagaggatcgccaagagccacggcacccagtgtggcttctgcacccctgggatggtgatgtccatctacacactgctcaggaaccacccgcagccctcagaggaacagctcatggaggccttgggaggtaggtgtgacacaggaggcaggcagaaggaaaaggttcttcatgctttcccacaccaccctcaggatcttcctagctctgctccagtgccaagccacagtcatttctaacatttgtgtgcagacacagacgtcaagtcatctgcacgcggcccaggggccaccacacttctgtctgctgacttatcacatgctccccagggaccggaatccatgagcctacccaacaaagcacaactggctgaaaacacagaaagttctcatgcagttctgggagcattaagtctggagtcgagctatcggcccaccagtgctgtgtctgaaagccctgaagagactgcttccttattcctctcagccttattcctctcagtcagctgagtcttggcatttctgagctcatgagctacatagctccaaactgtttctacctcacacctttctccttgctgtctggcttatagatcttcctcttgtttacagacatcagccactggggtaggcccgccccaggcctggacaaccttgttacctcttgattccactgggagagatcttattattcaacaaggttatgttcatagttgccaggacttaagactacaaagagtcttggtagagcggcatatatcaattcataataagcctctcatctgaaagatttgtaacagttttagttttataaacatatagggttaataaacattatcttcaggtgttatcaatctgtaaacaagtcctcaattcaaaggttgaagacagatgaaaatagatatgctccttatgtgccagctgctgatctctctctctctctctctctctctnnnnnnnnnnnnnnnnnnnntctccccttctccccttcctccctccctctctcttgctctcgctagctctctatccttatctcttctttcaagtgcagaaaaccatagctgagcatatgatagagtagttattatgggcaaaagtcctgggttcaattcacaatataataataataataataataataacaataacaataatcagagaatcatactaattcatctaaaacccccaccttccccaggtctctcttcagcagctcatcagccctaaaacttgaccaagcccgatttgtcatacttcctgctctctacacgactcctccaggccagtctctccccatcttgttcctgctgctctgagaattctacccattctttactaacccatagcttgcacatcctttgagcccaaacttcttagtcaggccatcagagatgaactctagtctacactctctctctaccctcagaccttcaccttcatccttggaagcgtaaggattccagactttaccatgcaacagaatggcccactggtctcttaaatgcaggctctcctgcctgtctccagatgctcaggttccagaagggcagattcatgttcttaacaaatacaaccaggtgactctggtgcagtgacctaagagcctctgaggaacacacctggtagcccacccgtggcactttgtctgtctagtgacaccttggggattgctttcttaagatctcactgtcttacataatttaaaatagttattgtcaatagctaaacatcagggctaggatcatagctcagaagtagaatgttatcctagcatgtccaaggccctgagttctactccccagaactgacaagaaaatctgttagatctatttcggtttttaaaagaatccagtagagtggctggagatttggctcagtcattaggagagcttgctgctcttccagaggcccagagttcagttctcagcacccacatttgtggcttacaagcacctataacttcagccccaggaaatgcaataccttcttctgacctctaagagcatccacacacagacacacataaataccaataaataaataataatctggaaaagcaagcagtagagacaagcaattcacagctatgcttcccctctgatcagggaacctctgccgctgtactgggtatcggccaattctggagagcggcaggaccttctgcatggtgagtacacaagggtaaggaagtggagacacgtcatacggagtaggaatgagaagaacaggtgatcaaagctggggacacaagaatggggtttgtaagaccatcacaaccgactaaaacagacaaatgtcaccgcagaggggagggggaaagggcgaggactcattggagttgccagtgcttgctgtagaccaggtgagcattacaccacctttgatgtggtctagaaccacagaagaaagtcaggtgagctaagaagctgtctgtccgacactcaccaccagtgagacagggcatctatccagtgcagctgaaatgttgtctgtaaacactagaagtcaagccaggctttgctgttgtgaagaaggcttcttctgagaacccaagcaactgggaatgggaaaatagaaaaagaaggagaaattgcaacgtagaagctaaaattcactccaagaacacagggaacagcctccaaaaatagagatatctctctggtgaaaactcaaatgtcttgcttggcagttagtaagagctcaacaaataattactcataatgagaatgctgttgactgaatagcatttggcagacactcaagatggtgcatctgatgacgctctgctgaggacacagtggatgtggggggagacattaggcagaagcaaagggtacctcacatcttggaggagccccctgtagttcttacccagctattcaggagtccatagggataactcgatatgcttatctttttctggatcattctccatatagggcttcaactgtacctttaggctaggtactttagggaaggtcttaggagccaatgtgtgcacacaagttcaatgaagctccttatagagaaagagcagacactgggctggagtattcacaggagcatatgcagccactacagagccatatagaaagagaaagcagaagccacaggctaacatctctgtatgtgctcctgcctcagttccacatgccgtagaggtagacctggaaatatacagtgggtgtgtcccaaagccaggagggtattctggtcatgtgtgtcccagatttctattgccccgtgagggagccagagttgacacactaaaaagtggaataaagagactgtacactcagctgattgctgctgtaagtggggaagcatgagataccagcaagagtgctaaattaactcctttccctaagagtgtaggtactacctgccgctcctggaacacaggtgctggagataaagtccaaaatgagttccaatagctcaccctgttgccagccagtctcatgctacattaggtgaaagaaacccagccccaggtaggacacaggtttttattacccactgaacccaaagaagcacgattttcttcagcctccatcgacccacgtccatcctggggactctaagagcttatggtgggagaggaagggctggttgctctgccagctgcttttgcttcttggacagagtcagcaagtagcagcaaaagatatggggaaaggacagggaattcaaacagttgggaggaagtgctttgcaagacaggagagaccacctgaggaagcaggtacaaggagtggggttgcaagaaacagaaacggatgagctgcaagcagggaccacttaaaaactgccataactcacccagctgcattccccttccgtaaaggttccatatgaattaaatgagcaatgtcccaaaatatgtatgcgctgtagtggctgtatcatggttgtcctgaaaaataccatttaaaaaatgtattttaccactagtcattactctaaaatagctcagatatgtactttcaatgaatggtgttcatctactgagtacagcatagatatgatataaatacaatataatcccaaatatgtcaaaatgccagtgacctgggcagtgggtgtttctttacatttctgcacattgtgctattttatattacttgtttatatggtatgtgtttcataaactacctcataaaataagtaaataagcaaagcaagatcagccttgtgctatccctgtaagtagaaggtggcttcagagtctgaagtctcgtatagattgttcaaaccttcagggcacgaccttatttgcctataaaaagtattattcacatacagcacttcatgtcctcaggagccagacggttgtccacagaaaggaacaggacagtgttgcttggatcagaaggaaagtgactcatcgggaagcaaaagtgatgtgagtccctcggtctgttttgttctctctctgtgcattgcttaacgcccacctagctctggcagcgccgagcatgcataggcatttgatggacggctcccgctttgtttgcaaccttcccagcacttgcaggaagccccgcagtttgcaggtatgtagtgagcatagttgctcattcagcaatcacaatcggaccttccccttcatagacttcagactagaaaggccggaacaaaagggaaacaaaaacctcttagatggcagaaaagcatcgactgcatgaggtcacctccgtggttagaaacaagttctaaagctgtccctgctcacacagccgtcctcggtccctgagctgagacagagacagcactgtcagctggcaagctaagtccactgcagcattccagcctgtggcactatcatctgacagacattcctttttaaaagatccaccatcctgttctcacaggggtcgaatagagaggttaataagatcccagctaacacctcttaggctgtgaaagagctcagagccggcctgagaaaaaactgcctctcatcctctttgtgtgtgtctgtgtccttcagacccacctgtccacaagcacctcccgctgataccctttctttagtctaaagaaggggtgcggtggaataaagaggtgttacccgaggaggcgagctacacacccccaaagtgactcgaggaagatcaacacttggaagagtcaacacatcccaaagtccattccccaccttgcagactcaggcattcgggttgagcaccctcaggtcgggcgctaggtaccacttgacttaatgaagccaaacaccaagggttgtgtttaagctagaatgttcctcggtatttactcctaaggagaaacacaactataaagtaaaaccccatcctttcctcacagtcacacattctgtggagaaggctgagtgctcagtgacacggcagttcacaggggtgtccctgctgggtgacagaccaggtgtctgcctaggaccacctctacctcttactctctgaccatttttcatttggacaacggttaagtcttgctgttgagcctgtttagaacttttcatttctgcctgttgattcactgtctggcaactttgattctcacgtgaaatctttttttctaggttttagaaccaaatcattggccccaagtactgcccaagctacttctcacacaagaaaccaattggtccactgttacctcaccctgcaggggtacagagagtccgtacaaggaataaccatgtgtgctttctggaacctctcaaggcctcagaaagatggggggggggggggggagacaaggagtgggaaatgacaaatgtcaggccatttcatctaatcatcacaattaccctccaaaataagcattatctccacttactctttagaaaggttaagcacctttccatagaaaggtcggtgggggtgggggtgttaagagggaaccagacctgtcaaccctccaatgtctgtgattctctctctcctctatgcgcctgcaccccacaccctgcagctcagttctcctgtgtcctcaggttcctctcctggcaaggagagcactgaagcagatgtgagggagacaggagggcagttgggtccggttctgccctgcttccctttcctggtgggcaaaatgccaaaattcagattataacttttaatacaattgtcacggagatgaaataacactaacatgggtaaaagccttcaataaacagtcatgaggggtgtgtgtgtgtgtgtgtgtgtgtgtgtgtgtttatgcagaaagatatgtttagagtcattttcccgaaaactctgggacatccccagagcttgagattgttgaccatgatttgcaacagaggggacagtaagtacagtggaggttcccccaagctcctctagcatctgtttactttcacaagaagtcttggcatttcccaggatgctctttgtaagagtcaagacactcttccctctagaaccacattactggcaaccagccgctctctgtcgggcaatcccacccctattctaagtcattgggttacaacgagttcccaatagggggacgtgagagactcctactgcatgcatcctgccctaattccttaaagaatcccagggctctttccaactgagctgagctgacacagccatctgcttcttccttttataaagatttgcacgaagctatttgtgaaagacgagttccagcccttggacccgacccaggagctcatatttcccccagaactcctggtaagacaacacgggtattttatgtgcttgtttaaatctccagttatgaacccaattttgtaaatctaccacgtccttcaggtgacatgtcaaatgggagacgtgttgggtaggatccagaaacctacttcctcccatccctggctgaccttgggctttttaaaacccaacccagcattacttttaatcagtgtgatctgcaacacgtccctgttgactgtccaggccgttcagcttgctgagcgtcctccattgcacctgactgtcaggaacactgcctcttccctcctttgctccctgctttgggggcagtttcttgactgacagaaacaggggcacccagccccacccctcctccataagcctagtgagcgctctttctcaggcatcccaggccccttctataaaatacttttccctcttttattaaatattcatttctggtttcaatgatgtgtatgtcggtatgtctatgtgtgagtgtgtacacttgagtgtacacatgtgcccatgtgcccatgtgttggatccttggaactggcatagcagacattttgaaccactgccaagagcagcgtatgcccctaaccctctccagcccccttttctggggcaagaaaacattctgaatattttgaatgagaacatactcattcaaaaataaatacccatttagcaacacactgcattgttgtaagtactagctatacagtaaggaaggaagctaacagaagacactgccctaggagagcttgcaatctgggaagagaggtggacagtaagcaaaataatagatgactatgtaaactgggcacagtaccattaatccaagcactcaggaggcagaggcagtcggatttctgtgagttcaaggccagcctggtctacacagtaagttccgagacatccagagctaaggaaaaatcaaatcagcaagcagaggcaaggctagaacgcagatggttgtaattttcagtgctgtgtccagagaagatgcctctgaggaggtaatttctgaagaaactctagaaggaagagtggagtctgtcgtggggaggcgttctgggagaagcagccaggccttgggaatagcgagtgtgaacatactagagacaaaacgacagacagctggcctaatccggactcacagaaccagcctgaacagaacacagtaaagagggaaggtcagaagccgtcaggacgggccgtgctggacttaacattgcttggctttcccttgtgtataggaaaagccactatgagggaggtcacatagaagagggtcaagctcctactgccgtcatatcaggatgctttctgttgctgagccaagaacctcctaaagcttgaggagggggcagggaagaagcagtgtgctctgtaaggggatagccaccaccccaaagggcagaggctagacctttggtgcaggtggtgaggaccaagtagattctgggtatgcttgctgctggtgtgatgtcgagtgagagccaagcctgaccccagtgttatatgtagctagagggtaccagtttccagatggaaaaacctccagcggggcaggtcggctttcctttggtgttcttttccaagggctgagaaaggagctcagttagggcaaaataaatgtgaggtgcccctgacacatctaagaggtgacagacatcaagaattcactgagaaatgacataaatattaaaggaaaaaatccagactgatgatattaatttggggtcattaggattactgtgatataaaagccatgaaactgaattaatactgaattatccgaggctgtgcagtagtcaacggtaggcgctgacttatagggtcacttcttcccccaaaggccacctatttacatgaattcaggctttagccagtggatatagcgagtgtctttctggacaagtgtcccccagaaccttgaagtcttcctagaaggacacaacccacccagggcctgctgtggcccagagtggctggtatgtacacaggtagatatcctgtcatttgccctcagaggatggctgagaacccagagaagcaaaccctaaccttttatggagagagaatcacctggatcgccccaggaaccctccaagaactcttggtgctgaaagctaagtaccctgaagctcctctcatctcgggcaacacagccctgggtaagtggtcacagtctgcctggttgaacttcctggtccctgatccgttcccaatctgctgcttagagatgaaatattcacctgtctagcaaattcagtgactttcaaaggtgatggacatgcaccctagtagtattcaggatagctggggatgatatgagagggttttaaaaaaaaatgttttaattcattttatctcttgttcttttgctacggttaaatattaaatagacataaagaatgtcataaaatatttgtggatgtattaacaaacatacctactgactacccatagccatgttaataactttgcttcacacacatacacacacagacagagtccagtggtagaatgctaacctagcctgttcaagctctgggtttgatgcccagcattctccacaaacgtgtaattggtgttctaaccactggccttctgagaggcacagccattgctcctccctcccttccctcctgatgacacccctcaggtgaactgtttgtcattggtcagcctcttcctcattttttatgattaccacatacgtctgaattaactgaacaacgtgtcagttaattttgtatatactgtacagagactgtcgcttttactctgaaatttgtgtctttcagtcaacattcttgacctgaaactcatcccctgtttttgcacgttcatgggttctactccattatatgagcacggaaagatttgcccctccagtctgttaaaatagctccagctatttccagggcccccaggttttataaatgtctttttatttccatgctgtggatcaaacctagagcctcacacatgatcagcaggtgcttgacaccgagtcatatgaacattctctattttggtttggtttggttttttggggtgttttgtgtgtgtgtgtgtgttttgtttttgtttgttgttttggtttggtcttttgttgtttgttgttgttgttgttttgcttattttgaggcagtcaaaaaagtgttgtcactttgaccagcctggaactcactatgcaggccagtctggtcttgaactcacagagttcaaattcagctggctctgcccctgagtgccgagatcaaaggcatgcaccactactctcagccacaaacattcttagaagtatttccaggttctttggccaagcactggccagtcttatgtgtaagggagtttgaggagcctctcacggttttatttcctattggtctacatagcaggagtacaagtcagggaatgcatacattgggcagaggagtatatatatatggtcattgctttcacttccatacatatttattatcaaagtttaagctttgtgtctgaatgtttttatgagaaatgttcaatgtaaaagaaagggcatttttttctctctctctaaaatgtatttttttccttcaggaccagccatgaagtctcaaggacacttttaccctgtcctcctgtctcctgctagaattcctgatctaagaatggtgactaaaaccagtggaggtaagttccagccctgctaggaagtagtgaatggctaacctcggcagatcaccctcaggtacctatcttattagctccggcccatactgcattctttttctgaagtgaaagtgtgtctcctctgcaaacctcatggccaaagtcaaggttgtagccagagaccctccatactctttggccaagcactggccagtcttcccgctttctgacttttctctgataccaagtatcagtaaagtcagtaatgaaaataggttgttccataggaaagggtcacttttcctcagccctcctgtctctggggcccttatatgaggcacaattcaaaatcctcaacatagcttaatctttcccctatagatgaagaacctgcggtgcaaaaagaaaatgtgctcgcccaagggcatcaggttacaaggtcaccagctcacagttcagaagccccactgccttttcacattaactgcccagcttggtccctccgccaaaggaagccagccaggctctgaagtctgtgcaacttgtggccaatgactcgcttaaagctaaggcgtgagcaccctctagtggtcctcaggaaacttcctgtggccagcagtgtgagcaccactggggtgtctggaaccagctgtgctcacggcagcaccctcaggagtcatatatctctacaacagtcccacctttgatgtaaaggtctctttaaactacacgttcattcatatatccacagttggctcagcctaattttcttttaaaggcattaatatgaagtgtcccaaagtcactgctgatgggcccatgaggcatagagtcaaagtttaaaaccatatagaaacactgaggaggtaatgtgaacaatggaagcaccacaacaaaggcccagatggcctgtctggcctcggtcagagtatgaactcccgtgaggacagagctatatagaacagggagctggcattttggagccccgctagagggttgagctgcatggggttgttttgttgttgttgttgttgttgctgctgctgctgctgctgctgctgctgtctgtgtcaaaaccagaagcaggatcagggtatggtggctcctgccctcatgcctggaatcccaacaacgtggaaggatggagagggaggatcagaattcaaggtcagccttggcaacaagagactgactgtctcaaaaacagaaagcaacaaaaagccaaaagaggcagtgatgatccactctggtctctgtatttctggcttaaataacagcagtaagatgtttatacgatgttgtgtctggtttgtttttccctaaagagagccagggtcttctcgggacaatgaatcatttgacagagaacaaggttagctctactgggctcctgcagagatacagcaggcatttagggtttgagtatttgttgttggttttttttattattatttcatgtgcattgatgttttgctgcgtatatgcctgtgtgagggtacaagatcccctggaattggaggtacagacagttgtgagctaccatgtggttgctgaaaattcaacccagattctctggtagagcagccactgctcttaaccactgacatctctccagcccttgggtttgagttttagtttgcggttgggaagattatttggcttggtttggttggtttggtttggtttggtttggtttggtttggtttggtttggttttagaagcacagtttccttaggtagcccaggctggcctcaaaatcaccctgtctcaacttcccaagtgctggggttacagacatgtgccactccgtctggttaaggccagaggttttacagaagtgaacagtagattctaatagaaccactgggataaggaatcaacaggccataggtaggggttctgaggtgagaccagatctcataagaattatcttctatgagatgctgagacaggacaagcactccaggccgacattctgaaaatgagggactatttagttacagatttcaggtgagattttcttggcacatgaattactggtcttctccatccaggaagttaactgaggttagtgaaacaggggtcgggggtgaaggaggggagagagggagtgagagggtgttggcaaagacaaaggatatattgtgccaagaacatttaatattgacaaaatatagctatgtgggagggttgaatactctcagagatgaatcaacaagagaaaattaaaaatccaagcagaaacctgttaaaaatcagtctcacagcagctatccggggcctgcaagtgagctcaactccagccctgtgtgctaaggtttcattatgtaaacttgagagaggtgaaggatttcttttaaaaggtcaactctggttgtcttgggtgaccacatactttcctatattgatttgaacccttctgtcctactgaggagaaaccctgaagttcttgctcacatcctgccaatcctcacacgtttaactcccaactgttgtcaaaatgttgattactttctggtcagttggcaaggagcactgtgcctctcctcctgggtgctcacccacacagctcccttcgccccactcctgtgacccccgaacttccccacacccaacaccaccagccaatgggaagcctgaggcagccgctcccttgggatgtgtttgttttgattggccagtgtccttcatggaccgactcatgaaggttgtgatcatcagagttggaaaatctgcagtcaaaatgtgactgatttgattcttgtttgggtcatcttggcctaaattctcgagctattatatttagaaatgttttcaaataagaacatactgaaaggtcacacaaagtgggagtgatttacatggagaggttcacacggcctacctcatttcttgacaggtaaatagaagcttggcttgttcattacttgggttggtcgttcacatgtttttcctctaagaatcaccaggagcggttaatgtgctggtatcctgtcagattcaaattggcatcaccataaatcctgggagaaacataaagccagggagaaggtcactcatatttgtccgaacttcaagtttgtataaaaatctctttccttccaaaaagtaagtgttgattttagaccaagacctagggattcaaataacctttgccactgtgataatgttatcagatttattctccttaaccccatagtaatcatggtcgatcagaaggattatgggagttctagaaggatctaccactggcatgttgttgccagtacttcttctctcctatctctatttcttcacacttgttcaaagacaagtgcggccacagggtcccgtgcatagctacacaggagacagatcaccttggagcattttaaaagttttatagccagggccggggaaactggatcagctatctgggtcttgcaagcaaaaaggtctaagtttgatccccagaaatcacataaaatatctgggcaaagtaagacacgctataatcacaatattagggaagcagagacaggcagacccctgaggctcatgggtccaatcaaatctaacaggctgtgtaccagtgaaagaaaaagaaaaacaggattgccaaccaaggttatatgtacacacacacacacacacacacacacacacacacacacagcccagtccccagagactgatctagctgacatgggagctcctggtgaccctctgagctgccacaatggcagtcagcacactaaccaaatgttaagtgagaccctatagtgtagtgatgcaagctctgcacctcccatgccaacaaaacaacctgctcttccaggactgaccataggtgcctgctgcagcctggctcaggtgaaggacatcttggctgagagcatctctgagctcccacaggagaaaactcagacctaccgagcactcctgaaacacctccggagcttggcgggacagcagatccggaacatggcggtgggtctcccgctgggcacacacacatttctcatcattgagacaccaggataagccaaaaggtctcaatgagttgaaacgacagatcagttaacaaagacttttaaatcaataaatgatatttagtaaaacgtttaagaaaattctatatgaaatccaacacagtagctaagcaggaacacgggtcacaaaggccatcctgtttttgctaatttcttgacaaacctgtcaaaaagactgatttaaccttaggcttcattaacagaagtataggacctacagaaagccggccagcctttgactttgtactattaaaaccacagctggagactcactgacgtgaggttttgcaagcatgcatacatgcctttctccaacatctgctgggcggtgtaacagagatccttagaccctggggagtcagcagatgtcattgactctttgaaaactctcaagtgattccaaactcactagagcctgtcaagaagggggtgatgaatgagtttgggggttggaagcacatctaacggagagatcgggtcagtcaacgagagcataagagatgcctcccaacatacatggacccctgaggacagaactggccaagattcctcttgaccctttccgagaccctgaggggatcacaagcaaatgtcctggcctaaccaaaacactaaccaagatgttgctctctctctagtccttaggaggacatgttataagcaggcattgctactcggacctgaatcctatcctctctgtgggcaacaccacactcaatctgctgtcagaaggtaagctgcactccttatagagcctttgttttttgtttttaattacatttttaaggttttcttaaggaactgcattaagtagtagcctaggtcacagactcagttcaccatagggagcgactatcatgaggaaggtacattgtaccaatgggcagaggtgctttctgctgacaacacacacacacaccatatgctcatgtgttagttcatgtgttcttgcttgaccagggatgatgtgtaaaagctaccatgagagcaaggtttcaaggtcctggagacatgactcagaggttaagagtacacattgctcttacagagaactggaattcagttcttggcacccacatcaggtggctcacaagcaccaacaactccggttccgggggactcaacatccccagctgctgtgggcacccacgctcatggcacatgttcacagagacataaaactatgtatgtgtcatttcaaaaaaaataaaaaccagcctttcaatgaagtgaatgtggttagagaaatgggtctgcagttaagaacatgccctactgttgctgggcacctgagtttactccccagctcccatgtcaggtatctcacaaccacctgtaactccagttccaggaaatctgacgtctctagcctccaatgtcacccacactcacatgcacataaccacataaaacagctgtacgtaactaaaaataaaattagattcttttgaaaagagactaagaactaggcttggtggtgcacacctttaatcccagcactcgggaggcagaggcaggaggatctctggtctacattgtgagttccaggactatgtaaaaagactgtctcaccaaaaaaaaaagaggggtggggagtgggtaggttgcaaagggtgccttccttcagcctaagagagcaaggctcttgccttcctccttcaaactacatcctatctgagtcaccccctactgccctctattctcatgccaggagtctatcttagtccagagccttatgcatgtcaggcaagtattctaccacagctcacagcaatcgcttcatagtgttacaatccctattaaattccatgagctaaatgaggtgttttttttttaatgtattgtaccgtgtgtgtgtatgtgtgtgtgtgtgtgtgtgtgtgtgtgtgtgtgtgtgtgtgtgagagagagagagagagagagagagagagagagagagagtgtgtgtgtgtgtgtgtgtgtgtgtgtgtgatgcannnnnnnnnnnnnnnnnnnncagagaactggaattcagttcttggcacccacatcaggtggctcacaagcaccgacaactccggttccgggggactcaacatccccagctgctgtgggcacccacgctcatggcacatgttcacagagacataaaactatgtatgtgtcatttcaaaaaaaataaaaaccagcctttcaatgaagtgaatgtggttagagaaatgggtctgcagttaaaaacacgccctgctgttgctgggcacctgagtttactccccagctcccatgtcaggtagctcacaaccacctgtaactccagttccaggaaatctgacgtctctagcctccaatgtcacccacactcacatgcacataaccacataaaacagctgtacgtaactaaaaataaaattagattcttttgaaaagagactaagaactaggcttggtggtgcacacctttaatcccagcactcgggaggcagaggcaggaggatctctggtctacattgtgagttccaggactatgtaaaaagactgtctcaccaaaaaaaaaagaggggtggggagtgggtaggttgcaaagggtgccttccttcagcctaagagagcaaggctcttgccttcctccttcaaactacatcctatctgagtcaccccctactgccctctattctcatgccaggagtctatcttagtccagagccttatgcatgtcaggcaagtattctaccacagctcacagcaatcgcttcatagtgttacaatccctattaaatttcatgagctaaatgaggtgttctttttttttaatgtattgtactttgtgtgtgtgtgtgtgtgtgtgtgtgtgtgtgtgtgtgtgtgtgtgtgtgatgcatgtcactgtgcacaagtgtcatcagacttggctgtaagtgccctttccccctaagccatctttctggacctaacttttgagcgagactagtactgaaaccttagcagatgtgaaccactgtccgtctggcttccattcgtctccccatctcctcagaccatcctgccctgtccccagggcttctagctctaaaatgccttcccttttcctcgctgaatacctgactagccatccattactccgtcctctgtccctcccactccctcggcagatctccctgcctccacccaggcacagggatacagaggaagtagccacagccactgcccctgtggacttctaggctccctggggtgtttaatgctgtcactcactgctcagagttcagaggtgatgaggagagacttgggagctgagaaaaaaatgcttaggccccactccctgattgctttcacatgaaacctactaagaaggagaccattaaaaggttaagtgtgctggtggagctgggctcctctctgaggacaccaggcctgtagtttgggatgaccccagtataacccacaaaacggtcaagaagccaaggctctggggataccaagatggtgaggtaccttctcagggtcttctgttatcatgatggtagcaatgttctattgggtatttgtagttacctttgatttatggtatctgccttccaaactctgctgaagctggcacagacctccatcactccagagaaggcagggtctcagctcacggacttagcagcaagggaggcaggcagtgatgagcggtgactttgctagctttccaacctgcacagagctcatgccatccctgggctgtggcttgacctcttcaggattcatcctataccagtggttcccaaccttcctaatgctgcacctctttagtacagttcctcatgttgtggtaactccccacccacccacccacacacacacaccataaaattatcttcattgttacatcctaactgtaagttcactactgttatgaatcgtaatgtaaatgtctgtatttcccaatggtcttgggagaggttgagaacagatatcctttaccttaaaaaatgcaaaccatattttaaagccggaggagagccctctggtcccaagaagtgatagctgagcccaagggagatttgacaagttgtttaaaggtatgtttgcgtcaggaacacaaaactgcagtaagtgtgaaaagcagataactgcttacagtgagacccagtgatctcataagttatacctcagccttgaccctccgtccgtggttcatttagttagctagcctcgctgaaggatgaaaaccaacagggtggtgggtatggcatgagtgttgacaggaaaacaaatgtcacgcacagtggaaggaaaggggacactggacagtttcacagactgggacctctgcctcagtctctgtgaacagaggtcatatgccttctcctctggcagccaacctctgaaggtgcggatggggcttgcttttctcacggctgtcctgaaatggcatttccttccacagaaggcccgcggcagattcccctcagtggacattttcttgctgggttggcaagtgcagacctgaagcccgaggagattctggggtctgtgtacatcccacactctcagaaggtaagaccctggctggttgccttgacgttgtttcttcccgttgtccatagtgaagtcatctctgctatctgcagacagtcggaaggagcgtaaccgtgcccccaaaactgtttcctgacccactgcaaactggttcagcaataaacctctggggctggcctgcacaagtgctgctggatgtgggttttggttgttgctgcagctgtggggtgtggcccgcagccttggggtgtggcctgcggaagcccacaggaaggcctgtggccacgctcccaagcccacttgtttccataggtgaaggttctctggctgcagatggagcttctccacttgacacacaggaagctggagccctagacttggctttcccagccccacatttctgccaaaccctacagcacatagaaacacaaggcctccagatgttccctggtccaggataccacccagctagctatgaaggtggccttctgccctctctgttccataggcctctttccaaaagctgtgcttgactctaaaagaagcacaataacacacacacaaacacacacacacacacaccactcacaggtcataatgaagtcttaagtttcatttcagctatggataatctttggtagtccttcctgtggaacagaaactttggcatgcaaaggtagcagatagaaaaatggtgtatcgtcgaattagagggctcagcagctgtgaccacctgtcgctcttacagaagacccggggaaggaagaaacctggcttttcattctgaaggagtggtttctgtctcctcagcgggagttcgtgtctgccttccggcaggcccagtgccatcagaacgccttgcctgatgtaaatgctggcatgagagtcctgttcagagaaggcacagacgtcattgaggagctgagcattgcctatggaggggtggggcccaccaccgtcagcgcacaaaggtcctgccagcagcttctgggccggtgagtcatgaactctgtgccttaaagggagcctcaatgacaggacaaagaattggccctgacaactggaatgacagaaacttggactcaaaagaaccactgcttcttccttctttagttttgctgacttaattccacattatttggcttcaattaggccacttttggggagaggacacaacaaaaatggcctgtgttttctcatccagcccctgtttctcctgcaaatggacacccagccggcctctctgtggggcactcaatgctcctaccatagggttcacactttcttcctaggtaaagggcattcaagtgtgaattctgtgctgctctagaatattctggaatggttctagaatattctgactccaaaacatgcttgatttatgctgcaatggagaaggcaccattctcactcagccatgattcttgtgcctcttggagcaacccgcaggctttgttttgtccatcgtcccttgtaaacagaaattctaagggaaaccctgggaggggggggggagtctctaaaatgtcggttccctgcaatcaggccacctttaactggttcttcttgcctcacacggtgccaggcgctggaacgcactgatgctagacgaggcttgcagactgcttctggatgaagtctcccttccaggctcagccctgggaggcaaagtggaattcaggaggactctgattgtcagcctcttcttcaagttctacctggaggttctgcaggaactgaaggctgaccagaagctgcccccggagtccaccgtaagtgcgttgggggacagtgacagatgctctcacacacgatcatggactcacagttctgaggccaggaggccttgaccaaggtgccatcaggaagcagagtaaggtgactcaaccttgcgaccccaacatttgagaggctgaggcagggagatcacaaagggctcaagttctgtctgagctacagagagctgtctccaaataaaataaactggaatccagagctgttatcagagctgatgcggatcctcctgagaactgtgaggctctactctaccccctcgcctggcttctgctggcttgctggggacgtcccctggggatgtctgctggggatgtttagggttctttagcttgtatgtatcaccctgctaatgccttcacaggacactgcccctgggtgaatgtctatatccaaatttctcctcctaagaggatatcagctataacaacagccaattctaatccattagcgctgtcgtaaacctcagctcttgcttggagaggtcacacttgggaggacggaacagaacaccagcttctgtcaactccttgcttcaggagttcttagctttaccactgcttttgccaattgtcctgtggagagcctgttaccattatctctcctctgttcctgggaagcctttgtcagtcctgggattcagccttgaaggcctgtcaaagcacctcggctctccggtgttcatcgtgccccagcacagaactgttactaggcctgtgtctctcctctgtgattttttttctcttaaaataaactttattgaagcataatttgccatgaaacaagagacaaataataaatatgtaactaaacccacctgtttaaacttgatgcacagatatactactgtggagccaccagctcaaactaaatacaacacactttcatcaccccggagaatccccacgcccccttccttcatccccacccccatccaataaacattaatctcctgtgtgctactaaagcttcattttgcttactctagagttttgtaatcaatatgaagttgtaaattcaaattcttatgtttcaaaagacaagcactggcatgtctactaacatctacccagctctctaggttttctgattgcaaacgtctggaatatgttaatgaagatatctacactcccacttgttcctcctgccttgtccctgttctctctcaaccctcccccaccacgcaattctcacccttccctgtcctataaccctcagccacccccaccctgtggctactgtccctaatctctgacttcatttctcagtcaggataccagagcagctaggatactgaaaaaaagtcttcagaatctttttccttgtgtgaaccatgagctctggcttattctgggatggcgtatccagcctagagttttttcttttcctttttttttttttttaatttatttattttatgtatatgagtacactgtagctgtactgatggttgctgggaacttgaattcaggtcctttgctcgctctggccgaccctgctctcttaggtccaccgtctggagcctaaagatttatttatctaggtcttcagatgcaccagaagagggcgtcaggtctcaatacaggtggtgagccaccatgtggttgctgagatttgaactcaggaccttcggaaaagtagtcagtgctcttaactgctgagccatctcaccagccctagagttttcttcctaacaacccctgctttctcccacctccaagttcagacctttccctccaggtacatgaggatcagattcaaaccagtcacccaagtcccgtcttggatgggagggtgggagggcaccagggttataagaagtgaaaccctggcagggtaactaggccaccctcagcacattaggagccggttttcataatccaaacccagcctgaaccagactaaccagtctctctcattgtgccgtgtgatcccaggacagccagcgttatccagagatcgcagaccggttcctaagctctctgggagatttccaggtcacgctaccccggggagtccaaacataccaggtcagtgagtttgatttcactgaaacctacactgagagataagagagagctgtgtgggccaggcaacctattcacttgagtaacttttagttctttctaattattcctaattcaaatcagtagcctctggcccccaagagctggtgctggagggcacaaggctgcactgccagactgatctgcagacagacagtcataattactctaaagtgatattctttgggtatttgttaaatacctacccagaagagtagctgagcccagaggttcagtctctagcccaaactgcacatttttaatctccagtcagcaaacaagaggccttgcaagtgactgcactcatctttcttgaagaaccatttagaaaatagctgttcttgcaggtacacgccctgagagagagagagagagagagagagagagagagagagagagagagagagagagagagacatggctctcctaggtgtgattgaggaggtagagtttattgtagctatgagggaaagaacagccagaggcttctgaaagggtcaacactgaaccggccatgagaaaggggagggggaaatcaaaacaggagagaggaggggagaggtaagggaggtgaagggggcctaagagagaagccgaagaccaagagaacaaaagcggcagtggctgaggttacataggaatcagagaagctgggcggatgaagaaagcccagggagaagctgagaagagtagagtgtggtgtgccagccagcatgactctggaacaggtactgcctctgtgagtagggaccaggcatggccagagcctgctttgatatgttaaatgggcacctcagttagccatctgtccacagttagacacctaacacacacacactcacatgcatgcacccattcacatgcacatgtatgcacgcacatactcacacacgcacacaaccacagatacactcacacacacacacactcacatgcatacacacatacatacacacattcacatgcacatgtttgcacgcacacactcacacacactcacatctacacacacacacacacacacacacacacataaccagtgcaagcgtctcagagaaaagtcccagaacaccctctttcaacaccccgctgggtctggagtatcccgtgccagttccacccccatcaagtcttctcactcaggctttggtctctctccgaggtcatgctgtatcacataggcctcatcagaacaatgaacataagcaggttggtcattggaagcatgaggacagtgccccactctagttacgtcatgaaatggccgtgctcatcttctgactcactccgatgtttgtgacccacggggactgtcccatgcctcctccccgagtcagaaggccacctgaggtgaaaggttcctgggctaactctctcttcctctctagagagtagattctcaccaacctctccaagatccagttggacgtcccatcatgcacctgtcaggtcttaaacatgccacgggggaagctgtattttgtgatgacatccctagggtggataaagaactcttcatggctttagtcaccagtaccagagctcatgcaagaatcatgtaagtaaatcaaagcttccaaaatccttttaaaggtacagttaaccctgagattcatcagagaaaaaccaactctaccattctgggccaaattaaagcaagctttaaatgccgaccaagagatggactttggtcaggaatttcacatgtgaaaatggtcctgaggtgtagcagcaccttaaaaagacaaacctataggtcactgtactttcccatgaggctttgatattttctaagaactacaactcccagcattccaagaagttgcctggtccttgagcaggtagggtttacgggttaattttagagattacagtatacctggggatgccttatgggaatatgcccttttctgcaatgccctgatccaaagagctccaagaggaagaaaaatatttagaatagactgtcctgtaaacaaacaaacaaacaaacaaacaaatcacaggggctgaggatgtaggtcggttggtagagtgctgaaacactctaccatgcacaaagcctggtgtgcaatccccagcaccttagaaacccagcatagctgtaaactgcagtgattccagtactcaggaggtagaggcaacaggatcagaagtgcgaggtcatcctcacatagctaattccaggcccatgtgggctacgtgagacctccagcctcctgcatgactcagagccaccctgatacccctaaatcgccagcctctttactgaataggaaataaatactgtcatacatttccaaagaggactggtctcactgcccctccccggcagctggagcattgcatcctggccctgcagcaggacccccagacactactctatggcaggtttaccctcattgctaaagacagattgacagatgatttaattttcaaccatgtccttcccttgggtttgaggccctcagcattcgcacatatctccttaactctctccctgtgttcagatcaatcgactcatctgaggtccttgacctgcctggtgtggttgatgtaataacagctgaagacattccaggcaacaatggtgaagaggatgacaaattgctggctgtagataaggtatggatgggctgtgctctcccagtcgcctgtgcagatcacccaaggaccctgtcagtcacctgacctagcaccctagatttttctgccactgagatgccgactgccaagatcctggctcctctttcccaagtgccaccattctaccttgcttttctgaagttgggaaataacacactagaccaaaactaatcacagatctgattcagccactgtgcacctctgaattcatttgcccttacctgaaaagtaaataccaggaaatgatctatatcaggacagaatgctctagaaccatgattctcaaccttcccaatgctgcaactctttaacccagctcctcataaaattatttaattgatatttcataactgtaaatttgctactattattaatattaatgtgaatagctgctatacaggatatctgatatgcaacctccagaggggtcgagacccacaagttgagaactgctgccctagaaagatctagaaaggaggtgaggggggccacagccccaccctctaatttacagggagctctctcccttcctaaacctgttctctcaccagacctctctttcctttgtgtgctctatttttaataagttgtcttggctgtcactgggcttttaattcatattcagctatcgtttacaggccaccctgacttggggccagagcatttccacctactgtatgccctcggagtttaccatctctaaaggaggaataaccatacacacacatcattgtattgtaggagttaggcaagtgaacacacgtgaggtgtctaggacaatggttggcacatgaagtgctggctattgtcactactgtcatacttcaatcaaccccacattctttttcctcctggtgtagaagacatcagtgagttgtttgtttgtttgtttgtttgtttggatggatggatggatggttttttgttttgttttattattgaatccatcaggagaggttgactgtcatatagcaggctattggggctgccataataaaactgcctgaccatgggactggatatgggattcatggttaagagctgctcttcctgaagacatgggttcaattcccagcacccacatggcagctcacaactgtctgtaactccagttcccctgtatccgacttgttattctggtctctgggggcactgcacgcatgtggtgcacagacttacatgcaggcaaactacctatgcacacaaaaataaagttaaaaaaatgcacagtgagaggctgaaagtgaaatggcttttcaaagctctggagctgagccaaagccacagtgtcagcaggtctggcttctgcggtctcttctttgcttgctgacggctgcctgctccttgtcttttctctgttcactcttccctctctttagctcactggtcctattgtacaaaggccccactccttgttaataacctctgtaaaggtcctgtcgccaaatgttatctcataggtgctgcaacacagtcagttgttgactgagtagtttgtcagttcatggcagggtctaccacatacgctgcaagctcttacatgacaggatgaagaaagaattcatgtgaacacatcacaacaggggacttgcttggtttgtgttacagtcaacatctgggacttaccctcactgaatacagtggccagtgggtggaacctataatctgcactttggtgctggaagtctaatcacgggtctcacacacactaaggcaagttctggatcactgggtacaacccaagaccttccgttttcgttatttttaaatttgtacccaagcacatgtaacttcagtgtggctatttctattcaacaatgacatccaagacaccaactaccgatgacattgagcttggcttctgttctatttgctttaaaattacttaaattggttggttcgtttatcactattacggtgtggagagtgggaggtgtggagggcacatgtggaggagttgtttctatctccaccgacctttatgtgggttctggggattgaacccaggtccccaggtttacagagcaagccctgttacacactgagccttctccctctgccttctttatggtgctctatgtttctgtatgtacttcacaggtgctgtgtgtttatgtatgtactttacagatgctatgtttacatatgtactttacaggttctctgtgtgggccaggtcatctgtgccgtggtggcagagactgatgttcaggcaaaacgagcaactgagaagataaaaatcacctacgaggatctgaaacctgtgattttcaccatcgaggtaagctgggctggtcaggctccttctaagattgtaaagccaggcttgagagaaggctcagtggttaagagcactgactgttcttacagaagacccaggttctattcccagcacccacatgacagcttacaagcatttgtaattccagttccagaggatctgacaccctcttctggtccctgcagataccaggcatgcacctggcacatagacatacatgtgggctaacattcataaacataaaacacaaataaatcttttttttttaattgtgaggtcgagagcatcatcataaatgttagaagactagctcaaaaccttttcccctgcttgcactggaaaaaaaatcattttgctttggaagatattacttgtatgagatgaaattagctttggcttcaagaaacagaaaaaaaccaatcagaataaaagtttcactcttccattcaaaggcctagaactaaccaggcctggtggcagaggcctatattatggctgtggagcctgctgaggctcacaaattatactgaggcaggttggtgagacattgactcaggacaaaaagtaagaaagacaggcccgtcggtcagtgaactctgtggtagaatgcttgcctactgacaagagaaaaggaaaatgactagaagtgatctacccagggcttatatgatgtgctagtctgtttacatctgtgcacactgtttacatggtatgttttgtgctgctattacagaacccccaaggttgtgtaatgaacaggaatttatttttcatggttctaaggtctgcgaagtccaaagctgaagggctgaatctaatgctacatgattccagactgtggaggggaaaagcgcagagaaatgcgctttcataacaaagctgttccaccatggttattacaataacccacagagctactgagcccccattacctaggcaccttgtaagggtcccacgtttcaagactgttgccttgggagtcaggctgggtgggacacaagccacagcctgtgagctgtgtgtatccagaatccagcgccttcgaatctagtctctccgtaacacaaggtttgcattctagcagctactgacgctttggccattaaatccacattccagatagcaaaagggatgaaaatgggtaagcctaatggctctttgaaaaaggcccagacagggcctggagacacatgcctttgacctcaggacttgggcagtagaagcagacggatctctgtgagttagggatcagcctggtcttacatagtaagttgcaggagatccaggactacatagagactcattgtctcaaaaaaattaaaattatttcccatcccttacagggagatgtgtgtattggcatgccttactatttcattggctagaaggcctgcatctgctgtacgtaactgccaagagagccaggaagcacatttttactccagatggcatgtgtatcccccaaagacttgggaccctgtttgttgaggaaggtggtgagagtggaaattgggaacaatatgtcttcaaggtagagactaaaggtcatgagaatttcataatgaaattctatagaaattttcactctcatttctgactctcagtggtgggatttaagttatatctgaagataataatggtgtgagaacatagaaaattcaagtgcagcctggtgtggtaatgctgtcatcacttaacaagcaagataaataagataaataccttataggatagacagtttctctggctcaagatttagaagtttcaattcatgctttgctgggtaataaattgtagtggccacgcaaaggtaaacaaaagtgttcccctcatgtctgggacaggaaaggcagaaaaggaagagaccaagtcccacagttcactttgagggcatgcctccaataaccaaaactctccaggagcctttgctggttaaaagttttgtcgttctcatgctgggaccatgctgggagagttgccaaactagagactgagctccatctcatgggtgttttcagtacatcacagacccaaattatagcaacttggacttgcattctctaactcggcacatcataatcagagaaatcaggttgagagagaaatcagcttgtttctgggcttgcaatatgccatagatggtatgcatagatggactggggaaccatggggacagcttgaaatgtgcctgaaggatactagtcttgcaatgtacagagtcatgaaggcccagttgttagtctttctacaccaaattcccatctgccaagtgggcaagggacgagggttttcttggttggccctccctctgacttgcactggaatcctaacgtgggtttggttttgttgttttatttccatttgaactctactttcctgaagggggaatagcacccagaggacacattcatgacccttctgggactcagaatagttagaggtttaaattgtcttcagaataagaatgtctaaagtgagcaaataattcttgcatgaccaaaggcaggaaacaaaagccatatatgccaagagtaacatatacatgtatatatgtgtgtgtatgtgttgtgtattgtgaatgttatatatgatatatatgataaaactatataaaatatatttataagagagacagtgtatcacacaggtactagatccaagctgacaaattttaattctaactgtgcggctttctacctgtgtgatcttaggcaaggagtttgtttacacccttgtgcgtggcttactagcctgtaaaaggggagtaatgatatgcatctcaccaagtcctgagaaatgagttagtgaaggtaaaacagagcagagtctaacttaccgtgctcactcgatggagttcatcgcatcagaaggccgcaagtcttttgacacacattgcagcaataaacatacttctgtgtttgccgccacgacttatggaggtcaaagtgtgtgctggagagttttatgtcaagttggcacaagctacagtcatctgagaggagagaacctcaattaagaactgcctccccataagatcaggccgtaggcaagcctgtaaggcattttcttaattaatggttgataggggagggcccagcccattgtgggatggtggtcctgggttctataagaagcaggctaagcaggtcattaggagcagcaagtcagtaagcagctccccactccatggcctctgcatcagctcctgcctccaggttcccacatgcttgagctcctaacctggcttcctttgatgaagagctgtgatgtggaaatgcaagccagataaacccttgcctctgggtgtcacgtgcttggattaaaggcgtgcactgctacagccctcgaacttcctgggtctgagtgagcctccgtttagagcatcctgactcattgattcagagtgtcctaagttcctctgccttgtagcatttatcaactcaggggaagctgctatgcaacagttcgtcacgctattaccactaacaagaaagaaaggctttctaatgccagaggactctaatgcctttgggttccaagaaagcaagaagcaggtgtcattgtgaagtgcagaaggacggactggatcttcagggttagcaaggattggctgtggtaagtcagttcaaagaaccaacgaggagaatggctactatgtgggagtcacgctagtgtcagagagtagaggtgaggaggaaggaagtgcagaagagcaaaagtctagaaaggctctattgaaatatgtcaaatacccaaaagaatgacaacatatactgggtcttgcccctatcagagtttgaggacctgtgtcctctccatgaacacagcctcagccttctcaaaatcctgagtgaagaagggattcacacatatagctacctaagtatctatctaacacttttttcctcagggagaagtggaaaaagaggactcagaggcttccccctggtgcctgggcaccagccctagagacccatgctaaaaatgagcaggtgtcatccagtggaccctcccattttgtccaggcctcagttctgaaaatggcttccttctttttttttcttcttttttttttattacgtatttttttcaattacatttccaatgctatcccaaaagtccccccataccctcccgcccccactcctctacccacccattcccattttttggccttggcattcccctgtactgtggcatataaagtttgcctgaccaatgggcctctctttccagtgatggccaactaggtcatcttttgatacatatgcagctagagtcaagagctctggggtactggttagttcataatgttgttccaccgatagggttgcagatctctttagctccctggatactttctctagctcctccattgggggccctgtgatccatccaatagttgactgtgagcatccacttctgtgtttgctaggccccggcctagtctcacaagggacagctacatcaccgtccttgcaacaaaggcttgctagtatatgcaatggtgtcatcgtttggaggctaattacgggatgattccctggatatgacagtctctagatggaccattcttttgtctcagctccaaacattgtctctgtaactccttccatgggtgattgtttccaattctaagaatgagcaaagtgtccacactttggtcttcgttcttcttcagtttcatatgttttgcatattttaccttatatctcactatactaagtttctgggttaatatccgcttatcagtgagtacatttcatttgacttcttttgtgattgggttacctcactcaggatgatgccctccaggtccaaccatttgcctaggaatttcgtaaattcattctttttaatagctgagtagtactccattgtgtaaatgtaccacattttttgtatccattcctctggacatctgggttctttccagcatctggctattataaataaggctgctatgaatatagtggagcatgtgtccttcttaccggttgggacatcttctggatatatgcccaggagaggtattgcgggatcctccagtagtactatgtccaattttctgaggaaccgccagactaatttccagagtggttgtacaagcttgcaatcccaccaacaatggaggagtgttcctctttctccacatcctcgccagcatctgctgtcacctgaatttttgatcttagccattctgactggtgtgagatggaatctcagggttgttttaatttgcatttctctgatgattaaagatgttgaacattttttcaggtgtttctcagcctttcggtattcctcgggtgagaattctttgttcagctctgagccccatcttttaagggggttatttgattttctggagtccaccctcttgagttctttatatatattggatattagtcccctatctgatttaagataggtaaagatcttttcccaatctgttggtggtctttttgtcttattgacagtgtcttttgccttgcagaagctttgcagtttcatgaggtcccatttgccaatcctcgattttacagcacaagccattgctgttctattcaggaattttttccctgtgcccatatcttcgagacttttccccactttctcctctataagtttcagtgtctctggttttatgtgaagttccttgatccactaagatttgaccttagtacaaggagagaggaatgggtcgattctcattcttctacatgataacaaccagttgtgccagcaccatttcttgaaaatgctgtctttcttccactggatggttttagctcccttgtcgaagatcaagtgaccataggtgtgtggattcatttctgggtcttcaattctattccattggtctacttgtctgtcactataccagtaccatgcagtttttataacaattgctctgtagtaaagctttaggtcaggcatggtgattccaccagaggtacttttatccttgagtagagcttttgctatcctaggttttttgttattccagatgaatttgcagattgctctttctaattcgttgaagaattgagttggaattttgatggggattgcattgaatctgtagattgcttttggcaagatagccatttttacaatgttgatcctgccaatccatgagcatgggagatctttccatcttctgagatcttctttaatttctttcttcagggacttgaagtttttatcatacagatctttcactttcttagttagagtcacgccaagatattttatattatttgtgactattgagaagggtgttgtttccctaatttctttctcagcctgtttattctttgtgtagagaaaggccattgacttgtttgagttaattttatatccagctacttcaccgaagctgtttatcaggtttaggagttctctggtggaatttttagggtcacttatatatactatcatatcatctgcaaaacgtgatattttgacttcctcttttccaatttgtatccccttgatctccttttgttgttgaattgctctggctaggacttcaagtactatgttgaaaagatagggagaaagtgggcagccttgtctagtccctgattttagtgggatnnnnnnnnnnnnnnnnnnnnnnnnnnnnnnnnnnnnnnnnnnnnnnnnnnnnnnnnnnnnnnnnnnnnnnnnnnnnnnnnnnnnnnnnnnnnnnnnnnnnnnnnnnnnnnnnnnnnnnnnnnnnnnnnnnnnnnnnnnnnnnnnnnnnnnnnnnnnnnnnnnnnnnnnnnnnnnnnnnnnnnnnnnnnnnnnnnnnnnnnnnnnnnnnnnnnnnnnnnnnnnnnnnnnnnnnnnnnnnnnnnnnnnnnnnnnnnnnnnnnnnnnnnnnnnnnnnnnnnnnnnnnnnnnnnnnnnnnnnnnnnnnnnnnnnnnnnnnnnnnnnnnnnnnnnnnnnnnnnnnnnnnnnnnnnnnnnnnnnnnnnnnnnnnnnnnnnnnnnnnnnnnnnnnnnnnnnnnnnnnnnnnnnnnnnnnnnnnnnnnnnnnnnnnnnnnnnnnnnnnnnnnnnnnnnnnnnnnnnnnnnnnnnnnnnnnnnnnnnnnnnnnnnnnnnnnnnnnnnnnnnnnnnnnnnnnnnnnnnnnnnnnnnnnnnnnnnnnnnnnnnnnnnnnnnnnnnnnnnnnnnnnnnnnnnnnnnnnnnnnnnnnnnnnnnnnnnnnnnnnnnnnnnnnnnnnnnnnnnnnnnnnnnnnnnnnnnnnnnnnnnnnnnnnnnnnnnnnnnnnnnnnnnnnnnnnnnnnnnnnnnnnnnnnnnnnnnnnnnnnnnnnnnnnnnnnnnnnnnnnnnnnnnnnnnnnnnnnnnnnnnnnnnnnnnnnnnnnnnnnnnnnnnnnnnnnnnnnnnnnnnnnnnnnnnnnnnnnnnnnnnnnnnnnnnnnnnnnnnnnnnnnnnnnnnnnnnnnnnnnnnnnnnnnnnnnnnnnnnnnnnnnnnnnnnnnnnnnnnnnnnnnnnnnnnnnnnnnnnnnnnnnnnnnnnnnnnnnnnnnnnnnnnnnnnnnnnnnnnnnnnnnnnnnnnnnnnnnnnnnnnnnnnnnnnnnnnnnnnnnnnnnnnnnnnnnnnnnnnnnnnnnnnnnnnnnnnnnnnnnnnnnnnnnnnnnnnnnnnnnnnnnnnnnnnnnnnnnnnnnnnnnnnnnnnnnnnnnnnnnnnnnnnnnnnnnnnnnnnnnnnnnnnnnnnnnnnnnnnnnnnnnnnnnnnnnnnnnnnnnnnnnnnnnnnnnnnnnnnnnnnnnnnnnnnnnnnnnnnnnnnnnnnnnnnnnnnnnnnnnnnnnnnnnnnnnnnnnnnnnnnnnnnnnnnnnnnnnnnnnnnnnnnnnnnnnnnnnnnnnnnnnnnnnnnnnnnnnnnnnnnnnnnnnnnnnnnnnnnnnnnnnnnnnnnnnnnnnnnnnnnnnnnnnnnnnnnnnnnnnnnnnnnnnnnnnnnnnnnnnnnnnnnnnnnnnnnnnnnnnnnnnnnnnnnnnnnnnnnnnnnnnnnnnnnnnnnnnnnnnnnnnnnnnnnnnnnnnnnnnnnnnnnnnnnnnnnnnnnnnnnnnnnnnnnnnnnnnnnnnnnnnnnnnnnnnnnnnnnnnnnnnnnnnnnnnnnnnnnnnnnnnnnnnnnnnnnnnnnnnnnnnnnnnnnnnnnnnnnnnnnnnnnnnnnnnnnnnnnnnnnnnnnnnnnnnnnnnnnnnnnnnnnnnnnnnnnnnnnnnnnnnnnnnnnnnnnnnnnnnnnnnnnnnnnnnnnnnnnnnnnnnnnnnnnnnnnnnnnnnnnnnnnnnnnnnnnnnnnnnnnnnnnnnnnnnnnnnnnnnnnnnnnnnnnnnnnnnnnnnnnnnnnnnnnnnnnnnnnnnnnnnnnnnnnnnnnnnnnnnnnnnnnnnnnnnnnnnnnnnnnnnnnnnnnnnnnnnnnnnnnnnnnnnnnnnnnnatcagccttaggccatggtggtctggtaggatacatgggacaatttcaatatttttgtatctgttgaggcctgttttgtgaccaattatatggtcaattttagagaaggtcccgtgaggtgctgagaagaaggtatatccttttgttttaggataaaatgttctgtagatatctgttaagcccatttgtttcataacttctgttagtttcactgtgtccctgtttagtttctgtttccacgatctgtccattgatgaaagtggtgtgttgaagtctcccactattattgtgtgaggtgcaatgtgtgctttgagctttactaaagtgtctttaatgaatgtggctgcccttgcatttggagcgtagatattcagaattgagagttcctcttggaggattttacctttgatgagtatgaagtgtccctccttgtcttttttgataactttgggttggaagttgattttatccaatattagaatggctactccagcttgtttcttcagaccatttgcttggaaaattgttttccagcctttcactctgaggtagtgtctgtctttttccctgagatgggtttcctgtaagcagcagaatgttgggtcctgtttgtgtagccagtctgttagtctatgtctttttattggggaattgagtccattgatattaagagatattaaggaaaagtaattgttgcttccttttatttttgttgttagagttggcattctgttcttgtggctgtctctttaggtttgttgagggattannnnnnnnnnnnnnnnnnnnnnnnnnnnnnnnnnnnnnnnnnnnnnnnnnnnnnnnnnnnnnnnnnnnnnnnnnnnnnnnnnnnnnnnnnnnnnnnnnnnnnnnnnnnnnnnnnnnnnnnnnnnnnnnnnnnnnnnnnnnnnnnnnnnnnnnnnnnnnnnnnnnnnnnnnnnnnnnnnnnnnnnnnnnnnnnnnnnnnnnnnnnnnnnnnnnnnnnnnnnnnnnnnnnnnnnnnnnnnnnnnnnnnnnnnnnnnnnnnnnnnnnnnnnnnnnnnnnnnnnnnnnnnnnnnnnnnnnnnnnnnnnnnnnnnnnnnnnnnnnnnnnnnnnnnnnnnnnnnnnnnnnnnnnnnnnnnnnnnnnnnnnnnnnnnnnnnnnnnnnnnnnnnnnnnnnnnnnnnnnnnnnnnnnnnnnnnnnnnnnnnnnnnnnnnnnnnnnnnnnnnnnnnnnnnnnnnnnnnnnnnnnnnnnnnnnnnnnnnnnnnnnnnnnnnnnnnnnnnnnnnnnnnnnnnnnnnnnnnnnnnnnnnnnnnnnnnnnnnnnnnnnnnnnnnnnnnnnnnnnnnnnnnnnnnnnnnnnnnnnnnnnnnnnnnnnnnnnnnnnnnnnnnnnnnnnnnnnnnnnnnnnnnnnnnnnnnnnnnnnnnnnnnnnnnnnnnnnnnnnnnnnnnnnnnnnnnnnnnnnnnnnnnnnnnnnnnnnnnnnnnnnnnnnnnnnnnnnnnnnnnnnnnnnnnnnnnnnnnnnnnnnnnnnnnnnnnnnnnnnnnnnnnnnnnnnnnnnnnnnnnnnnnnnnnnnnnnnnnnnnnnnnnnnnnnnnnnnnnnnnnnnnnnnnnnnnnnnnnnnngtcagccgactgtgtgccctagctaccccggtgctgctcggaccggaagggcggcttccttcttaatgtcccctagtccttctggctgattttctctgcaaatgtagaggacagtccctctgattccttgtgtactctagaactcttgaatgcttgccaccttttgtgtgccccaggaggcaacaatgtgggggaacatactagcagacagcagcaaagagaaaggatgactgtctttgtgtttttgtccttttgcacaggatgccataaagcacaattcgttcctgtgccctgaaaaaaagcttgaacaaggaaacatcgaggaggcctttgagaacgtggatcaggtagctgaaggtaagtagtatgggagagtttacagtgagtccttgattccacagtgaaccagccatcaaaggcatctgtttgcccttggggtgggggggctcatcctctgaaggcctggggctcacacaaacctacacttcttctcaaagcctcgtgcatccttgtgcctgtgtgtgtgtgtgtgtgtgtgtgtgtgtgtgtgtgtgtgtgtgtggtgtgtggtgtgtgtgtgtgtgtgtgtgtgtgtgtgtgtgtgtgtgtgtggtgtttggaggtgagaagtcagggtagcagaataagcagaaagtcccccctaagacttgcttagtcaagggcagagtcagaaataaaacctggaacttttaaaaaatatatctgttttatttcacatgcattggtgttttgcctgcatgtatgagggtgtatgagggtgtatgtatgtctgtatgagggtgtcagattccctagaactggagttacatgttattagacgcgttctcacgaccggccaggaagaacaccacagaccagaatcttctgcggcaaagctttatttcttacatcttcaggagccagggtgcaggaagcaagagagcaagaagcaagagagcaagaagcaagagagagagaaaacgaaaccccgtccctcttaaggagcattctccttcgcctcggacgtgtcactccctgattggctgcagcccatcggccgagttgacgtcacggggaaggcagagcacaagtagtcataagatacccttggcacatgcgcagattatttgtttaccacttagaacacaggatgtcagcgccattcttgtaacggcgaatgtgggggcggctnnnnnnnnnnnnnnnnnnnnttctaattcgttgaagaattgagttggaattttgatggggatttgcattgaatctgtagattgcttttggcaagatagccatttttacaatgttgatcctgccaatccatgagcatgggagatctttccatcttctgagatcttctttaatttctttcttcagggacttgaagtttttatcatacagatctttcactttcttagttagagtcacgccaagatattttatattatttgtgactattgagaagggtgttgtttccctaatttctttctcagcctgtttattctttgtgtagagaaaggccattgacttgtttgagttaattttatatccagctacttcaccgaagctgtttatcaggtttaggagttctctggtggaattttttagggtcacttatatatactatcatatcatctgcaaaacgtgatattttgacttcctcttttccaatttgtatccccttgatctccttttgttgttgaattgctctggctaggacttcaagtactatgttgaaaagatagggagaaagtgggcagccttgtctagtccctgattttagtgggattgcttcaagcttctcaccatttactttgatgttggctactggtttgctgtagattgcttttatcatgtttaggtatgggccttgaattcctgatctttccaagacttttatcatgaatgggtgttggatcttgtcgaatgctttttcctcatctaacgagatgattatgtggtttttgtctttgagtttgtttatataatggattacattgattgatttttgtatattaaaccatccctgcatccctggaataaaacctacttggtcaggatggatgattgctttaatgtgttcttggattcggttcgcgagaattttattgaggatttttgcatcgatattcataagggaaattggtctgaagtactctatctttgttggatctttctgtggtttaggtatcagagtaattgtggcttcatagaatgagttaggtagagttccctctacttctattttgtggaatagtttgtgcagaactgggattagatcttctttgaaggtctggtagaactctgcactaaacccatctggtcctgggnnnnnnnnnnnnnnnnnnnngaggtgctgagaagaaggtatatccttttgttttaggataaaatgttctgtagatatctgttaagcccatttgtttcataacttctgttagtttcactgtgtccctgtttagtttctgtttccacgatctgtccattgatgaaagtggtgtgttgaagtctcccactattattgtgtgaggtgcaatgtgtgctttgagctttactaaagtgtctttaatgaatgtggctgcccttgcatttggagcgtagatattcagaattgagagttcctcttggaggattttacctttgatgagtatgaagtgtccctccttgtcttttttgataactttgggttggaagttgattttatccaatattagaatggctactccagcttgtttcttcagaccatttgcttggaaaattgttttccagcctttcactctgaggtagtgtctgtctttttccctgagatgggtttcctgtaagcagcagaatgttgggtcctgtttgtgtagccagtctgttagtctatgtctttttattggggaattgagtccattgatattaagagatattaaggaaaagtaattgttgcttccttttatttttgttgttagagttggcattctgttcttgtggctgtcttcttttaggtttgttgagggattactttcttgcttgttctagggcatgatttccgtccttgtattgcttcttttctgttattatcctttgaagggctggattcatggaaagataatgtgtgaatttggttttgtcgtggaatagtttgttttctccatctatggtaattgagagtttggccaggtatagtagcctgggctggcatttgtgttctcttagggtctgtatgacatctgcccaggattttctggctttcatagtctctggtgagaagtctggtgtaattctgataggtctgcctttatatgttacttgacctttctcccttactgcttttaatattctctctttatttagtgcatttttttgttctgattattatgtgtctggaggaatttcttttctgnnnnnnnnnnnnnnnnnnnnnnnnnnnnnnnnnnnnnnnnnnnnnnnnnnnnnnnnnnnnnnnnnnnnnnnnnnnnnnnnnnnnnnnnnnnnnnnnnnnnnnnnnnnnnnnnnnnnnnnnnnnnnnnnnnnnnnnnnnnnnnnnnnnnnnnnnnnnnnnnnnnnnnnnnnnnnnnnnnnnnnnnnnnnnnnnnnnnnnnnnnnnnnnnnnnnnnnnnnnnnnnnnnnnnnnnnnnnnnnnnnnnnnnnnnnnnnnnnnnnnnnnnnnnnnnnnnnnnnnnnnnnnnnnnnnnnnnnnnnnnnnnnnnnnnnnnnnnnnnnnnnnnnnnnnnnnnnnnnnnnnnnnnnnnnnnnnnnnnnnnnnnnnnnnnnnnnnnnnnnnnnnnnnnnnnnnnnnnnnnnnnnnnnnnnnnnnnnnnnnnnnnnnnnnnnnnnnnnnnnnnnnnnnnnnnnnnnnnnnnnnnnnnnnnnnnnnnnnnnnnnnnnnnnnnnnnnnnnnnnnnnnnnnnnnnnnnnnnnnnnnnnnnnnnnnnnnnnnnnnnnnnnnnnnnnnnnnnnnnnnnnnnnnnnnnnnnnnnnnnnnnnnnnnnnnnnnnnnnnnnnnnnnnnnnnnnnnnnnnnnnnnnnnnnnnnnnnnnnnnnnnnnnnnnnnnnnnnnnnnnnnnnnnnnnnnnnnnnnnnnnnnnnnnnnnnnnnnnnnnnnnnnnnnnnnnnnnnnnnnnnnnnnnnnnnnnnnnnnnnnnnnnnnnnnnnnnnnnnnnnnnnnnnnnnnnnnnnnnnnnnnnnnnnnnnnnnnnnnnnnnnnnnnnnnnnnnnnnnnnnnnnnnnnnnnnnnnnnnnnnnnnnnnnnnnnnnnnnnnnnnnnnnnnnnnnnnnnnnnnnnnnnnnnnnnnnnnnnnnnnnnnnnnnnnnnnnnnnnnnnnnnnnnnnnnnnnnnnnnnnnnnnnnnnnnnnnnnnnnnnnnnnnnnnnnnnnnnnnnnnnnnnnnnnnnnnnnnnnnnnnnnnnnnnnnnnnnnnnnnnnnnnnnnnnnnnnnnnnnnnnnnnnnnnnnnnnnnnnnnnnnnnnnnnnnnnnnnnnnnnnnnnnnnnnnnnnnnnnnnnnnnnnnnnnnnnnnnnnnnnnnnnnnnnnnnnnnnnnnnnnnnnnnnnnnnnnnnnnnnnnnnnnnnnnnnnnnnnnnnnnnnnnnnnnnnnnnnnnnnnnnnnnnnnnnnnnnnnnnnnnnnnnnnnnnnnnnnnnnnnnnnnnnnnnnnnnnnnnnnnnnnnnnnnnnnnnnnnnnnnnnnnnnnnnnnnnnnnnnnnnnnnnnnnnnnnnnnnnnnnnnnnnnnnnnnnnnnnnnnnnnnnnnnnnnnnnnnnnnnnnnnnnnnnnnnnnnnnnnnnnnnnnnnnnnnnnnnnnnnnnnnnnnnnnnnnnnnnnnnnnnnnnnnnnnnnnnnnnnnnnnnnnnnnnnnnnnnnnnnnnnnnnnnnnnnnnnnnnnnnnnnnnnnnnnnnnnnnnnnnnnnnnnnnnnnnnnnnnnnnnnnnnnnnnnnnnnnnnnnnnnnnnnnnnnnnnnnnnnnnnnnnnnnnnnnnnnnnnnnnnnnnnnnnnnnnnnnnnnnnnnnnnnnnnnnnnnnnnnnnnnnnnnnnnnnnnnnnnnnnnnnnnnnnnnnnnnnnnnnnnnnnnnnnnnnnnnnnnnnnnnnnnnnnnnnnnnnnnnnnnnnnnnnnnnnnnnnnnnnnnnnnnnnnnnnnnnnnnnnnnnnnnnnnnnnnnnnnnnnnnnnnnnnnnnnnnnnnnnnnnnnnnnnnnnnnnnnnnnnnnnnnnnnnnnnnnnnnnnnnnnnnnnnnnnnnnnnnnnnnnnnnnnnnnnnnnnnnnnnnnnnnnnnnnnnnnnnnnnnnnnnnnnnnnnnnnnnnnnnnnnnnnnnnnnnnnnnnnnnnnnnnnnnnnnnnnnnnnnnnnnnnnnnnnnnnnnnnnnnnnnnnnnnnnnnnnnnnnnnnnnnnnnnnnnnnnnnnnnnnnnnnnnnnnnnnnnnnnnnnnnnnnnnnnnnnnnnnnnnnnnnnnnnnnnnnnnnnnnnnnnnnnnnnnnnnnnnnnnnnnnnnnnnnnnnnnnnnnnnnnnnnnnnnnnnnnnnnnnnnnnnnnnnnnnnnnnnnnnnnnnnnnnnnnnnnnnnnnnnnnnnnnnnnnnnnnnnnnnnnnnnnnnnnnnnnnnnnnnnnnnnnnnnnnnnnnnnnnnnnnnnnnnnnnnnnnnnnnnnnnnnnnnnnnnnnnnnnnnnnnnnnnnnnnnnnnnnnnnnnnnnnnnnnnnnnnnnnnnnnnnnnnnnnnnnnnnnnnnnnnnnnnnnnnnnnnnnnnnnnnnnnnnnnnnnnnnnnnnnnnnnnnnnnnnnnnnnnnnnnnnnnnnnnnnnnnnnnnnnnnnnnnnnnnnnnnnnnnnnnnnnnnnnnnnnnnnnnnnnnnnnnnnnnnnnnnnnnnnnnnnnnnnnnnnnnnnnnnnnnnnnnnnnnnnnnnnnnnnnnnnnnnnnnnnnnnnnnnnnnnnnnnnnnnnnnnnnnnnnnnnnnnnnnnnnnnnnnnnnnnnnnnnnnnnnnnnnnnnnnnnnnnnnnnnnnnnnnnnnnnnnnnnnnnnnnnnnnnnnnnnnnnnnnnnnnnnnnnnnnnnnnnnnnnnnnnnnnnnnnnnnnnnnnnnnnnnnnnnnnnnnnnnnnnnnnnnnnnnnnnnnnnnnnnnnnnnnnnnnnnnnnnnnnnnnnnnnnnnnnnnnnnnnnnnnnnnnnnnnnnnnnnnnnnnnnnnnnnnnnnnnnnnnnnnnnnnnnnnnnnnnnnnnnnnnnnnnnnnnnnnnnnnnnnnnnnnnnnnnnnnnnnnnnnnnnnnnnnnnnnnnnnnnnnnnnnnnnnnnnnnnnnnnnnnnnnnnnnnnnnnnnnnnnnnnnnnnnnnnnnnnnnnnnnnnnnnnnnnnnnnnnnnnnnnnnnnnnnnnnnnnnnnnnnnnnnnnnnnnnnnnnnnnnnnnnnnnnnnnnnnnnnnnnnnnnnnnnnnnnnnnnnnnnnnnnnnnnnnnnnnnnnnnnnnnnnnnnnnnnnnnnnnnnnnnnnnnnnnnnnnnnnnnnnnnnnnnnnnnnnnnnnnnnnnnnnnnnnnnnnnnnnnnnnnnnnnnnnnnnnnnnnnnnnnnnnnnnnnnnnnnnnnnnnnnnnnnnnnnnnnnnnnnnnnnnnnnnnnnnnnnnnnnnnnnnnnnnnnnnnnnnnnnnnnnnnnnnnnnnnnnnnnnnnnnnnnnnnnnnnnnnnnnnnnnnnnnnnnnnnnnnnnnnnnnnnnnnnnnnnnnnnnnnnnnnnnnnnnnnnnnnnnnnnnnnnnnnnnnnnnnnnnnnnnnnnnnnnnnnnnnnnnnnnnnnnnnnnnnnnnnnnnnnnnnnnnnnnnnnnnnnnnnnnnnnnnnnnnnnnnnnnnnnnnnnnnnnnnnnnnnnnnnnnnnnnnnnnnnnnnnnnnnnnnnnnnnnnnnnnnnnnnnnnnnnnnnnnnnnnnnnnnnnnnnnnnnnnnnnnnnnnnnnnnnnnnnnnnnnnnnnnnnnnnnnnnnnnnnnnnnnnnnnnnnnnnnnnnnnnnnnnnnnnnnnnnnnnnnnnnnnnnnnnnnnnnnnnnnnnnnnnnnnnnnnnnnnnnnnnnnnnnnnnnnnnnnnnnnnnnnnnnnnnnnnnnnnnnnnnnnnnnnnnnnnnnnnnnnnnnnnnnnnnnnnnnnnnnnnnnnnnnnnnnnnnnnnnnnnnnnnnnnnnnnnnnnnnnnnnnnnnnnnnnnnnnnnnnnnnnnnnnnnnnnnnnnnnnnnnnnnnnnnnnnnnnnnnnnnnnnnnnnnnnnnnnnnnnnnnnnnnnnnnnnnnnnnnnnnnnnnnnnnnnnnnnnnnnnnnnnnnnnnnnnnnnnnnnnnnnnnnnnnnnnnnnnnnnnnnnnnnnnnnnnnnnnnnnnnnnnnnnnnnnnnnnnnnnnnnnnnnnnnnnnnnnnnnnnnnnnnnnnnnnnnnnnnnnnnnnnnnnnnnnnnnnnnnnnnnnnnnnnnnnnnnnnnnnnnnnnnnnnnnnnnnnnnnnnnnnnnnnnnnnnnnnnnnnnnnnnnnnnnnnnnnnnnnnnnnnnnnnnnnnnnnnnnnnnnnnnnnnnnnnnnnnnnnnnnnnnnnnnnnnnnnnnnnnnnnnnnnnnnnnnnnnnnnnnnnnnnnnnnnnnnnnnnnnnnnnnnnnnnnnnnnnnnnnnnnnnnnnnnnnnnnnnnnnnnnnnnnnnnnnnnnnnnnnnnnnnnnnnnnnnnnnnnnnnnnnnnnnnnnnnnnnnnnnnnnnnnnnnnnnnnnnnnnnnnnnnnnnnnnnnnnnnnnnnnnnnnnnnnnnnnnnnnnnnnnnnnnnnnnnnnnnnnnnnnnnnnnnnnnnnnnnnnnnnnnnnnnnnnnnnnnnnnnnnnnnnnnnnnnnnnnnnnnnnnnnnnnnnnnnnnnnnnnnnnnnnnnnnnnnnnnnnnnnnnnnnnnnnnnnnnnnnnnnnnnnnnnnnnnnnnnnnnnnnnnnnnnnnnnnnnnnnnnnnnnnnnnnnnnnnnnnnnnnnnnnnnnnnnnnnnnnnnnnnnnnnnnnnnnnnnnnnnnnnnnnnnnnnnnnnnnnnnnnnnnnnnnnnnnnnnnnnnnnnnnnnnnnnnnnnnnnnnnnnnnnnnnnnnnnnnnnnnnnnnnnnnnnnnnnnnnnnnnnnnnnnnnnnnnnnnnnnnnnnnnnnnnnnnnnnnnnnnnnnnnnnnnnnnnnnnnnnnnnnnnnnnnnnnnnnnnnnnnnnnnnnnnnnnnnnnnnnnnnnnnnnnnnnnnnnnnnnnnnnnnnnnnnnnnnnnnnnnnnnnnnnnnnnnnnnnnnnnnnnnnnnnnnnnnnnnnnnnnnnnnnnnnnnnnnnnnnnnnnnnnnnnnnnnnnnnnnnnnnnnnnnnnnnnnnnnnnnnnnnnnnnnnnnnnnnnnnnnnnnnnnnnnnnnnnnnnnnnnnnnnnnnnnnnnnnnnnnnnnnnnnnnnnnnnnnnnnnnnnnnnnnnnnnnnnnnnnnnnnnnnnnnnnnnnnnnnnnnnnnnnnnnnnnnnnnnnnnnnnnnnnnnnnnnnnnnnnnnnnnnnnnnnnnnnnnnnnnnnnnnnnnnnnnnnnnnnnnnnnnnnnnnnnnnnnnnnnnnnnnnnnnnnnnnnnnnnnnnnnnnnnnnnnnnnnnnnnnnnnnnnnnnnnnnnnnnnnnnnnnnnnnnnnnnnnnnnnnnnnnnnnnnnnnnnnnnnnnnnnnnnnnnnnnnnnnnnnnnnnnnnnnnnnnnnnnnnnnnnnnnnnnnnnnnnnnnnnnnnnnnnnnnnnnnnnnnnnnnnnnnnnnnnnnnnnnnnnnnnnnnnnnnnnnnnnnnnnnnnnnnnnnnnnnnnnnnnnnnnnnnnnnnnnnnnnnnnnnnnnnnnnnnnnnnnnnnnnnnnnnnnnnnnnnnnnnnnnnnnnnnnnnnnnnnnnnnnnnnnnnnnnnnnnnnnnnnnnnnnnnnnnnnnnnnnnnnnnnnnnnnnnnnnnnnnnnnnnnnnnnnnnnnnnnnnnnnnnnnnnnnnnnnnnnnnnnnnnnnnnnnnnnnnnnnnnnnnnnnnnnnnnnnnnnnnnnnnnnnnnnnnnnnnnnnnnnnnnnnnnnnnnnnnnnnnnnnnnnnnnnnnnnnnnnnnnnnnnnnnnnnnnnnnnnnnnnnnnnnnnnnnnnnnnnnnnnnnnnnnnnnnnnnnnnnnnnnnnnnnnnnnnnnnnnnnnnnnnnnnnnnnnnnnnnnnnnnnnnnnnnnnnnnnnnnnnnnnnnnnnnnnnnnnnnnnnnnnnnnnnnnnnnnnnnnnnnnnnnnnnnnnnnnnnnnnnnnnnnnnnnnnnnnnnnnnnnnnnnnnnnnnnnnnnnnnnnnnnnnnnnnnnnnnnnnnnnnnnnnnnnnnnnnnnnnnnnnnnnnnnnnnnnnnnnnnnnnnnnnnnnnnnnnnnnnnnnnnnnnnnnnnnnnnnnnnnnnnnnnnnnnnnnnnnnnnnnnnnnnnnnnnnnnnnnnnnnnnnnnnnnnnnnnnnnnnnnnnnnnnnnnnnnnnnnnnnnnnnnnnnnnnnnnnnnnnnnnnnnnnnnnnnnnnnnnnnnnnnnnnnnnnnnnnnnnnnnnnnnnnnnnnnnnnnnnnnnnnnnnnnnnnnnnnnnnnnnnnnnnnnnnnnnnnnnnnnnnnnnnnnnnnnnnnnnnnnnnnnnnnnnnnnnnnnnnnnnnnnnnnnnnnnnnnnnnnnnnnnnnnnnnnnnnnnnnnnnnnnnnnnnnnnnnnnnnnnnnnnnnnnnnnnnnnnnnnnnnnnnnnnnnnnnnnnnnnnnnnnnnnnnnnnnnnnnnnnnnnnnnnnnnnnnnnnnnnnnnnnnnnnnnnnnnnnnnnnnnnnnnnnnnnnnnnnnnnnnnnnnnnnnnnnnnnnnnnnnnnnnnnnnnnnnnnnnnnnnnnnnnnnnnnnnnnnnnnnnnnnnnnnnnnnnnnnnnnnnnnnnnnnnnnnnnnnnnnnnnnnnnnnnnnnnnnnnnnnnnnnnnnnnnnnnnnnnnnnnnnnnnnnnnnnnnnnnnnnnnnnnnnnnnnnnnnnnnnnnnnnnnnnnnnnnnnnnnnnnnnnnnnnnnnnnnnnnnnnnnnnnnnnnnnnnnnnnnnnnnnnnnnnnnnnnnnnnnnnnnnnnnnnnnnnnnnnnnnnnnnnnnnnnnnnnnnnnnnnnnnnnnnnnnnnnnnnnnnnnnnnnnnnnnnnnnnnnnnnnnnnnnnnnnnnnnnnnnnnnnnnnnnnnnnnnnnnnnnnnnnnnnnnnnnnnnaaatctgggcataagctccccaatggtagtttgtctgatcagcagaaataagctccctgtacccgttaacaagtcaaaagtccaatctctctgctctggaagtcaaagcagctgcgtttgctcgggcctgcgcttgtgcagcttcgtgccaaagcgctctccattccatatatttgcccatactagggagagcggcttttacaaccgtttgccagtcggcaggagttagtgccatgccagcgagcctgtctaactgcaccaaggtaaaattagcattggttccgtatttacgaaccgactcggcaatttccttaatttgtaagtattctaccggagcatggacacgcccaccctcggctccttcaaagaccggaaatgcctgttgtattttcctttgttcctctctgggaatgaatgagtctgcgcactgcctctctgcgcactgcctctctgcgcatctctctgcgcattgctgacgcactacgcagggcggggactccgcatagggcggaccttgaagccgactgccctgaggccaatcagcaaactggccttcgccagccgcttttggcttttttcttgaccaattagctggctggtaatgggctgcttcttcctcccagtctgtttcctcagaggaggattcttcacctgcttcagaactactaagagctggctccccgagcccatccagcgatgagcacaggctccttttcctagagacctccgctaattgatctttcttcttttccctttttcctctttttcttctaatctctctccaggtattcctacctaaccttaacttttcctcgggttcaagacccttggaaaggcctgtatacttattttgtgtaccatatttcctctttgttcctactctctctccccgctttacttctgatagcttgtcctgaatttcatctagaatcctccctatcttaaccacttgataacatgtgaaaaggaacaaaagggctcctaacaccagaaaaaattcaaggccaaacatattccactttacttctgatagactgtcttgaatttcgttagaaagttcaagatcagacttacctcgtaaagctgtactcactggtactctcgttccccagctgaaaagttctgaattcatacagttgaatccttcttaacagtctgctttacgggaacctttattaccgcgacccgcagttctggttctggaatgagggatcttccttgcgccagtcccgagttttttctcgtcccggaattcggcaccaattgttattagacgcgttctcacgaccggccaggaagaacaccacagaccagaatcttctgcggcaaagctttatttcttacatcttcaggagccagggtgcaggaagcaagagagcaagaagcaagagagcaagaagcaagagagagagaaaacgaaaccccgtccctcttaaggagcattctccttcgcctcggacgtgtcactccctgattggctgcagcccatcggccgagttgacgtcacggggaaggcagagcacaagtagtcataagatacccttggcacatgcgcagattatttgtttaccacttagaacacaggatgtcagcgccatcttgtaacggcgaatgtgggggcggctcccaacagttacagtcaactgtgatctgccacatgggtgctgggaattgagccccagtcctctggaagaacaaccagtgctctgaactgatgagccatctttccaacccagaacctggaacttttagctttcagaactatagtctctgaaacaggtcgcctaggttgtcacaaggtagatgccgggctccttggtgggcactactgcaggtgggcggctcacatcgcacttcatttaaagtgcttcaatgatggcagcttccagccccatgtgctccaggcgtgctcctgcacttgcccctcacagggacagtccatgttggaggacaagaacacttctacatggaaacacagagagtgcttgttattccgaagacagaagacaaagagctagacatgtatgtgtccacacaggacccagcccacgtacaggtaagatccagcaagatgccacaatcaacttcctaactccatcatggtggtcagtctccatagcacaagtggcagccatacataggtagcagaaacttagaatctaaaggttggatatctgtaatgcagctaagaccccagaactattttaactttgttcctgttctcatcaacaataaaagaacaaccctgatcacttttcctttttatatatatatttttttcttactctctgagaatttcatgcatgcaaccaacctatcttgatcatatccatcccttttcctctccagcttaccccagatctccatcacatctcccttctaagctcatgtcttttactttttaaaaaaccattgagtccagttatgctcatgagtacaggggcaactactggagcatggtcaactagttgccacacccccaaagaaaaatgactctcctcttccagcaatatcatctagatccccttcccagcctctgctgggatttttggctggcttgatcttgtgcaggtcttgtccaggtgatttatagcttctgtattcacaactatagcagccctgtcatatccagaagacataattcttattgagaaagtcatgagactttccagaatatccttgaactcactaagtagccacagttgaccttgaacttctgaacaccctgcctctacatcctgagtgttagaatcccagtcatccactattatacaagattttatgcagtgctgaggatggaacccaggtcttcaggcttagtaggcaagttatatccccagtccaagagagatcactttaaattaaaacattcattgctggagtggtggtatcacacacctttaatcccagcaaggggttgtggagcagaagcaggcaaatctctgtgagttcaaggtcagcctgatctacagagtgagttccaggacagccaaggatgcacagagaaaccctgtctcaaaaaacaaaatcaaacaagacaacgaaactacagcagcagcagcaacaaaaaccctctttatttgcagcaggttcagtttaactgtgattggatggcatcactaatttttccccatactctattttattctctaaaatagtcattataggtgatttttaggttcaagacatcactttagaccacatttatacttcgccatgacagacaatgctctaggcttaggtcataaacccatcacccttgttagtaggatgtcaggcggctactgcttttcgctggttatgatcttataggctcaagcgtttgaccaagagtgcagcttccaataagaacccaggactttgatagtttggggaagattaacaatgtttaaaaatggccaggctggaaacaatggtggtacacacctttactcccagtattcaggagacagagacaggtggatctcaatgagtccagcttggtctacatagtgagtttcaggacagtcagggcaacataatgagaccctgtctcaaaaaccagcaaaaccaacaaaactggaccagagtccccaggccaacctgagactgtctccactgccttacagaggtagactcgagtggaccctgctctagagttacatttccggaaacaaaacacctcactgccattttactcttttgaaccttgttgtctcttacagaaaacagtgtcctctaccttaaacatcccgatcagcaggatcacctgccatgtgaaaagagtgggtggaggctttggaggaaaggtggggaggccagctgtgttcggagcaattgctgcggtgggggctgtcaagtaagtctaccttaggggccagaactgtgggagaggctgagctcagaggacagcagtagcctgacaaaccacccctggctgcagtcagaggctcctctagggtcacttcaggcccctttgtgtttctttataaaacatagataattcacacccgccctgctgccctctttggttttgtaaaagtgagctgaacatgtcactttaaataaaggtacgggactttaaataggaaaggtgggacagttgactgctgccgcaacggaacagggggaacccattcctgagcttcagggaagaggaatcggttagctgtggagcaaggcaccctttccaggttcatctttgccccataatgctgcttcagccagagcagggtggagcgaggagagaaagacttccccctccccatccaagcgctgtcttggccacaggagtcttcgggttgatcgcaagagagggcttacatctttgctctccgtggatattcagcactcaagttcagctggcactggcacggctggttcttattcattgtctttggctgggtttgttgtcagtgttggagaacaaagaggaaaagaaacaggaagggggagcagaggaggagaaggagcaggagggggggaggggaggggatactgtttaatatttttgtctgagtttcagtctgcaaagttccaacaccctgcttcctttgacagcctctgtgtagctcagagaaaagttctgtaccctggaacgtgcatcttcatccccagctcggggaggagagaagcacggctgcaatctcatctctacttctctcctctaccagtcactgaagaccttgtgtcttctgcctctcacgtgtggccacacacagttgtcaagtgaagcacttaaatttcaaagcctaggctagccactatgagccctgacatcagtatattctaaaacttgcctgtgacccccctgcgcagccaagtgtggaaccagtgcctcaccatgcatcctgccttagcacacaattgtcagtcgcacgttaaatgacctgagagcagtgttcccaatcctgcctcaaacataatttttttttttaatttaaaaaaagaaattccgggctggcaagatagctcagcgggtaagagcactgactgctcttcagaaggtcctgacaactacaaatcccaacaactacatgagatctgatgccctcttctggtgtgtctgaagacagtaacagtgtacttatttataataataaataaatctttgggccagagtgagcagggactgagcaagcagggttgactggagcaagcagaggtcctaaattcaattcccacatgaaggctcagaaccatctgttcagctacagtatactcatatacataaaataaataaataaatctttaaaaaaatgaaaaaaagaaaaaaaatcccaccttcctatccaaatcccagaccttctgaatcagaatttaataagggatgagtcttgaaactgtacatttaactggcatttttctattgatgttaacattgtatctacccattcacactctccctttacaacatatgcaaaacgggtggatctgggtgaaagtcaaatttgaagccatagggacagaacttagctggaaggtaatattaatccttttagacataaaataagcactgaattgcaaggcacagagaaatcatcaggcaataatccatatcatgcctagaagattgtatacagattaatagatacatgtggaatggatagacagatggagagacagatggatagatggatggatggatggatggatggatgggcagatggacggagaattaaatgaatgatagaaatggatgggaaggtgaagggtagatgttttacatgttgtaaatggatgtgggaagagagtaaaataaggacttgaataagtaggtggatatgtgcatagctgaatagataaatgagtggatggacagatggatgagatgaatggagatctaaactttgttttctgcagaactggccatcccattcgtcttgttctggatcgtgaagatgatatgctaataactgggggacgacacccattatttgcaaaatacaaagtaagtgctacaagtgaagttattaaaatgcctcattttgtttgaggggctttgcccttttctatcattttgattttgttgaaatctaaaaacagtcagcatttaaaatattttacatgaaaatggtatgtattttggatgcccatgacattttatgattagcttttcatttagtgtataattgtaaaaaatggaatgatgaaaataaatttttaagtagtaacttaaaggcattgcttgagggcctggagctatggctcagtggctatagcttgccatgcagacctgaggactgagatagtatccccaggacctacgtaaagactaagagactgaggctgctccctgcagcaaccccagtacccgggaggaggagacagggggtccctgaggccacttgtctagaaagactagccaaaatggtaaggtctgggtctgtcaggaaactctgcctcagtaaataaattaaagtacaatcaagaaagccttctgacattatcctttggcaccacacacatgtgcactcacacatatgtagacacacacggggaaggcgggaaggcactattaaaaggaataaggatttatatttttagagattcctcaaaggagagggggaagaaaaagaaagatgatgtccaaacatcatggctatgagaacagcactttgttgtagaaatatttagaaacaacttgaccattttgcattgcaaaataatctctaacagaagtccactaactggtgaatttaaattattcaagtcactccattttctttcaactgcagtagaaacactgtttaaatatgtttgcagcatctagtagatgatgctattttttgaatttgtgactgcgtccttaggacattctgtcctgatataagtttacaaaacatgctttattaggcattccttgagcatacacagctgatttcctacctggttttaccactgccttagattgctgcaccatccattacctatgccgctatttacaaagcaccttggccacccagtgaggcaagtccagctcatgaattctccaccctctgttcccgcccaagactttcctgtcacagggataacatgattcatctccatgcactctggaatcccagagactttccaatgtggagaaaaccacaaactaaattagaaagaaagccaggacagaatggcggagaatcttacaagagtcaggagaatgagagaggcgatttacattctgggagtggagcacaaacttgaggattccatgctgggtgtggagccagaattgcctgctaaaaagaaaggactcagagctgggcagtggaggcacacgcttgggaggcagaggcaggtggatttctgagttcgaggccagactgttctacagagtgaattccaggacagccagggccacactgagaaactctgtctcgaaaaagaaaggactcagaaaaacttgagttaagaaaggtcttcttggactggagagatggctcagtggttaagagcactgactgctccttgggaggacctgagttcaattcccagcaccaacatggtgactcacaaccatctgtaatggaacccaacaccctcttctggtgtgtctgaagacagcaacagtgtactcacataaagtaaataaattagtaaatctttttatttttttnnnnnnnnnnnnnnnnnnnnnnnnnnnnnnnnnnnnnnnnnnnnnnnnnnnnnnnnnnnnnnnnnnnnnnnnnnnnnnnnnnnnnnnnnnnnnnnnnnnnnnnnnnnnnnnnnnnnnnnnnnnnntatgatgccctcttctggtgtgtctgaagacagtgacaatgtactcacatacatgaaataaataatctttaaaaaaaaaaagaaaggccttcttcagacactggaagacaaggtcacagcaggcaggagccacacaagaacaaactggaggcaaagtctgtctttgatgccttccaacagggaactaaggggtgactcacagttggtaagtacattttaggcaaatcagtaaaatgtccgtcattcggcgacaggtgggattcatgaacagtggacggatcaaagccctagacattgaatgctacatcaatggaggctgcacattggatgactcggagctggtatgtgtgtcagacatcactgtgccccttcagagataacatgcaaaatgtctggttgtgtaaaagtaccttcttatttgcctgatatactggcttattctcagcctctgaatttttgctctatttgacctcaaactaactctggcagtctggtctaatcttctagcttcttctcgttctctggcttgttctctcttcaacctgtctctgtaagtctcccggtaaaactgctagctcgctcgctctctctctctctctctctctctctctctcgcttgctctctctctttctctctgtctctctctctgtctttctttctctctgtctctctctttctctctctctttctctctctctttctctctgtctctctctttttctctgtctgtctgtctgtctgtctgtctctctctctctctctcctgtgcattgttctctctgaagtagtctttcttttctctctgttcttgtgagacttgagcatatctgattctgtcaaagctcctctgattcatcactttgtgtgccactcaattagatatcactttgaaacatggctgcttccttctacaaactagctttaccgtcattgtatgggatgaaaggtatgttctaaggctaagatattccacaactaataacaggtttttccagtaaacacaacacactcttgggattcacagtgtgatcaaatatcctgcaacatggaaagttgggcagtgtgtctaatatgtgtggctatctcctttttctttaggtaacagaatttcttgtactaaaactggaaaatgcatacaaaatccgaaacctcagactccgaggtcgtgcctgcatgacaaacttaccatccaatacagcttttcgtgggtttggcttccctcagggagccctggtaacagaatcctgcatcacagctgtggcagccaaatgtgggcttccaccagaaaaggtaagattataatgaggctcataaccaaggctgataaggaattcgaggaattagctagcagccccagggaacactagaacaactacacaaactaaccctggcttagaatttgagataagagctttagtttgttttttgttttgtttttttgttttttgttttttcatgactgtgatgtggacatgccatcattagttagacactccaggactgacacatatctgggttgtttgctacccagtttagactgttaaatgttactggaactagatagaaggcacagtggctaagagtgcatactgctcttccaggggaccagaattctgctcccagcacccacattagtggtgctctgtaactccagctccccgggatccatcctgcgccctcttctgttctctatgggcactgcatcacgtgcacaaactcacacacatatctacataatttaaaaataaaatcttatgccaggtggtggtggcacacaactttaatcctagcacttgaggagcaaaggcaggcagatttctgagtttgatggtagcctgagtgagttccaggacagccaagactacacagagaaaccttatctcaaacaaacaaaatacacacatacataaatacatccataagtacatacatacatgtacatatatgcataaaatcttaaggtgaccttgaaatggacaccctaatacatatgtgctaaggatacataatagttttgtccttttgtataaatccatttattgaacaaactcacagaaatggaattgctggtacacttgaaggctttttggagatattgtccaaaattaaccatttaaaaatattgttctgtgaagtaccccagaaggcttgtggagtacaagggagttggagcagagtcaggctgactccagcaccagctgttgctgacatcttctactccttacctgttcagtcccacctgagtgtgcactccgtgtctaccctgtctcctcaacccagacctgctccagcaaggattctctatgtgttgtctctggaacatctttgtccctaaattcaatgggacctctgggttttcattggattggcagagtacttcctctgcaccagagaacacctagtcctatatacacagcatatatcagaataataatagatttcctataagacttcacaaacggttcccatgggtacaaaggaggaaaccatctcatcaggatgaagattagggggaaaaaaaaacccaaaaaacaatatccttctgagaagatggcaggaggttcagcctgaagaaaggtagatggagagacgacctaagcaggaaaagtaggaacagagacagtggcctctgtgccctggatgccttggctagaacaagatgactcacttcatagagtttctgaggaacaaataaatttttacaaaaatattcattttcatggagctgaggatgtagctcagtgatagagttaagacagcgttcacaaagccttgggctccaaccccagagctatacatgcaaaaagaaaaagaaaatagattttataacctgcataatctttaaaaatccagtgttgttgctggagacagtacagtattcttttccttctatcaaaataagttggagagagtgaaaccactcccccgggcatttccagctggctctcctttcctggaggttgaagttcccaagatatgatgcagatcctgttcatacacaaatttgaaaagatttaaccatgtattcaaagtacacacacatgcacagacaatataggatagataggtagataaatcatacttagaaagatagataatgggtgaatggatggatggatggatggatgggtaggtaggtaagtaacccaacctcccgggccttcatcatactcccttactagtcactgtcataagttctgatggaatttcacacttgtttcagattagggagaaaaacatgtacaaaacagttgataaaaccatctacaagcaagcgttcaaccctgaccccctgataaggtgttggaatgagtgtctggacaagtcttcctttcacatcagaaggacaagagtggacgagttcaataagaagagttactggaagaagcgaggcattgctattgtccccatgaagttttcagttggctttgctgcgacaagctaccatcaggtaaagttcacacatacacgcatgtgccatgtagtaaataacccttatgtccaacacaatcttggtccaatcactgattctgatgttcgaggatgccacatttccctgaatatacataggagaagtttccagaagcatgatcagcttcatgtggtagtaggagaaaggtcactgtggtaagaagctttggtgacaagcctgaggacatcagtcacatggctgtcaagactggaggttagaagaactggctccagattctatgctaatctaaaggaacaggagcccacaggcccctgtgtgtttcctgaggaaggggtgtcccacctgcagggatgcttgggatacctgccaagtctcaggcagagaagtcattctattgctttctgacctggcacttggagccacctccccaggaatctgttgcctctggtgggaaattgccctggagaagttggcaagaggaggagccaagtcattcccaggcaggagggaggcatgggagagtctcacacacagccaagacctctaaagaggaccgggcctgagccaacagatctctgaactgcagagggtctcagggaccagaaaactggcagaaatctgggaatggctgtccttactcactgctatcaacccaggtcagaaaatgcagcaactgggaaaggctttaagtagtacagcactatgtgcataccatcgaaagcatttctccattcataccccactaatggcagcctatcttcccccaacccctccctacacacagtacacacacacacacacacacacacacacatgcatgcacacatgtacacatgtatacacacacatgcacacatgtacacatgtatatatacacacacatacacacacacactgtgaaaggaagcccctcctaggaaataaaagcagcagttgatccaaacttttagtcaactggagtcagaaaggaaacgctgagacattcttggtctgccgtttgctaggtctgtgacattaaagctgttcagactttctgagctttagctccatcgactgtaaagtgagactagcaataatactctcttaggattaatgaggactggctgagaaaattaatataggtcacttggcaagattccttgaacattctggaagtcaaccagggtaatcgtaagcccttcccaagagagcccagacacatctctcagggctctttctcccctgacaggtaggataagatgccctcagcttatgggtcatatccctgcctgggtccagaatgaccattccatagacaggtacaaggttagttttcatatccactcacttgactgactcaatggaccctgaatggtttttctctgccaccaaatattgtatctttaccagcctaacttgaccaacagctgggtgacaagtagacaggttcgaccatgtagtaactaccctgagttagcatagacctcacaaatcaagggttaaatccacagactatatccactctgacaccagctacaaattcatacttctgcctaaatgattttttttttagctgtaatgattttctagaacaaatcacaaaactcaggaaggctttttatattttattatcattaccagctgatataaatgacacaactcagaagcagccaatgggaaagatgcctaaggcaggacactagggagggacaaagaacttgtcttttgagtgttcatcccccaagaagtgcagagaactcagaaaggtgcagtgggaatggaatacaccctcaccagagcaccactcacacacaaatataaatatacacagtctgacccactcaccctgaacctatcccagtacctcctgaggaagtactgtgccaagaaccagaaacaagacttaagtacctagtttcttttgtcatcaaaatggtcccttctcagcaaaagtacagcccttccactatcatccctgggcgccaattttttatcttggccacattagaagaaagctttacctcagctgatgacttttagcttccccacggagctgtaaattgacatgcccaagaaccgcttggccaggtctggcaagtgtcattccaggtcagctgctgacacagctggaacgcctcctcacaaacagtgggaggcagagtgctacagccagccacaggctacagtgagtaaagactcttattagcaccatacatctccaagctccccaacccctccaagccaccggggagcctcgcctccaggcatctccaggctgggaggaaaaacaccacctttccacccatctaatttaacaaaatctacgtagtgtctctgagtccaacctgctcaaagttctctctaggacacagtcacacagtgcctgccctgcttggagattctctgagcagaacttgccatgcccctggggtaccctgtagtaggtgcagcaaacatagtgggcagctcggaaaaacatatgtgtgtgtttatgtgtatgtttaagtgtatgtgtatagatcctacagttctatagattggaagttcagagttaagctatcagcagaaccactctgtctccaagccctcaggctttcccagcctcttcaggctcctgccccttcctggcttatggcaatataactccattgactgactccagctttatgggccattatccctggtgttgtccccagagtctgctaaggatgccagtcattgaatttgagaccccttctactagtctgatcatcttaaataattatatctgcaaaaaccatttccaactcggagcatgttctgaggctccaggtggatgtgaactgggaggagtgagccactgctgcacccagaacttaaaagaggaaggatggaagaggtgatggggccttctcagatatggtcagatgctgcagggagtcttaagagagtggagactgcagggtctaaatgctggacagatggaaaacagggaaccatccaggaactgaagacagcagagcaggagccagggtcggagaggagtcatggtgggattggacctggacaaggcaagaagagagagtaatgtagtagggtcagggatgagaccagaccctaaaggacagctgtgacaaggggcagagctttcagcaacaggtaaaggggagtcaccttgctcacttctgtcccttgcctctattcattttcatgtcaggggaccctgagcttcacaaggggagttggagctgactgctcagctctcatagaactcattttctacagccttaagccactgagattctgcccagaaatgactggacttcagccagtgtccccaccatcgtatgcctggcttgaagcagcctgttcacgtttatgtgtctagacaagatcagggaaatattccactcagtagcttcacagtcagccctaactcacttgaatttcaagtagttaagaccaggtaggcatgatcatatatgattttaaccctagtacttgggggacgaaggcaggcaaatttctgtgagttcaaggccagccggaaggagttctaagccagctagagatacatagtaagataagaccctgtctaaaaaaaaaaaaattcagattgctaagtagggaaattctttacagttgacttttgatagagtagacgtaagttcaaggacctatgggaaacctcacatctctgacttccctgctccagagagtgaggtttcactacctcatttcttttcctaaatttttagaaattattttatgtgtatgagagttttgcctgcatatatgtctttgtaccatgtgtgtgcattgcccattaaaactaaacaaggaagttgtatttcctggaaactggaattacatttgtgagctgccatgtgggtgctgggaattgatcctgggtcctctggaagatcagccagtgctcttaacccctaagccatctccccagcctctccctcacttcttacattgaacttaccaacaccctcacagaagtgctcctggattgtcttataggcggctgcgctcgtccatatctacaccgatggctctgtgttggtggcacatggaggcaatgaactggggcaaggtattcacaccaaaatgttacaggtaaaatcaagaaaattcatctttccacacattgttgacatgaccgaaacttggaatagcttttaaggtaaatgatgacaggacattcaaatgtaaagactttgactagttgaaatgcttcttgcatataaactacaatgaacgctgtgacagaaatctcatgcatgtataaatgctcctggaacttggacagagctgagaggtggaagagattattagtaaagccaccactcatgagccggcagaacacgatgacagaggctccacactgccacaagagctaacaaggaactggaaagagccaatgactcatcaaataatcaactattaacatgctgttacttactttctctctctctctctctctctctctctctctctctctctctctctctctcgtgtttagtactagggattgaatttagggctgtgtacaagctaggtaagtagcaagtgctttaacactgagccataacaccagctctttttcattaaaaaaaaaatgcatgctggtgtgattgcacacaattttaatcctggcactctgaatatatataggtaggcagatttctgagtttaagtcctgcctaggctatagagcaagttccaggacagacagggctaagcagagaaaccctgtctcaaaataaacaaacaaacaaataaacaaaacaaaaaataataataaaaaaaacccagccaggtggttgtacgtgcctttaatcccagcactcaggaggcagagacaggcggatctctgagtttgagaccagcctattctacagagcaagttccaggacaagcaaggattacagtagcgaaaccctgtctcaaaggaccaaaaaacaagaaaaagaggggagaggaggaagaagaaagaacaaagaaagaaaataaaaagggaagccaacaggaaggctcatttgtgtgtgtttacccctgctcactcatgcacatgcactctcagattctacatgacagatgcagaggtcaggggacactttaggagagtcagttctcgccttccaccacgtgagttctgggtatctaatgtaggttgtcaggctcagtggtaagtatctgctgggccaactaaccaaccctatcctatacttttaaagacatgttctcagaaaaaactgacccctttgaattaaacacaatcaacatgatgatggaccggtcagattattacagcgtagcttcatcactggtcccttagctctcttagaacacgcctctcacgttacacaagttcccaaggactcctcattcaggcatgctcagccctctcctccttgcttatgctcctgccacagacaggcccagtgacccctgaaccccgtcgactgcaggaaagaaagcatatatgattcttgcgaggtcaaccagcctccttttctaaaacagacaagcagccgctctgagagaggaatctctccccaggcattgtttgggaagtaggctgaaggacaggggtcatcagtagtgattctgtgcagtggacacgcctactgactgttgtaaacagtatggtcatggagaaaggaaagcaaacacagagactgagtgaggaccctcatgagaccataaagtcccatgactttacatgcttgtcagccctccagtccccttttggttgttttgctttgtttgaggcaggttctcactatgtgtccattgcttttccaaaggatccatccaattccaagtactcacatcaggcagctcccagcaacctgtaactcccgctccaggcaggtcagacaggcttttgcagcgcctttttcttttttcttctatttattcccacttacttatgtttttctagtctttgctgttcacttttaaattttctgttcttttcctctaagcttctctgagggacacctataaaaattaagataataaagggggggtagcattttcatgggcagtagcacagacacttggaaaagagaagtaagcgaatcttcatgagtttgaggccagcctggactacaaagtgagttctaggacagagcaacatagtgagatcctgtctcaaaagaagaggaaaaaaggaggagaaggaaaaaaggaagaaaggaaaagaggaaggggaaggagggagagagggagggagggagagagggagggaagaaggagggagggagggacggaggaagaaaccacacaatagctgacaagatggctcagtgggtcaagggtgcttgccaccaagtctaaccactggagttcaagccccaggacccatgtgttagaaggaaagaactaactcctgaaagttgtcttctgatctccacatggatgctctggcacatacatacacagtcataaaaaaactaacttaaaatgtattaaaatttgtttttaaaatatattgcttttttccctacgtttttttttccaatggcttaagttcttgtagactcctttattggatttgaactatgtcctttctcacaggtggccagccgtgaactgaaaatacccctgtcttatctgcatatctgtgaaacaagtacaacaacagtgcccaatacaatcgctacagccgcgtccgttggagcggatgtcaacggcagggctgtgcaggtgactgctcgcatctctgtccccggtgacctttaccacacctctggtttcttatctgtacgcggacgctgtggttggcttcagggaggtgatccatcactgaatgagttatttttctactccaggttaacttagagaaagaaaggtttgtgtggggcttatgatgccagagagataagagtccatcgccatcatggcgtggacatgtggcaataggcaggcatggcaactggagctgcagcggggagctcacatcgtggaccacaggcaggaagcagagagaggactaggtatggtgggagtctttgaactcgcaaagcccaccccccagaggcattcttcttaaacctccccaaatagcaccaactggggaccaagtactcagagactctgggagagatttagtattcaaactaccacagttactaaataaaaagttagactaccaatatattgggagcatatatgaattagagcaaagtaatacatagacccagaatataatggttcagatacaaaagtccctttcatgcacacatcggagtccagagggagtctttggtcagccagacatccagactgatggtggcaccattagtgtggctttctatgtggatctgagcttcatttcaactgcatgaggtcatgcatgaggaagactccaggctagacctggaagtgatgcaagccgcttgtactcatagtcccttagtaagagttagtctccggttctatctacatactctacagacaaggaaagttggtgaacagagaagatagggaaggtgtatgcccagctcctgtgaaggagggagacttcatttgagtgaacagtaactctgtttctgggagacatcgaagaagctttaagacccaacagtgtagaaacatacttgtttccctggcctggtgagttcctacaggctgactaactgagcccagcccagcccagcagacatactaattacagagtggccaccagtgcccccaccagaacacccagagtcaccttctcttggaactctttcaattaacatacaaagtaatgggtttcttactaagttaactgatttaggaatactgatcttctaggttgatttgttatcttttttattattttagtatgttactatttttttatgtttatgggtttttttgccagcaggtatgtctgtgacccacatgtgtgcttggtgcctgctgaaggctagggtagggtgttagatcctctggaactggagctatagagttgccacatgggtgccaggaagaatagccagtgcttttaactgccaagccatttctccagcaccgggacgtttctgagacagcatctcactatatagctcaggatgcctggcaacaggttgtatatcccgaactgacctcagactcatgacagtcacctatagaatcacaggtgtgcaccgccacacctacatggatgctcttttgagttagtactcactgaatttgtcatgcttcttccatgacaaacgcttttttcactggagcattgtgggaatgaaattcctgcagatcactataattgccttcaaaccagccttatctatgtgagagcaattctggggagcgggggcacaaaactagtgggttttttttttctcagaacaaatgtatgaaaaagttcaaatccatgagcttatattcgaagtaggctctaacacaagcggtgggcaggccaggcactatggagttgcttaacccttagctaagagttagagcatctagtcttaggatcagaaactgtgggtttatagttctggctttgttcatttggtttgttttggtttgttggaactgtcatggaattcgctgtggagacaaggctggtcttgaactcagagacccacctgcctctgcctcctgaatgctaggattaaaggcatgtgccaccactgcccagcttagttctgttctgttttgttttgttttgttttgtttttagatttactttttattttatgtgtatggaatttttgcctgcatatatgtcttaaaatcaactttctttttttcttttttcttttttttttttttttttttttttttggtttttcgagacagggttcctctgtatagccctggctgtcctagcactcactttgtagaccaggctgtcctggaactcagaaatccgcctgcctctgcctcccgagtgctgggattaaaggcgtgcaccaccacgcccggaaaaaacaactttcttatattctcacttcaaacccaaagtaaaggcctttacttagtggcttcatgagagacagatgaacagatggagggatgggcagagagtcgaatattttagacccaaaaggatagtggcctgtcattgtcacaagcacaaatttgaatgaaaatataatgtttattctatttattttaataactagaaagcacaaagtaaagttcaaagatgtagttaaagaaaaaaaggaagtaaggtctgcatagtctatgaaagaggatttgagagtagagatttgggctattttcataggaagtgaagcaagatggggagaccaagtcccgtagttgatgctaacctcaaaggccggctgtgtgctatcttttgttcccaaaatataagaagcaggggagtacttgctaaccagtggccggcaaaaatcctttgccacgagtcctaaccacaaggctttcttgtttatttcttctagaatgcctgtcaaatccttctcaaacgtcttgagcccgtcattaagaaaaacccagaagggacatggagagactgggtaggtgctcctctttgtttctgtatgtgagaccatctcaggtgccacagcagtgagcagcctcccacataagacagttcctatccacagctttggaaagttttccgagctgggtctctgttagggatgtgttccaggtctgtgtggagagcacacacagggaagggcagtcaccgggaagaggaagggtgtgtgcagagcatcctgaagccccccactcagtttatggaggaaagaagagggaagagccacacaaaacactggtgctctgagagggaagagaacggaagacattgcaaaggaagtgacctcacagatcccacacttctttattaaattattatcacacacgttcactcaagcacactcacatacacttatacactgtcacacactcacaccttatattgttatcactcaaaaattaaccccaaataccttttcttcctttcttccttccttccttcnnnnnnnnnnnnnnnnnnnnnnnnnnnnnnnnnnnnnnnnnnnnnnnnnnnnnnnnnnnnnnnnnnnnnnnnnnnnnnnnnnnnnnnnnnnnnnnnnnnnnnnnnnnnnnnnnnnnnnnnnnnnnnnnnnnnnnnnnnnnnnnnnnnnnnnnnnnnnnnnnnnnnnnnnnnnnnnnnnnnnnnnnnnnnnnnnnnnnnnnnnnnnnnnnnnnnnnnnnnnnnnnnnnnnnnnnnnnnnnnnnnnnnnnnnnnnnnnnnnnnnnnnnnnnnnnnnnnnnnnnnnnnnnnnnnnnnnnnnnnnnnnnnnnnnnnnnnnnnnnnnnnnnnnnnnnnnnnnnnnnnnnnnnnnnnnnnnnnnnnnnnnnnnnnnnnnnnnnnnnnnnnnnnnnnnnnnnnnnnnnnnnnnnnnnnnnnnnnnnnnnnnnnnnnnnnnnnnnnnnnnnnnnnnnnnnnnnnnnnnnnnnnnnnnnnnnnnnnnnnnnnnnnnnnnnnnnnnnnnnnnnnnnnnnnnnnnnnnnnnnnnnnnnnnnnnnnnnnnnnnnnnnnnnnnnnnnnnnnnnnnnnnnnnnnnnnnnnnnnnnnnnnnnnnnnnnnnnnnnnnnnnnnnnnnnnnnnnnnnnnnnnnnnnnnnnnnnnnntgtcacagaaaaaaagctcatttccacctagcaagtagtatacctatctaacctctcttaaatatgcctattccacagatagaagcagcttttgaaaaaagaatcagtctttcagccactggatacttcaggtaaaactcaaaaaatatcttggcttagataagaaaatatgaggtaatccggttgctttgggcctcagtcctcattgataaaaaagattgtattatataattatgggagtatattctaggcccaaaattgtgtaaattcacataagcctctgagtaatatagttaaggaaatgttaaacaattaacaactcaaacaggattaaaggcactggtctatctgctattatttacatttatttgtttgttgattctggggctggggattgaacctaggacctcacacatgataggcaagcactctgccactggcctaccccctcagcccttactgttccttattgtgcgtagtgaatagatatcatcaccagaactaacctgctactcaactctaccaatctccctccctttattataaaaacctttctcctttgaagcaggggatgtggtaaaaaaaatcatttgtcttcatatatgcagttttgattgatggggggaggtgccccaacaaatttatgttcattaaatacagaaagcaaagagaagtgactatcacattcaagaaggatatggcactcctgttacaggttgtccagataaaccctcagactacacaggcatgagcagaaggaagtgctcattctctttagcacaatggcacataaccactgaggtgaatatgagggaacagcttgaatgagcaaaaaaaaaaaaaaaaaaaaaaaaaaacagttgaaacgtgcaccaggcagctgtacaatgctactgtaaaactgtggtggtggtattttttttttaaatgcacagactttgtgttttctgtgccactcccacccctccccccacctaaaggactttattccctcaggggctacaaggccttcatggactgggagaaaggagagggagacccattcccgtactatgtctatggagctgcatgttctgaggttgaaatcgactgcctgacaggtgctcacaaggtaggtcaacgctgccccgggcaagttagatcagaaacccaactggcactgtgcagaaagtggcccagcaccattacgtaattcgcaaaagagaggatagttctttccattccacgggaatttcaagagatccagtcttctcttggaatcgtcacataagataataataacatagcagtcaaaaggaaatggctgtgaccggctggatgtgactaatgtgttaaagttaccattgcttctccgacgacaaagtcacttcccagagttttacctattagtaagttttactcctcaaagagaaacaggtgaggtcatttagctcagccgatgttcatccgtagtcattattccaagaacagtatggatggccaaagggatagactgcggtggggtggggtccgaaaagaatgttgtgcctgccattgctcatcaagaagtcacctgcatagacaaggagaatatctaggccaagtcagcagcttgcaccatacgtggtaaacttgggatactctagattactctggagacaaggacaaaatattaaatagagtaaaatataaccaaagtgtagtaagttgtatcattaggaaaagtataatggctgcaacatatcaaaatacttctatttacttatttcttaacttctcttccacatcaatattattttaaaaaaatattttttgagacaggatcttaggtagcctaagctgcccttgaacttgctgtgtagtcaaagataatctcgaattctgatcttcctgcttccatctctcaaatgctgggcttgtaagtctgttaggcatgtccagtgtgtgcagatgcccacgaccacacccacagccttctgcatgtgaggcatgcactctaccaaccaagccacacccccagcccattaataagattgtttaaagacacagtgtctaaagagaaatgccctcctgtttaattcaggtttccctttaggatatattaatattattcaacgcgtgtttacattgattttccctgggggtggggcatgccatatggcactgtggagatcagaagacagcttatgagagaagactcactccttccacttcatgggccccagggatcaaactcaggctgtcaggcctggcagcaaacacctttaactgcggaggcatcttgcctccctctgtggctccattttcatttgaggtcatttttctttaagaggaaaactcacgtgatcacagactgttcgtgtctcattttagactccatttctggtgcttttcacactgaggcacacatagataatatttgtgcagcagccccggggaaatcaacctggggcctgtctcaggttcccctcaaggcccacaggccagtgtctctgctttcctgagctccgccttactggggagctggtgttgatcagctagtcagtcataagaccctgcccgctgacaggggtgttgccaaatttagcaaataaaagcataggctggttaattcaacttgaatttcaagtaaacaacaaatatgttcccagcataaatatgccccacacaagtcttgggtcatagttattttacctgtcaactctatctgaaggctttaaagtaaatccttaaaaaaacaaacaaacagaggaatcttccagaatacatggtgttaaaatctggtcttttctgtgccttccagtttatacatataggtaaaggttcagaaatttcagtattaatgttgatccctgaaaatagtttactctattcagagacactaaatgactgtcccactgtggccagttctgtgaggcagttgtctggggatgtccagctggtaagcaaaggtttctacctaccatgtcaccatctccttcccctgtgtattaccacagcactgactgctcttccagaggtcctgagttcaattcccagcaaccacacagtagctcacaaccgtctgtaatgggatttgatgctctcttctagtgtttctgaagagagcaacagtgtactcatatacataaaataaataaataatcctttttaaaaatgtttaagagaaaggaaggaagtccaaatgtattcctgagatagcccagagacacttaggagctttctgagactcccagtaaccaatgggctctctctctctctctctctctcacacacacacacacacacacacacacacacacacacacacggggctggatcatttcactgtttctcagacaaggaagcagatccacaaagtctgagaatcagagttggcttcagcacttaacccctcccccctcctaaaaccttgcaagccccttataaacttatacatgtcccggatgattctctcagctacaatgccacctgcatccagcccttgtgacatgctcatgaattccactagagtcatgaaggaagccaggctgagaatcgggtggacaggcaggctcaattatttaccagatgactcactcacacacactagcatgccctggactttggactttttgtcaggtctcttcccagctctgaaaccgagaagactctgggcagtgtttctgggatagcaagaaactctttgtagttcatttcttcactgaagggattgaaggggggggggggacacatacaccccagtacacatgtggtggttagacagcttctgtaattcaggtctgacacatgggttcagggtttgaactcaaggtcactgtggcagcaattgcctttgttctgagctaacctgaaaataaattttatttatttatttgtgtgtgtgtgtgtgttactgaggatcaagcctagggccttgtgcatactagacaaacactctaacactgagctgtatcctccacaccttaaaataatattttatttcaagtttttataaagaagtaatttttttaatctgtctcagaaaatcagaaccgacattgtcatggatgcatgttgcagcctgaatccggccattgatattgggcaggtaggtgctggcccaactgagtggaaaccccttcctaagagtggtcgcagggtacttaaggcttaaaactgtcccctttcagatcgaaggtgcatttattcaaggaatgggcctttataccaccgaggagctactctactctccagagggcgtcctgtactctcggagcccggacaagtacaaaatcccaactgtcactgatgtcccagagcagtttaacgtgtccttgctgccgtcctctcagaccccgctcaccctctattcgtcaaaggtaagaaagtgaaccagccggcccatgtgcagcagcctaggagcatggccagagcaagccaccagacaaaacaaagactgatgctcatggttatctggaccaggccccttggagaccacctgcctaaaaaaacctggggtcaaggaaagagaaatccctccggggaaaaaccctggatcctcatttcattaacaccttcactgactaaaagttatagagcagcttgggcttcttgggagaggaacactttttatttaaaacgttatctatgtctttcttttcttttttctttttctttttcctttttttttttctttttgagggaagtggggttttttgtttttttgagacagtttttctctgtgtaaccctagctgtcttagaacttgctctgtagaccaggctggcctcgaactcatagagatccaccaccagcctctgcctccaagtgctgggattaaggcttgtgccataactgcccagctgtctgtttcatttttagttttttgagatggatcttagggagaccagaatgacttcaaactcaaactcttaatcctccagcctccacctcccaagggctgggatgacaagtgtgtgccaccatgcccagctctcatctaagatctgagaagacgtcagggtctagagaaatggccccagctccagcagtaaggaacttgccttgaaagcacgagagtgtcagctcgatcactagaactcacataaaaattctgtgtgttgtactcttgtaaccccaagactcgggaggcagagacaggaggatctctggggctctcaggccagttggtctaaattaattggtgagctcaaggccagggacagactacctcaaaggaagtagagagcatttccaaggatagtaatttgaggatgccctcactgcatacatcacacctgtgcacaagcacacacacacacacaaaggactgggcagacgaagaaggcaacattgagctgggtatggtagcttgaaccaataaccccaacagagggtaggctaaaacctgccagggctatttagagttccagagcagcacaagttagccatgtctcaaaaaacaaaacaaaacaaaacaaaacaaaacaaaacaaaacaaaaaacaaaaccaaaagaataaatgaacttgaagatatgataccattgaaactgtagatatcagtggactggaggcctgggttcctaccccagcccaccatcctcctttgctcttaggtaaattgcccacctccgagggactcttcagtcaagcccagaaatcaatctagaacagctcttaccaactgtggtgagaatatcctactccctaccaagacagacaggcaggcaggcaggcaggcacacatacatacacacgcatactcgccaggacacacacacgcgcacacgcacacacacacacacacacacacacacacacacacacacatgaaactgataatatccagatgcatttctggctgacacaatttaaaggattttaaggcaatgctcagaggccaagggtatggctaaacagcttcagtatgcaaggcagctcctacaataaatgatcatgtgacttaaaatgtcgatagtgtcaggaagcaaagacactagacaacctttaataactaaaggaaaggaagagcaaattaaaataaaggtcaactttgtttgccttgctttacgtagatcatgacaaaattcagataaaacctcaccaaggagtgaggtataaagtctcccttaagctgggcagtggtgggcagtggtggcacacacctttaatcccagcacttgggaggcagaggcaggcggatttctgagttctagcccagcctggactacagagtgagttccagggcagccagagtgagttccaggacagcctgggctacacagagaaaccttgtctgaaacaaacaaacaaacaaaaagtcttccttaaaaatctttggggagagcctgcagagatgactcagggggttaagagcactggctgctcttccagaggtcatgagttcaattcccaacaaccacatggtggctcacgaccatctgtaattggattcaatgccctcttcacataaaataaataaataaatcttaaaaaaaaattctttggagaaacttctagataggagttgttacatctcaaaccctgacaaatgactaacatttaacataccaaagtagacccggctgccaggttctcccagcatccctcagtattaaaagatatggctggcataccttaaatttctctagcccagggcctggtctgcccttcctatataatacaaccattttggttaccagccccttttggtctaccctctacccctgtggcctattggtcacctggccctctctcttctgtctcacatggcctggtcatgttcactctggactctcccagatatctgcctttgctcaccctttctctaccttttcctaggaacagtcacatctttttttcttacttacttttattctccattcaggaataaattgattttcttttctgaaacaagaaaaatatatctgctggaattccatcatttccaaactgaattccccttcagcctaggtatcgcctctggacttgggttggcgaagccatcacagactcagagggaggggcaccaacaggtccttctgactctggctggtctagaagccatctgaggggggaaggccagaggcagcccagagcctacagagaacagcttcaggttaagagtacccaggcagtgcacccagcatggtaggcatgccggtaatcccaatactcaataggtagatggagaaggaacatgaattaatgccagcctaggctacaaagcaagatctctctggaaaacacacaaggaccaagaaggacatggtgatgagtgagtgcctatggtactggggaggtaaaagcaggaagatatgtggatattcaaagccagcctggtcgactccatggtgcattttacagtccaggttccacagtaagaccttgtctcggaaaccaaaaaatgaaaacaaagattggggataaaagtcagcaagaaaatgcttgcttagtgtgcacacagcccctggttcaattcccaccaccaccaaaaacaaaacaaaaaccacaaatacagaaacttttctgaaaaagaagacggctctggttattttgggtgcgttcatggaaggtaacaattatcagaagcaaagaatggctgtcccctcagacagaccgtggagggggtctctgtctctccacagaacccagttctcctctccttattgtccttcacctgcccgcatggccctcgaattcctgcctgttgcctacacgtgaaggtctgtcatcgcccaagtcttcctctcctacactactgtactatagtatagtatacactactgtactataggttagtatatactactgtactgtagtagagtatacactactgtactatgggttagtatatactactgtactatagtatattatacactactgtactatgggttagtatatactactgtactatagtatagtatacactactgtacttgttagtatgttatccgctaacacaagccagggtcctctgggaagaggaacttcaactgagagaatgtttctatcagactggctggtaggtgagtttgtgggggcattttcttgactcaggatttgatggggggtgggggagccactgtggtcagtcccaccctgggcaagtggtcctgggttctataagaaagcaggctgtgcaagccagtaagcagcatccctcgatggcctctgcattggtttctgctttgagctcctgccctgactcttcttcataatcaggatctgtaagccaaataagctcttcccaaatggctggtgattctgttgtttccccccaacaatgaaaagctcaggcaagtatgctgcttcccttagccccaggggcataatgaggaactatttccccctctgcttatgaagctggcaaggtcaatccattgactgttctaataatggtgcccttctcttaccccacagaaacacatggactgcacgtacatgtaagcaagtgtgcatcccttcccatagaacaaatacttaacccagacagaactgaagatgtagaaagttcccatttaagaagtgatttataaagccaggcggtggtggcgcctttaatcccagcacttgggaggcagaggcaggcggatacagtgctgaacaagatgacgccctgtcccaaagtagcttgttgtctactatagaagcttttaaaacaaatgcactgtagaggcaggtgacctctgtgaattcattctgatctacatagtgagtttcagaccagccagagccacaaagtgagaccctgtctcaaaaggccaataaaatagacaaatgtgttttcttgcagggcctcggggagtctgggatgttcctagggtcatctgtgttttttgccattgttgatgcggtggctgcggcacggagacaaagagacatagcggaggacttcacagtgaagagcccagcaaccccagagtgggtgcggatggcctgtgcagatcggttcacggacatggtagggagctgctctgttcctgcaagctcactgcaacttcctgctcccttggcttctgtgtcagtttgtgacctaacctgtgtctaatcaagctataaagtgatagggcgtggtagtaaatgcttgcaatcctggcagctgggagactgaggctgaattgtcctgtagtggctcagacattcatcctagtctcctgaacacagcaatgaggacagtcatctgcctccaaccagtgcctcctccacggacagaggcaggaaccagacacctctcaactcagggctcctgcatagcactctcctggtcttgctcatcacagggccactgtaagatcaccttgtctcttactcaaaagcttaagcacatgtgaccttcaaaacagtgctctgggtcccattttacagggtaggcatccttttctggagtggacgcagagcaaggaaagtaaacgcacgtaataaagagcgcctcggaaatttcactgctcatccgagcctccttctcagcctcctcacagcctgactgctggaaaatggcctcctgcatttccccagattcagactgtttttagccagcgcgttgtttggcagagctgtcacatacagtgggaaggagtgactcacttagctcttactcacagttcaggccaggcggctgggctccgaggcacatggggtgagacagcattttctgccaagtctgatagttccttgctgagaccttgtcaatacaccctggtggacaccagttgtctactaactatgcaatgcccatcaatcagacacttttctcaatgtgaaagtagtctcaaactttctaaaatattcatcaatggctcctagatatcgcttcatagtagggcctatatttaatattgtaaggctcattttaatagtgttttacattttgtctttataaaagtaacacatgctatgcttgatggagcacttgaggggaagggtggataggcttgtcagttcaaggccagcctggtctacacagtggttcccagaatagcctggtctacataataagacactgtataagaaagagagaaagaaagaaagaaagaaagaaagaaagaaagaaagaaagaaagaaagaaagaaagaaagaaagaaagagagagaaagagaagaaagaaagaaagaaagaaagaaagaaagaaagaaagaaagaaagaaagaaagaaagaaagaaaggggagaaagaaagaaagaaagaaagaaaggggagaaagaaagaaagagagagaaagacatgtccactttagaaaaagagtaagatggaacttgaaatcaaccataatcctttcaaccagaaatgactgtttgttgtgagaatgtgcatgtgtgtttggtacatgtgtgcgtgctcttgtgtgtatacttgtgttcatgtgtgtttgagtgtagaagccaggcctgatactgacactgggcatcttcctagattgatctccatcttacatttttagaatttattttcttacttatctatttgatatttatttatttatgtgtctttgcacatatatgcctgcctctgtgtgcagatatctgcaggcacccactgaggccagaagacagcactgaattcttgggagctggagttacaggcagttgtaagcctgtgagttacctgacatggcgtttggaaatgaaactctagtcctctgagttaaccattgggctatccctcaagcaccattactattacttactgttattataattctaaataaaattccctagagctctctggtcggttggctaaaccagtggtttgcaaacttcccaatgctgcaacctttaatatggttcctcatgttgtggcgaccccatccataagagttgtcttagtcatggtgtctcttcacggcaatagggcataactacgcttctgaaagcccaactcctccagcaaggccccctagcacctctaaatagtgccacttcctaatgactaagcattgaatatttgcgcctatgggagccattgttttgttttgttttgtagacagggtttctctgtgtagccctggctgtcctggaactcattttgtagaccaggctggcctcaaactcagaaatcctcctgcctctgcctcccaagtgctgggactaaatgagtgtgccacccctgcccggctatggggggccattcttattcaaaccactataccctttttgagatcagtgtgagctgtcagcaaagaggaaataactcaaagccagccttgagcgaagtgtcccaaggagagcaaattgacagtgttttacaggaggcaagaaacacacaaaataatctgcaggaaatgtcaatattcctctatccagtgaaaagcagccatgggtacatacttgtgataccagcccttgggggctgaagcagaagggtcatgttttgaggccagcctgggctacattgtcagatcctgtttttaaaaaaaaattgtgtgagatgtgtgtatacaaacacatatatgtgtatgtaagnnnnnnnnnnnnnnnnnnnnnnnnnnnnnnnnnnnnnnnnnnnnnnnnnnnnnnnnnnnnnnnnnnnnnnnnnnnnnnnnnnnnnnnnnnnnnnnnnnnnnnnnnnnnnnnnnnnnnnnnnnnnnnnnnnnnnnnnnnnnnnnnnnnnnnnnnnnnnnnnnnnnnnnnnnnnnnnnnnnnnnnnnnnnnnnnnnnnnnnnnnnnnnnnnnnnnnnnnnnnnnnnnnnnnnnnnnnnnnnnnnnnnnnnnnnnnnnnnnnnnnnnnnnnnnnnnnnnnnnnnnnnnnnnnnnnnnnnnnnnnnnnnnnnnnnnnnnnnnnnnnnnnnnnnnnnnnnnnnnnnnnnnnnnnnnnnnnnnnnnnnnnnnnnnnnnnnnnnnnnnnnnnnnnnnnnnnnnnnnnnnnnnnnnnnnnnnnnnnnnnnnnnnnnnnnnnnnnnnnnnnnnnnnnnnnnnnnnnnnnnnnnnnnnnnnnnnnnnnnnnnnnnnnnnnnnnnnnnnnnnnnnnnnnnnnngaacagagtttatttacagcagcatcctgtaaggaagcctattacatgcaggcgacagtcttacataacccaaactgaccttacatctgctatgtagtccaagataactttgaagccctgggattacagggcctgtgccactgaatgaaaatatgaaataagaggaggaggagaacatttttattgtcgagaaagcaggcggagggggttggggatttagctctgtgatagagcgcttgcctagcaagcgcaaggccctgggttcggtcctcagctctggggaaaaaaaaaaaaaaagacaaagaaaggagaaagcaggcagagggaagagtccaagctgaccatggccagcagataaaacctgaacatgagaggagagagggggagggagagcaagacaggaatcactgcaagacgaaggcagcccaggccatgatgccagaaaatcacacagcaaagctggctgataaagggagcaggcaggaggaaaggaaggagaagctcagctcccaagagagaggggtttagcgtaggggcggggcgaggagacctaggaggagccacaagttctgagtgttgctgggagagctggccagtgtcagctctgatatgtaaataagtacctcagccttttgtccagggtttctgagacctaacatacacaattttttagttgaagatatgctgagctaaagctggggctgtagtttaatagtagcatctttgcctagcatacgcaatgtattgggtttggtctcaagcacagagagaagaaaaaaagaaaaagaaaaagaaaaaaaaaaaaaaagtggaagggatagccaggcggtgttggtgcacgcctttaatctgaattcgggaggcagaggcaggtagatctctgagttcgaggccagcctggcctgtagagtgagttccaggacatccagaagtacacagaggaaccctgtctctcgggggtgggggggggggtgagtccaagagaatatataatgattcacattgacccagaatgctgtaaccatgtctaaaatactatttttttttcactcagatggcatggacaggagaattatatgctacctagtgaattccaggctagccagagctaaaggaagactctggagagagacagagacacacagagagacagagagagcaagacagagaaagagacagagagagacagaaagggacacaaaaaggaaagaaagaagaccctgcctcaaaagagagagacagacagacagacagacagacaggggttgggggagggataaaaggaaagaaaaggttccgagtacttgtattcctgagacccccatccggctgctcacaaccagctccaagagatggagaagtggaacactttctcctggtctctgtgggcacctgcactcaaatatacacagaacataaatagtcgcagattttgtattctgaaataaaaatacaatttgttctaatgactaagaaggtgacgaataactaggaaaggtctgtgtgcaagaacacaggtcttggaaagttcggaacctcctcctttggcaacctcttcctcgtcattagagaaataacaggtcacctggacttttttcttaaacagaaatgatggtaaaatactcggtattttccccttggaattaaatgaaataatgcgtgtaaaaatactgggtaaatatgagtcgccccataaacactagaattaagttttccctgaatacccataactgttaatgaccttcaaaacaggcctcacctacaaggctgatgaatatttccacattaaaccaaggtgacctcctgaggccagaacaaacaggaacttgcagaacctacaactaaaagtcacattttcattttcatggggaaactagtgagaaacttaagaactggattttttttttttaaagtcagggtttctctgtgtatctttggctgtcctggaactcactctggagcccaggctgaccttaaactcatagagatctgcctgcctctgctgggattaaagacacttaccaccgacaacaacttaatttaggatattttgttatcaaaacaaaacaaagctctcaatgagtaagcttttgtatacagagttttgttttccatggcgtttgcttgtgtccatggcgtttgcttgtgtccatggcgtttgcttgtgtccgtggcgtttgcttgtgtccatggtgtttacttgtgtcgcgtttgcttgtttacttcctgtgtgcgggaggctgtgggggggtcagagggtaacttgctggaagcggttctccttttactcttgtgggtccctctcccnnnnnnnnnnnnnnnnnnnnnnnnccccccccccccccatgagccttctcaccagccctatgcagagctctgcttgagtgtcgggtttggtcctttcttggaattaatctctggtgaaaagcagtggggatggttctgctctgaaccggtctgatggccctggacaatggaaaacactatctctgtcattttcgttttggtgatgggaggaagtgaaagaccccctaagggagacccttctcagaaggcgcgcacccagtaagacgctgagaccgaacttgctgtaaccacaagaggctttaatggcacacaaacacaaacaacaaaggagcgctcaagccagcatgctgggatcgaaactcatgcaccgcgcagggggcagaggagtttgaccccggcccaaactttttacaggcttataaaggcaaaaaccacaaaccaaaagggcggagccgaaagaattggcacagttacacatgattggctcatttaaatgtcagtggggtgattacaagttaacagggtagtacgtgccagcttaggtgtagggaggcacatggacttgggatttatggaggtcagcaggggacctggtcaatgtatgatttatggtgggctagagggaggcaccgcctgggaggcgccatcctgccaaatggccatttggtcctgatagccctggccagttcctgcgtttttttctttatcttttatggccggacgttcccagctatagggtgggtctggctgtgcctggacccgcctgggtctattctttacaacatttaaccctgaatttcttgaacttagataccacaatgctataagacccaaaattataagtttttgctcttcagaagaaaaatgtgttttgtataattatttacaattctgcaagaaaaatcccttaaacatatttttaaaaagggaaataataaagtttcaaattagtacttcttagaaacaagattgtaaacacttttaaaagttttttttaattaatttatttatttattaatttcacgtatgtgggtcactgtcttcagacacaccagaagagggcatcctctcccatcacagatggctgtgagccaccatgtggttgctggnnnnnnnnnnnnnnnnnnnnnnnnnnnnnnnnnnnnnnnnnnnnnnnnnnnnnnnnnnnnnnnnnnnnnnnnnnnnnnnnnnnnnnnnnnnnnnnnnnnnnnnnnnnnnnnnnnnnnnnnnnnnnnnnnnnnnnnnnnnnnnnnnnnnnnnnnnnnnnnnnnnnnnnnnnnnnnnnnnnnnnnnnnnnnnnnnnnnnnnnnnnnnnnnnnnnnnnnnnnnnnnnnnnnnnnnnnnnnnnnnnnnnnnnnnnnnnnnnnnnnnnnnnnnnnnnnnnnnnnnnnnnnnnnnnnnnnnnnnnnnnnnnnnnnnnnnnnnnnnnnnnnnnnnnnnnnnnnnnnnnnnnnnnnnnnnnnnnnnnnnnnnnnnnnnnnnnnnnnnnnnnnnnnnnnnnnnnnnnnnnnnnnnnnnnnnnnnnnnnnnnnnnnnnnnnnnnnnnnnnnnnnnnnnnnnnnnnnnnnnnnnnnnnnnnnnnnnnnnnnnnnnnnnnnnnnnnnnnnnnnnnnnnnnnnnnnnnnnnnnnnnnnnnnnnnnnnnnnnnnnnnnnnnnnnnnnnnnnnnnnnnnnnnnnnnnnnnnnnnnnnnnnnnnnnnnnnnnnnnnnnnnnnnnnnnnnnnnnnnnnnnaacaagccagacacggtgatgatgtctttattcccagctctttggaggcagaagcatatggatctctgtgagttcaaggccagcttggtctacagagagttccaatataggaaataaggaaggaagaatgaacacaggaacaaacctgggaccttgttattatcagtagggggaaatcaagtagttacaaagctgtgctctgtctagatgtagggtgtggtacagagctgtggtctgtgtgagggctctggaggtgggtgtgctagcctggcctcacaaggccctaaattcaatccccagcgcaggaagaaggaagaaagaaagaaaacatgagctctaatgggatgacagtgtagaagtgcaagtccagccaagtatcagaccgtttccgtttccaggaagccaagctcacacggctccacctggaaacaaatttgaaaatgtgtttttagttcacagcacagtgtgaatcgcagccttgtcagtgctgagtcagggaggagactcccagccagcagtcagggaaagtcctttccttcttagattagtctccattccaaactgccagccccgccctagacaagccctgttactgtgtaggtgactgacctagtttctgaagcctttcctttcacttgcaaaccctaagggcattcccagccaacgactccccttcctctccagcgcttgccatctccgtatctcatgttctctgcctattcttttctggatgccaaaactcagtgacccttagtaacattaatggggtcacctactccattaaagggagccccttcctctcagactgcagcggagaagaggtgagaagataatgccctgcccagtgccccgtctacctatactagccgctcagtacctatactagctgcttagtatgaggtatgctggaccctcattctatacagctcaggttgctctgcactagaggagttggtactgccagccctataggactacattccacttcctggggtgcatatactgcatcaagtagaaacatgcggccctcagtgtgttctgctacaatcacagccacagataattagcagggccctggcccagcacagacatgcctcagtcacacggattcatagggccagaaggcagaaggaagctgcaggactggactgacttctcagactatagtgtccccagagtactgaatctagtctcctgagacgcatggatatgcatgtgtgcacacactcattcttcacattattctctcagctcttatgctgtcttggaagaggtttggcacatagcttgttgaccaagcccgctcagtcaacaggttctccagcacaggagtgaggattgaaagaaaaaaggcaataaggcaacattgcagcatgaccccagccaattctgaggctgaagctaaggctgaggcaggttttattttatttttcccaatctgcttttataccattttaattacatgcaagtaataaggtcagttctaggttaaggaacaagcaagacaataaacacagtctaggaacaagcaaggcaataaacaaagtctcgtgatcactcctacaatcactgtttctaagggcttaacaggatgaccaagaaatctgagcctacttccctgtcctagcccaaagtcatattcttacccgaagcctacttctttgttctagcctaaaattacattcctacctgaacttacttccttgtcatggcctaatgtcagattcctgcctaaagcccatttccttgtccttggccaatgtcagattcctgccaagcgccccccaaagctctccacagcttgtaaaactggttctgctttaaacatggatgcctaggatgcaggaactgtatttgcccgctgcaggaactgttgacgcttgacacagcagttgttctactacagaatcggtcttctctggcattgctttggtggtcatggtggagatggtgtgcagtgggttttattgcagtgctagcaatgagaagcaggcctttcatacaggcttggtgtacactctacatctgctactgtttttgaatatatatataattttttaatttaaaaaattcccctgctggcaaaaggatcagaaggttatggtcatgctcagccaaaatgaatttgaggcaagcctgggctacataagaccctgtctcagagagaaaacaaaagttccctgccctgaggtgcccatctgaagagcatctggtgtggtccaaaccagagggccactgagtacagaagtcctcatttagttcctgctggcttaccaaagttaaccttgaactgtgctgtcctagttgggtagctatcctaattcagaaaaccaacctgttttcctgtagtctgttgatttttttttcccccacaacagtgtgtatcagtagcagcatcttgtctgaaataaagccattcatttggaaaagtcagttgagaggtagtgagatggctcagcaagtgaaggtctgtgtgtctgtctctaacaaagggctatgctttctcttttactgaactgcacagaaagcatcacacagggaaaagaatgagggacactttacagaaatcttctacagagtgttacaagagattaggtcattgactccaaatgaccccaactgaccagataacaattatccttgtttatcagtggatacccataagtgtggtgttcagctcttatggtggctattcattttagaagattgcttttgacttcagtattcaggacagagtatacatgcattgttctaagtcagggacatggaaaagtacataattaaagacggtagctatgcattcatttagactgtaaaagttgacagtgcagttgatcgtcctgttgttctcttaaaagcaggagaaacaaatgggctgagtacacttaagggtttttttgttttgttttgttttttggggtttttttggtttgtttgtttggggggggttg

SEQ ID NO: 586 - DNA, 3348 bp, Mus musculus
atggcatgcctggtgcccctgtgctccctgcatggggctgctgtcaccaccgtggaaggtgtgggaagcatcaagaccaggctccaccccgtgcaggagaggatcgccaagagccacggcacccagtgtggcttctgcacccctgggatggtgatgtccatctacacactgctcaggaaccacccgcagccctcagaggaacagctcatggaggccttgggagggaacctctgccgctgtactgggtatcggccaattctggagagcggcaggaccttctgcatgatttgcacgaagctatttgtgaaagacgagttccagcccttggacccgacccaggagctcatatttcccccagaactcctgaggatggctgagaacccagagaagcaaaccctaaccttttatggagagagaatcacctggatcgccccaggaaccctccaagaactcttggtgctgaaagctaagtaccctgaagctcctctcatctcgggcaacacagccctgggactgaccataggtgcctgctgcagcctggctcaggtgaaggacatcttggctgagagcatctctgagctcccacaggagaaaactcagacctaccgagcactcctgaaacacctccggagcttggcgggacagcagatccggaacatggcgtccttaggaggacatgttataagcaggcattgctactcggacctgaatcctatcctctctgtgggcaacaccacactcaatctgctgtcagaagaaggcccgcggcagattcccctcagtggacattttcttgctgggttggcaagtgcagacctgaagcccgaggagattctggggtctgtgtacatcccacactctcagaagcgggagttcgtgtctgccttccggcaggcccagtgccatcagaacgccttgcctgatgtaaatgctggcatgagagtcctgttcagagaaggcacagacgtcattgaggagctgagcattgcctatggaggggtggggcccaccaccgtcagcgcacaaaggtcctgccagcagcttctgggccggcgctggaacgcactgatgctagacgaggcttgcagactgcttctggatgaagtctcccttccaggctcagccctgggaggcaaagtggaattcaggaggactctgattgtcagcctcttcttcaagttctacctggaggttctgcaggaactgaaggctgaccagaagctgcccccggagtccaccagagtagattctcaccaacctctccaagatccagttggacgtcccatcatgcacctgtcaggtcttaaacatgccacgggggaagctgtattttgtgatgacatccctagggtggataaagaactcttcatggctttagtcaccagtaccagagctcatgcaagaatcatatcaatcgactcatctgaggtccttgacctgcctggtgtggttgatgtaataacagctgaagacattccaggcaacaatggtgaagaggatgacaaattgctggctgtagataaggttctctgtgtgggccaggtcatctgtgccgtggtggcagagactgatgttcaggcaaaacgagcaactgagaagataaaaatcacctacgaggatctgaaacctgtgattttcaccatcgaggatgccataaagcacaattcgttcctgtgccctgaaaaaaagcttgaacaaggaaacatcgaggaggcctttgagaacgtggatcaggtagctgaagggacagtccatgttggaggacaagaacacttctacatggaaacacagagagtgcttgttattccgaagacagaagacaaagagctagacatgtatgtgtccacacaggacccagcccacgtacagaaaacagtgtcctctaccttaaacatcccgatcagcaggatcacctgccatgtgaaaagagtgggtggaggctttggaggaaaggtggggaggccagctgtgttcggagcaattgctgcggtgggggctgtcaaaactggccatcccattcgtcttgttctggatcgtgaagatgatatgctaataactgggggacgacacccattatttgcaaaatacaaagtgggattcatgaacagtggacggatcaaagccctagacattgaatgctacatcaatggaggctgcacattggatgactcggagctggtaacagaatttcttgtactaaaactggaaaatgcatacaaaatccgaaacctcagactccgaggtcgtgcctgcatgacaaacttaccatccaatacagcttttcgtgggtttggcttccctcagggagccctggtaacagaatcctgcatcacagctgtggcagccaaatgtgggcttccaccagaaaagattagggagaaaaacatgtacaaaacagttgataaaaccatctacaagcaagcgttcaaccctgaccccctgataaggtgttggaatgagtgtctggacaagtcttcctttcacatcagaaggacaagagtggacgagttcaataagaagagttactggaagaagcgaggcattgctattgtccccatgaagttttcagttggctttgctgcgacaagctaccatcaggcggctgcgctcgtccatatctacaccgatggctctgtgttggtggcacatggaggcaatgaactggggcaaggtattcacaccaaaatgttacaggtggccagccgtgaactgaaaatacccctgtcttatctgcatatctgtgaaacaagtacaacaacagtgcccaatacaatcgctacagccgcgtccgttggagcggatgtcaacggcagggctgtgcagatagaagcagcttttgaaaaaagaatcagtctttcagccactggatacttcaggggctacaaggccttcatggactgggagaaaggagagggagacccattcccgtactatgtctatggagctgcatgttctgaggttgaaatcgactgcctgacaggtgctcacaagatcgaaggtgcatttattcaaggaatgggcctttataccaccgaggagctactctactctccagagggcgtcctgtactctcggagcccggacaagtacaaaatcccaactgtcactgatgtcccagagcagtttaacgtgtccttgctgccgtcctctcagaccccgctcaccctctattcgtcaaagggcctcggggagtctgggatgttcctagggtcatctgtgttttttgccattgttgatgcggtggctgcggcacggagacaaagagacatagcggaggacttcacagtgaagagcccagcaaccccagagtgggtgcggatggcctgtgcagatcggttcacggacatg

SEQ ID NO: 587 - protein, 1100 aa, Mus musculus
MACLVPLCSLHGAAVTTVEGVGSIKTRLHPVQERIAKSHGTQCGFCTPGMVMSIYTLLRNHPQPSEEQLMEALGGNLCRCTGYRPISGRTFCMICTKLFVKDEFQPLDPTQELIFPPELLRMAENPEKQTLTFYGERITWIAPGTLQELLVLKAKYPEAPLISGNTALGLTIGACCSLAQVKDILAESISELPQEKTQYALLKHLRSLAGQQIRNMASLGGHVISRHCDLNPILSVGNTTLNLLSEEGPRQIPLSGHFLAGLASADLKPEEILGSVYIPHSQKREFVSAFRQAQCHQNALPDVNAGMRVLFREGTDVIEELSIAYGGVGPTTVSAQRSCQQLLGRRWNALMLDEACRLLLDEVSLPGSALGGKVEFRRTLIVSLFFKFYLEVLQELKADQKLPPESTRVDSHQPLQDPVGRPIMHLSGLKHATGEAVFCDDIPRVDKELFMALVTSTRAHARIISIDSSEVLDLPGVVDVITAEDIPGNNGEEDDKLLAVDKVLCVGQVICAVVAETDVQAKRATEKIKITYEDLKPVIFTIEDAIKHNSFLCPEKKLEQGNIEEAFENVDQVAEGTVHVGGQEHFYMQRVLVIPKTEDKELDMYVSTQDPAHVQKTVSSTLNIPISRITCHVKRVGGGFGGKVGRPAVFGAIAAVGAVKTGHPIRLVLDREDDMLITGGRHPLFAKYKVGFMNSGRIKALDIECYINGGCTLDDSELVTEFLVLKLENAYKIRNLRLRGRACMTNLPSNTAFRGFGFPQGALVTESCITAVAAKCGLPPEKIREKNMYKTVDKTIYKQAFNPDPLIRCWNECLDKSSFHIRRTRVDEFNKKSYWKKRGIAIVPMKFSVGFAATSYHQAAALVHIYTDGSVLVAHGGNELGQGIHTKMLQVASRELKIPLSYLHICETSTTTVPNTIATAASVGADVNGRAVQIEAAFEKRISLSATGYFRGYKAFMDWEKGEGDPFPYYVYGAACSEVEIDCLTGAHKIEGAFIQGMGTTEELKPEGVKRSPDKYKIPTVTDVPEQFNVSLLPSSQTPLTKSKGLGESGMFLGSSVFFAIVDAVAAARRQRDIAEDFTVKSPATPEWVRMACADRFTDM

SEQ ID NO: 588 - DNA, 62154 bp, Homo sapiens
gaaagaggttgtttcagttttgccatcagccagaattggactttataaaatactcccagactgcacacacctcccagacattgcatcacacctttgggctttgtgatgcaatgactagaattacccacagcgtccctaggagctcattctgaattatctggaaataagccagctggaacttgggaagagggcttcacctcccttctctagtgggaggggcttcaccaaaactcagcttcccagggaaccagtgactcctcacccttgactggagcagctgtaacttttcatgggctccacagttcagtgaggggtggcagcattcccagacaactcctgtgtattaattatacatatatttgagtgccaattgcaccccaaatccagacttcctggtgccagacaacttgttcattccccaatcaagtccactttctcatgcttactctatgaaaagggcacccatgatagggtcggggtcccccctctagaatgcagacccacactgggacccaagacctccttacttgagaacagagatctccccaggctgccctcttggaagaacagagggcagaagccttactgagccaaatgtcctggtatctggagaagggcaagcgcaacatctcattttgagaggggacaagtggagatatccctggtttggtcagctgaacttgaagaccaaagccaagagtaactcattcaatgctggttactcagtgacccaggttccaagcaagtctctcacaaagctttaatgagtacctgcccctagagtaaagtaatgaagacaataccgagtgctgtatgggtcatgcctcacttaacaacagggatatgatctgagaaatacatctttaggcgattttgccattgtagggacatcatagagtacattttcataaatctagatggtatggcctaccacacacttaggctatacggtctagcctattgttcctaggctctaaacctgtgcagcatattactacactgaatgctgtaggcaatgataacataacggtaagtatttatgtacccaaatatatctaaacatagaaaaggtacagtaaaaacctggtataaaagataaaaaatggtacacctgtataagactaaaagttgctctggctgggtcagtaagtagtgagtggatgtgaagacctagtacactagtctagactttataaacactgcacacttaggctacactacatttattttaaaaatatttaggtctggtgtggtggcttacacctgtaatcccagcactctgggaggctgatgcaggctgatcacttgagtccaggagttcaagaccagtttcagcaacaaggggaaaccctgtctctacagaagaaaatatgaaaattagccaggcatggtggcatacacctgtagttccagctgcttgggaggctgagttaggaggatcacctgagcctgggaggtggaggtttcagtgagccaagatcatgccactgacctctagcttgggcaacagagccagaccttgtctcgaaaaaataaagttaaattaaaaaataaagtaattatgccacaacactatgacagctatgatgtcactaggcaataggaatttttcagctccattataatcttttgggaccactgtcatatatgtggtccactgttgactaaaacatcattatgccacacatgaatgtatttaaaacaacccttcaaagtaggtattactgcccatataattcaaacaaaaatactttggagagcaaagggagccattggcattaatacaaagacaaccagtgtaaacagggattgtcctgggcaaagcaggctatgtggtcacctggttctggtatctccaggtcacagacaagatccccacggcatggagagtataagtcatccacatactgagaagaagcagagctattcaatcacagggatgtctgactctaaaactcacatatctctacacaccacgctgcctttctctgtgcctgtgttcttgtgttcactgcctggacaggggttttcatagccttgctaagtatgcagcaaatcctaagtggaacctcaacacgtaaaacacatagaaacagagccattttggttgaactgggcaaatggatcttgcattctatctgtcctccctctagcctccacttttacctcctgggtgaaaaagccccaccttggcactggttccacagggaaaaccagagtcagccccttgtccagaggtggagacaagccacatggaaggtatctgcaggatgcaggaaggatggtgattgttgcagggtgagaaacacagttgagtttgaaatgtttccccatttaattatctgccagtcttctgtccttttccacctgcagaatacctgccggaccctcgtggaatgccttgaacctattatcagatggagtactagtggcacctgggagaagtgggtgagtatcaggtgtggctgaagcctgcagagctcctgtggggccactgagtggaagcacctgttcccaggtaggctgcatccctgccacttcctcctcctgtcctgtacaacctagggcatcccctccccagtcatcagtgagcaggcagatcacctgggcatcagttaaaatgcagattcttattctgtaggtctgagtggggcctcagagtctgcatttctgtcagcctcccaggtaacgctggcactgctgaaccacgctttaagtagcactcctggcttttggatataaaatggatagtatctccatcataaggaggtgactaggagctaggaagaaaggcattcatatattggtccagaaattaaagattagtaagctgagttcataagggacagatataaatcagtcattcaccttgcaaccagatcttacgaaacagaaatctctggttcatctggctatttactcacacctggagaaatagctcagtaacagtgttaaagccattcatatttaaataccacttagtgtgtgtctggttattcgctaaggaagatagagcctacatcatctaaagttcacttttggaaatttgcagagaaaaaagcaatacatttaaaggaagttcttgcaggagaagctgttatattggattacattttgaaaaacatctttagttaaagctacaaatgcttgctattttccatacctgcatttcaaacattcctggggaaaactggatagtctttgggtggtagttcttgttcttctttcagaataaagacttcattttaaaacatgacccagatttttaaaaattgaggcagcagaagttctgcaaggcccctgagtatttaattagtgctgttagaaagtctcctggtgattttgaagttttgtgggaagccctcagggagcggcgatggatgggatgcggtagcagtaacttgagggattaccaaacttgcctcctttatctcttagtttctctgaaacttaaaaatatatacatattccaaccaagccgaagctccacccagactgtttccccatatatggagacaggaggatggagatccttggttagactttgtttgggaaccctgaatttaaacttccaccacagatgtttaccttcatcgctttttcctttgctctttaaatagatccaccaaagcagtgacttagcaattatcctgggcatccttagcaatcatcctgggcagagaacccacttgggcactctgcttgttcactcaggaaaataacattcccaacaataaggaaaactatgacatctagaaaatggttattttcccatgttttgcttttgtccagctgtgtatttttcctttcatcatattcttttttgcaggctaatgaagcttttgctcaaagcactagtttgtctgccactggcatattttaggtaagaggtatctaatactgtcctaaaattattcccctttagaatggaaaaggaactttgaaaaggtgtgctcagttgtttatatttttaatattgtctattattatcaattttatttttttattgaaaggttttcattagaaagagaaatgttatattatcagaacaggaaggcagacaattttgagatgagtcccataatttccttcctgcaatgccttagtacacataaacctgccacaggtttataggttgatattaaatgatcctgtgaatagtgagaacagatcaagatagagggatttttgcaaagcttttagtgcttcccagcatggatttagtgcttatgcctttcagtcttagtgtctaataggatgcagcactttgggctttctaatatttcttgctctccagaaatcttgccttatatcctgcctcttgtgaccctcttctcttgtctaatgggggattggttataaaagctgtgagtcaaaccagggatgaccaaaacagccccatacaaatagcatgggaagttgagcaaggtaccccatcagacatgagaatttgtccaaataaggaacagggagatctcactggaagtgacaagaaactaaccatccttttaccatattgagcatatgtgggcacatcgcctaggcttattgggagggcggtctagtatcctgatggcatctataaatacaaagctcacatctgaaggtaggttggatcttcttgaatggggaggccatgcctagtttcagtaacccagaggaaggacgtgaatttaggaaactagaactgagggagctcagattctgttggtctcacaggtcaaccatggaagtcacaggcacccctggccagtgggtataaataatagtaaccatcatgagaaggtagaccaggaaccaggaagaacccatttattggttcaacaattgaagagaagtaagctgagttgtaaagatcaatgaaattgtctctttttcttgtccttttgtttcctcctgtcatttatccaattcttatatgaacattcttactctgatcagtcggtctacagagaatcaacccaagagtcctccgtccagtataagaaaaagagagggaaacagtgccccgttagaccaatgtgtcaatggtaggatcagacatagatcccaaaggaagtgagtcttgggtgaaagccaaggccgtatggaccacccagtgccaactctgaggttctgaactttatttttactaagaaaagtgcaatttcctcacagcactaggcaaaaatggaaagctatcctggcacacaagtatagaatgccaccagagacaagcagctggaagaaaaagccaggccaccagcaacagagacaaagaactgtgagcttgagaggctatggcagatggtgagggaaggacagtgagggagaaagagactcagatgcagcagaggctcagtggctagacttaggacccagccagggcttattgtaaaataagcacttggtaactttttatatctttgccttggcaaccaggaaactcaaagttaaattttatgcttcatttagttttggcttttgttgttgttgttgttcttgttgttgtttgcagagacagagtctagctctgtcgcccaggctggagtgcagtggtgcgatcttggctcactgcaacctctggctcccaggttcaaacaattctcctgcctcagcctcccgagtagctgggactacaggcgcatgccgccacccccatttaatttattttgtattttagtagaggcggggtttcaccgtgttgcccaggctggtctcgaacttctgagctcaggcaatccacccacctcggcctcccaaaatgttaggattacaggcatgagccaccgcacctggccagtttttatcatatataaattcctactctcttattattcatttcatctcatttcttgactctcatcttttacacttattttaatgatttgactattgtatttgtatttaatatgaatgctttctataaatagactcatgtaaggcttgtttaggaaataagtgaaattgaattaaatacgtatgtctaacatgaatctattaagtttctcagcagatgaaaaagaccttccttataacaacacttgtcatacctgaagaacattatttagccagttcttaatcttctctttaccagaattgatcacaaaaattttaactcatttttagcttttgaaacaatgacaagtttacagaaaatttgcatgtacagtacaaagaattttttttaccctgaatcatttgagagtaaattgctgacctaatgccccaaacccctgaacacttaagagtttagtcctacacactatacaatatacccatcagaatccagaaattaacagcagttcacaactactatctaattatcagactccattcaagattcgccggttgtcccaatcaagtattttatagcaaaaatattcaatacagaatctcacttttcatttagttgtcctgtctctgaggtgtcctggagcaggaatcaggtctcccctctctctttgacatcatgactttgacacttcggaagagtttggccagttatcttgtccaatgtctcccattttgagtttgtctattgttttgtcgtggttagatcgatgttatgagtctttgtcagaatattacaaaagtgactctgtgttcccctcatggcatcctgccaggtgacacatgacttcgacatgtcccacttggttaagatggtgtctaccaggactctccacagtgaggtggtttttctccttctgtagttaataaatattctgtggggagatactttgaaactacgtaaatatattgttcctcattaaactttctgtttattttttattattattattattttttgagacagactcttgctctgtcgccaggctggagtgcagtggtgcaatctcagctcactgcaacctccacctcccagattcaagcaattctcctgcgtcagcctcccgagtagctgggactacaggtgtgcgccaccacgcccagctaatttttgtatttttagtagagacagggtttcaccatgttggccaggatggtctcgatctcttgacctcgtgatccacccgcctcagcctcccaaagtgctgggattacaggcgtgagccactgtgcctggccaacactctttttgttactgccattctacccctcaggtccaccccacagcctgtccaattagctatgtgagttaactgctcagtttggtctctgcaaagcagagctaaaacaaacaatgcgccttcctttagggctcttaaaattaaagcatgagtaccctctagtggcttgcaggaaagtttccacgattctcgaacttttcctaagtcccagatgagtgaaggacactggcaggggtgggatgtactggagccagatgtgttccccaccagcacacccaggaaatacatttttgcacagctgtaattttgacttaaacatttgtttaaggtttgcatgctcaatcatatgacctacatgtttggctcagtatacatttgttttctcaaaatctttagtatagtgagtgctccagaaagtcattgcatgtttacctcatagacccatgaactctgaaaagcatagagttccactgaaatgccctttctgagaatcaaagttgaagttcttttcacttgcattggaagaaacctagattttgtgaccagagatggaataaaatatgaatagaaccacattaagtagaatgttctcagtatagcctggcagaaggtgtgtcgtgcctagcatgaggtgacatggtgatgtgtgcaatggaaatggagttatttggcttcaaactgtgtttgaactcttatgaggattcaggcaatagagcagacagggatacttcaatccccactggggttgaactgcccttttccctctgtgtcaaataagaggtggtgatgctggtctatgtgatgcttctgaccttaataataattatgtttttttgtttctggtttctcctccactaataaggctctgggtcttctccttagggagaaggaattgtatgactgaaaaaaaaaaaaaaaaaaaaagcttgattttcctagtactcctgcaacgataaggcaggccaggaccttccagaagttaaaaaacaggctccattgaaacctgtgataaggaagcaacagaccatcactgatgggtctgggatgaaattagatcccctgttacagagtacattttaggagacgctaaaacagaaacagggtgagaactccaggctgagacattccagcggggagggatagtttagatttgtttagcataaggataacaaggagcagctcacggttcccttatcaactaaattagctgagattactgaggcagcggggtgttgcatgagtatgctggcaaggtgggggaggtgtcatgccaagtacattcttaatattgataaaatacagctatgtaggagggtgaaatattctcaaagattagtcaacaagagataaatcaaagcccaacctgataaaaacagactaactgcaattagaaccagcccagctagtaatgtcaaatcactctacgttagtgtttcattctgcaaaccccggggtgtgaaggattaattttaaaaggctgcctaactcatctcctgggggtttgggtgactacttcactttttaagactgatttgaaccctttcatccttactgaagaaaaaccctgaagctcatgctaatatcctgccaatactcacaacttatgactccaaagttggttgaaattttgaattatttccttgccagttagcaaatagcattacttcgatcgctagatgctctcccattacttccctggacccttcccaggagcccccaacttcctcatacccagtaacgctcaacataaatggctggggcagctccttacatgggccaattgaccagtgcccctcacaaaactgattgttgaagattttgagtatcgggtgcaaaacctgaaatccaagcattacagattttagacaacaacctggggaattgaatgacctttgccttattgtaatgccattcgatttatcccccttaatcacaaagcaactttgcatagcttcaccacaatcagtcaggaggaggtcatggaaaattctggtaaggtctgccacctgcaagtttttgctgtcattccttctctctagcctctatttccttgtgtctgtcaaaagaagaatgtggaccagcccaggagatctcactctggctgtgtaaaaacaccttgaagccttttaaaaatctgcagagatccaggctgggcgcagtggctcacgcctgtaatctcagcactttgggaggccaaggcaggaagatcacttgaggtcaggagttcgagaccagcctagccaacatggtgaaacaccgtctctattaaaaatacaaaattaggctgcgcaggtggctcacgcctgtaatcccagcactttgggaggccgaggtgggaggatcacctgaggtcaggagttcgagatcagcctgaccaatatggagaaaccccgtctttactaaaaatacaaaattagccagacatggtggcgcatgcctgtaatcccagctacttaggaggctgaggaaggagaatcgcttgaacctgggaggcggaggttgaggtgagccaagatcacgccattgcactccagtctgggcaacaagagcgaaactctgtctaaaaaaaaaaaaaattagccagggctatggcaggtgcctgtaatcccagctacttgggaggctgtggcatgagaattgcttaaacctgggagatggaggttgcagtgagccaagattgcaccactgcactccagcctgggcaataagtaagactctgtctcaaaaaaaaaaaaaaaaaaaaaggcagcagagattctaattgaattgatctgggagtggggcatctgtgctgtttttgagttcccagcgactctctgtgagccaatgtggatactcactgcactggccaaacactgaggtcctggtgccatgattacaattcagctgctcctcttatgtcaccagtaaaaacaagttgctttccaggactgacaataggcgctggctgcagcctggcccagatgcaggacatcttggctgagagggtagctgagctcccagaggagaaaacacagacgtactgagccctcctgaagcacctgaggagtctggcaggccagcagatccggaatatggcggtatgttccctggtttcaaccactgggcacaccgcacctatttctgaacctcactgaaatgttgagatatgcgttggcagaatcagtatgcaaaaaggtctcagcagattgaagcaacaggcgcagtaaatgtttaaaattaataagcattatttaataaaaatatttaagaaacaactataggctgggagcagtggctcacgcctgtaatcccagcactttgggagaccaaggcgggtggatctcttgaagtcaggagctcgagaccagcctggccaacatggtgaaacctgtctctactaaaaatacaaaaaatagctgggcatggtggtgcacgtctgtaattccagctacttgggaggctgaggtgggaggattgcttgaacccaggaggtagatgttgcagtgagcagagatcatggcactgcactccagtctgggcaacagagcaagactttatctcaaaaaaaaaaaaaaaaaagaaaagaaaagaagaagaggaagaacgataagtcaagctcaaaagagtggctaagcagcatcacaggtgagaaaaggatgctatggttttgctagtttcatgataagcttgtccaagaacttagtttagtcttaggctgcattaacaaaatagagtatctaaaacaaggagggtagccttctctactctgggctgttcaaaacacagctggagaaagatggtcagatctgggaggcatacttgaagatctggttgattttgatctcaaaagaaaggaaaagagaaacagttaggtttttgaaacacatatgctccttcccctgcataccctcaattgtatagcagaaatctttgggatatggaaaaccagggagggcatgtttcctttaaaacagctctcaagtgatttcaaaatgttctctccccagccaggaactctgacgaggtacactggtgaggagaaggtggcaggagaatgaggggttggaaaccaccccaaaaagaggactaggggtgggaggacaggcaaagggaacatgagagctgccttggactatgtctagactcctgaggtctgatgtgttattacatatgagcagagagtagaagagtaactgacagatgaggatccagggagccagatttcagctcaggggaaacaaaaaaaaatgtaaaatggaactgctcataaaggaatggggattccctgtcctcacctgtgttccagtccagaccgcagcaaccaggaggtcaccgtagattccttccctatgctgggaggagaatcttgagttcaatggccagtcatttccctcccaagttctgaaatgctacaggctccatcagatctgagtgagggctcccaaaaaagagtgaaaaggcaattctctgtccaactgtgtggatgcctcagaacactgacacagcccatgtgaagtctggccatttcagaagcccacaggagatgaggctgagaccctttgcaccaaggcaagatggcacctctgcagccaacaccatggccatcttcactgttgccagggctgagtggggtggctcactcccgctgagcctccctgcttgaatctgaatcccaggcctgccccttcctagctggggacattggtcaagtttcataattgctctgtacttcagtgtcttcatctgtaaaatagggataacaacacccacctcactgggttgttgtgtcaggggttagacagcgcgtggaacacaccggtgttaggtaagtgctaggcaccctcgagtcctcttcccatccaaagaagccagtgggaggggccctccctgacaagctgaacccacaccctctgcaaaagagagaaagactgaactgacttagattcctcttgaccctttcatggccactaagaggaccatcagcaggtgccttcggggtagagaagctgagagatggaatgactgagctgtaactctctctccttagtccttaggggggcatgtgataagccggcattgctattcggacctgaatccaattcttgctgtgggcaatgctaccctcaatctgatttcagcaggtaagctgcctccaaacactctgaacagcacctagagatcttttgtcttttctatttattcttttaaggaattgctttaagtcagagcccaagtctctagttctcaattcaccatggggagcccagctcatgagggaaggtgcactgatccaaaaggcagctggtgtttccttctgacaccacacacgcacacaacctgggaccacacactcagttagctcacatgttcgcccacgtgtcttgcttgaccagtaaacaccagaggtgatgtgcagaggctaagctgagggtgaggttgcagtgcgcactctccctatgggccaagggactgctcctgctcccccattctcatcatgggctccctccgccaacacacagtccgaggcccccacacagtgccctcaaagttgcctccctaccccccagttgctgtgtaagaagctacaaggctggtgtggacacacagtggacatccacacaggttgtggtgggcccctgggaaggggtaggcagtgattgattttaattgctagctgagaggaacgttcccttgcggtggctgcccactaaacctccctttcatctccccaagcaccctgcacactcacactgcccccaactgccccccagatactaataccaccttgactggatgcaactacatgccaggctgtgctggggcgttggtcattaccattggctgaaggtctgctttcccagctcagctagagccatctccacccagagcacagccctggctccagcaaaggcagtagatcagctcgctggcccagcaacagggaggggccaggcagagatcaaccgtgggagcctcctttggggcaccctgcttcctcacaagcatacctacattccaaccagcacagcgctcactgtgccagggatcaaacgcatgtcacagtccccaggccatagtttgatctcctcactgcactcctgtgggccagagggcacagttgtggtccccaagagggggcaactgggctagaaggaggtttcagaatttttcactttgttttaaaggtgtaagtgtctgtctcaagagctgacaacagcaggaagaacacaaggcaaagtcagtggcttgaactgaactgaatagttaaaagtgcaaacaaaccgtgtgctggcttaaagttgttgacttaacaagtgatcataagcactgaacaggttctatgtagttaaccacaggcccagtgagccttcaaggcagaagagaccccagttcacatagcatatatgctgatgagaaaatagtaatgtcattacggtgccaccacctgggaccccatgatgggaccctgtgactttgccgtggactcagacctcagccttgctctgtgtagaggaagctggcctttccttctccactgctgacatttaaaagaacagaataatcttgctctccttgttgtgactgtgcagaaatatcattctcttccacagaaggtacgcggcggattcctctaaatgaacattttcttgctgggttggcaagtgcagaccttaagccagaggaaattttggaatctgtgcatatcccgcactctcaaaaggtcagaattccgctggttgcttttgagggtggtttttcctttttcataactgagtccagtcatctttagaaatctaaaaacagatggaaagaaaataactctgccctgcaaacctgtttcctgtccaactgcagattgggccagcaccaaggccctccgacagccaagagcaggcagctccgggtgtggatgtggggctgttgttctagctgcagggtggagcatgctgagggcctgtggtcacaccaccacacccctcatggccacgagttcaagctctcgggctgtcaaatggagtgtctctaactgacccacagggagatgggggctagggctcagctgtcccacaccccactctagccaatagttcatgggcgcaggagggcctctagttgttcgctaactcagaatctctgcggctgatgtagccacccagccggctatggagttgaccttctgtcctcactgcctgctccctgtgcctctgccaaagctgtacctgaatctaagaggatagtcttcccagagagaggcaatgcaacacacacacacacacacacacacacacacacacacacacaccccctagctcagcccccaaagtcccagagaggagcagccaagactctggggcaccaggatgaggatggcccactccccatccggggccttctgctacagtagcagtaatattcttctacaggggcattggtcgttaccattggctgaaggtctccgctttcccaactcagccacagccatctccacctggagcacagccccggctccagccaaggcaatagatcagctcaccggcccagcagcagggagggaccaggcagagatcaacagtggggggctcctttggggcacccctgcctcctacaaccatgcctacattccaaccagcacagctctgactgtgccaggtgtcttgttagattgtgtctgtgtgattaattaatagcatcaaaagccggggggcagcctggttatggagggagtcataagttatgctttcagccatgtgtgatcttcattagtttttcctttggaatggaaactttgaaatgtgttcccatttaaatccatgaaaaggcagcagacggaaaaacaagcccactcaaacatgtgcacccttcgtggcggcacagatggaaatgcacaaaggggcacaggccgtcttcatggaccccaccttggctcaccaaagatcatggtgccaaggggtcagctgggacagccatcacctttgactcttcctcctgacacaagattccctagccactgctggaaagctttgctcggctcccttctgtgctttgccaagtggaaaagcaatcatttctacaagccaagcaatgtggtgggtctcctttgcacttttagcaaatcacctttaaaagcccctgcattaggagggctcctccaacctcatggggaaaaggtgtctgaaaactggagggaatggcccctggcaatgccagcacatggacgggtgtccaggcgtgagttcccacagcatcccgtgcagaggcatcctggcctccaagggagagtgcgcggtggtccctgttccttgagggtgtccgaggccttgagagtgggccttggggaggacgctgttctcactttgaacgagaagtcagccaaggtgtcctctaattgtgccaactgtctttggtgtcttgttagattgtgtctaagtgattaattagtggcaacaagaagcataaaccatgttcttagttttgacatatcagataaccccaaatggtttttgtctccacagtgggaatttgtgtcagccttccgacaggctcaatgccagcagaatgccttgccccacgtgaatgccggcatgcgagtccttctcaaagaaggcacagacagcattgaggacctgagcatcgcctatggaggggtgggggctgccaccatcagtgcacacagatcctgctagcagctccttgggaggtaagccaagagcccgcaccctgagggggaagcttgctgttaaataaaacaagtggagatctgtctctggcaagcatcagtaaagccctgggaagatggaaactattacatgaaaatcactgcctgttctttctgccattttgctaaatgaattaaaccttatttgactttgattaattggatgccagtctttggatgaggtatacaacaaaagtgacctggcctgagttcagccagcaggtgattttttcccatctgccctcgttctcttacacagatcgacagcctagccatcctgatgccatggcttatgcctataatcccagcaatgtgggaggccaaggcaggaggattgcttgagcttaggaattcaaaaccagcctgggcaacaaaacaagaccctatctctactatatatatatatatgttttttttttttttaattagctgggcatggtagcatgcacctgtagtcccagctcctcaggaggctgagacaagaggatcacttgagccctggaggttgaggctgcagtgagtagcgatcatgccactatactccaacctaggtgacagagcaagactgtgtttcaaaaaaaaaaaaaaagtctagcaaacccaccctgggcagtgtccaagcagcacctaatgctcccaccgttaagtgcactctattacttcctcagtgaagtcagtctccaagtctgagtcccgttcagttcacaatggaattggccctagtggtctgttttgttgttgttgtttttgagatgaagtctcactctggcacccaggatggagtgcagcggtgcaatctcggcttcactgcaccctccacctcctgggttcaaagtgattttcgtgctcagcctcccaagtagctggaattacaggtgtgtgccaccacacccagctaatttttgtgtttttagtagagatggggtttcaccatgttgcccattctggtttcaaactactgggctcaaactatccagctgccttggcctcccaaagtgctaggattacaggcgtgagctgtcattcccggcctgcactgcttatttaattcttgattctagcatgtctggctgtggaacatgttcatgtttaagttgcaggtcccattctcaccctgccatgacccttgggccactcgatgcagcctccccaggccttggtttccctaagcagcttgattaggtgatttctgagtttccaaggaaactctggggtctctaaaaggtcactatcccatatcatgccatgctagaaactgccctctaaccaattccttcctgccttcaaccctcccaggtgctggaatgagctgttgctggatgaggcttgcaggctgcttctggatgaagtctcgctcccaggctcagccccgggtggccgggtggaattcaagaggatgaggaccctagtcgtcagcttcctcttcaaattctacctagaggttctgcaggaactgaagaagctggtgaagctagtctctgtgcctgtgggtgctctggtgtattcgctggctggggctgctgaaacaaagtagcacagcctgcctggcctgaacaatagaaacatgttccttcacagttctggaggcgtcagcaggcctggttccctctgagtgctgtgcaggggactctgccccctgcctttcccctagctcctgctggtttgctggcaatcttgggcactccttggcttctagaagcatcaccctgatctgtcttcatatgaagttctgtgggtacatgtgtgtccaaatttccccttctcacaaggacatcagtcatatgggattaggcccatcttaagtagctcattttaacttgattacctctgcagtaaaggccctgccttatttggataaggccacattctgaagaactggggctggagtgctgggacttcaacacagatatttagaacagacacaatttgacccatagcatctggctcttatgtgttccttgcacccataagctcacagctttcccatcactttggcaaattgtctcgtgcacagcctgtgctgttacctgtcacctgctctgagtcaggcctcgtcagttcccagccggccctcctcctggaatccagccctgaggggctacatgaggctcatggcgccagactctctgcagtccgcaaatgttgactgcgtgccctgaacactgaaacactgtggtgtccctgctgccagttttttcttttaaaatcaactttattgaagtgtaatttacacatcataaaatgtacctatttaaattcagcgcatgttgacaaatgtgtatatctgtgtagctaccacctcaaattttccattatcccaaagagtatcctatgcccccttgtgtcaccatcttgcccctggcccaggcaaccaccaatcactttgctggcactagagattcattttgcctcttctgtaattttatgatcaatctaaaacataaaataatattttatttttcaaaacaaccaaaactgcccaggcatggtggctcacacctgtaatcccagcactttgggaggccaagggaggcttgggcccagtagttggagaccagtctggggaacatggggaaaccccatctttataagaaatagaaaaattagctggccgtggtagcacatatctgtagactcagctacttggaggctgaggtggaaggatctcttaagcttgggaggtcggggccacagtgacccatgtttgtaccactgcactctagcctgggcgacagagcaagagcctgtatgaaaaaaaaaaaaacacacacacaccaaaaactgatgtgtatgctaatgtttaaatagctttctagattcttctgattgtaaacttttggaataagctaagcaaagcaaaatatattatctctctctctttctctctctctctccttctctctctctctccacccctcccctgaccatgattacaactcaccctaccttgtattccctgttccccaaccacagctcaccccaagagcctgctgttctaaggtatctgattttcacagactcagatgaagaccctcatcaaccacactcaccaggataatccttgctgccatttaatttctgaatcaagacacttgacaagtttcagtgacacccagagcaccctccccacctctaccgctctcccaggagagttgagttcctgagaaaagcaatctggctttgagtccttttgtgtgcaatggatacctgcttattctgggatggcttatctagcccattttccttgcttctcctcctgcctctacccctactctctggcaggcctctgcctcctcagggtggcttgaggatcagattccaagcagtcagtccaggtcctcattatgtggagggaggaggggaacaagaaacattcataaaacatgaagccggggcaggcagtatggatcctggttatgcacactatgctggatacattagccaagtcagtttcacgtaaaccaaagcccagtttaactgtagctaaccagcttatctttattgttttgaatcacctttcaggacagccgtcatcattctgaaatttcagaccaattcctaagcgctctcgaagatttcccagtcacaataccccagggagtccaaacgtaccaggtcagtgagtttgatttaactgaaacctgcaaactagagctgtgctgagcgagcaagcttttcagagctgtggtttcaagtctgacattctagtcgtggctctttgcttagtccgcgtcagggagacgctggaatctgaggtcaggcccaagctgctgctagatgagctcaaggctgaaccgtccagctaatctacagtctaatcattatagtctcttcaaagtgatattctctgggcatttgtttgatatttactcagaagagcaaccgagccagaaggttcagcccccagctctgattgcaaatgtttaatctccagtcagcaaacaaatgccctgcgagtaacttaactcaccgttctggcaggacagtttagaaattatggattcttgctacagcacaacgcctctcccaccccacctccacatacatgcacacacacacacacacacacacacacacacagagcttccctgagaggagctccagaataaacactatctccacctccttacagcctagtgatgtttttgtgccactcccaagggcagccaggacaccttattctggatctggggggactctgttgccatcccccaaaccctgtgccagaggccccaaacaagtccatacttgggcttcgggcttggattttggcatcccaccttgggaactgtatcactttaccccccatcatcatgaggacagtacccgtggacagactgatcattggaaaggtgaggaggcaggacagcgagacccctgagaacaccaccagggaaaagaaaatgccagaaggagaagctggggtgccccttcacctacttcgccatttattgccacataactgaaataacaattcactgttctagtggcatcatcaatgtgtcacactcatcatctggcccactccagtgtttgtcacccgagggtgaccatccgatttctcaatcctagctcaggagtgttggtgataggccaggccacttctgaaaattaaaggcttctgaggcaactcttgtcttccctgtagagtgtggatcctcaccagcctctccaagacccagttggacaccctatcatgcacctgtcagctcttaaacatgccactggggaagccatgttttgtgatgacattcccatggtggataaagaacttttcatggctttggtgaccagtagcagggctcatgcaaaaatcatgtaagtaaacgaagagctttcaagagccttttaaaagcacacttggggacccctcagaggaatgcgcccatgctcctgccatgtcctgaacttaaaggacctaaaatggaaagaataaagaaaaggttgccagctccaggaggaagggagagcatctagaaatgaacatcatggagagagaataaaaatcactggctaggctcagtggctcacatctgtaatcccaacactttgggaggccaaggcgggcagatcacctgaggtcaggagttcaagaccagcctggccaacatggtgaaaccctgtctctactaaaaacacaaaaattagctgggcatggtggcacacacctgcaatcccagctactcaggaggctgaggcaggagaatcacttgagcttgggaggtggagtttgcagtgagccaagatcgaactactgcactccagcctgggcagcaaagtaagactctgtctcaaaaaagaaagaaaaatcacagttacaagccttttgtttccctcctaacctcacaaaacctcagctccctgctacagcctcagacatgactcaaaggcacaaccctgatagagagctggtattgaggtggtggtgaaatacccacttcatgcccaagaatgaatggcccctgtcccaaccttcaagaacgccccttgccaaggccacactatcccttctccacctcccaacccccaacagctaaagtgttgtctcctggcccagcaggagtctcttggaccctactccttggcaggtctgttctgattggtcaggacctaagctggatttgttgtcatatattccgattttcaaccatgttctatccctccctcaaatttagggccctcaaagcttgctgatttctacttcctctttttttaatttagagacagagtctggctctgtcatccaggctgggggcagaggcaccatcatagctcactgcagccttgaactcctgggctcaagccatcctcccacctcagcctcctgagtagctgggactacagacatgcgccaccaccacacctggctaatttttataattttttttgttgagacagagtcttgctatgttgcccaggctggtctcaaattcctggcatcaagcaatctctcccttcttgaccacccaaagtactgagattacagacctccaccaccctgcccagagtgatttctacttcttaaatatctcttgtttagatcaattgatgtgtccaaggcccttgaactacccgaagtggttgatgtgataacagctgaagacattccaggcaccaatggcgctgaaggtgacaaattgctggctgtagataaggtacgtctgggacatgctcttctagatgattctgtgtagacaatcaccaaggtacccctcctgccagctgttcagctcccagctcttcctgcctttgggaggtggaagcgccgagccttctggcagctgtctaccctgcctttattcagccctactagtccggagtcaggaaataacatagtaaaaggaaatgtattacagaaaagcaacaagtcctagttctgccactgtgtgctcttgagtccatatgaatttttagaaacacaagtcagtacacaacaggagccccactatacaaaaactttatctttaaactctaaaatgtcatgaaggcaacatgtgtcaaccaagctggacagaagacatggtagattcaggttacggccaacctcacatccactctgagccttacgttcactgagttacatggccaatggaactgtctgtattatttaaattattttttcattaaacatattttttagccaagcgtggtggctcacgcctgtaatcccagcactttgggaggctgaggtggatggatcagttgagtccaggagttcaagaccagcctggccaacatgatgaaatcccatctctactaaaaatacaaaaattagccgggcgtggtggcacgcacctgtaatcccagctactcaggaggatgaggcaagagaatcatttgaacctggaaggcagaggctgcagtgagccaagatggcaccactgcactccagcctgggcaacagaacgagactctgtctcaaaaaatatattttttttaatttttagccaagcagatgtagtcaaatgcgactccaatgtggttactattgctaaacagcgacatctaagacagcagccactgctaaggttgaactaagcctattcccacccagaattttgtatctgcttcatgtgtgtactttccacaggtagtctgtgtgggccagatcatctgtgctgtggttgcagaaacagacgtacaggcaaaacgagcagctgaaaagataaagctcacctatgaagatctggaacctgtaatcttcaccatcaaggtaaacagggctggccggtctctccctaaggttgtagaattaaaagtacctttgtaaaaatcttaatgaaggatctaattgtttttccttgccactggtttgctctggaaaaatcaactttctttggaaaacattacttgcatgagctgaaattatctttggttccaaggagtggaaaagacagaagtttctcacattcaaaaagtctagaagtgggcagtccaggacttctatggcattctgtgtgtttaggatccagccttcttatatctagtcactccatcatgcattgcttcctggagggcacatttggtccacaatggccacggaagctctagctgttacatccacattccagacagctgagaaaataaggtgatgaagaagggtgtgccccctccctttaaggacacttcccagtccttaaagggaggcatgtacattgcacatgccttcctccatctctttgtttggaacatggtcgcatgccacacctaactgcaaggggagctgggaaatgtggattttattccaggtggccagaaaaccactacagatcggagactctatgacttgaggaggaaggtgaggatgcatactgggaacagtaatgttttcaaggtagagcccaaatgcagtggaactttcatggtggaattccacagaaacttcactctcgtttctgagtctagataatgatattcaaatggtatttcggggaagataacggagtgaggacagacaattcaggtgtggactggggttttcaggttctgattcagtgagggacaggttcagagtcaatgacttgagaaaagcttacttgtttgtgtgcttgtgacagaacatcaaatgtgtccagaggctttcatgaaccattgggacattttaaaatgtaactaaatggtacaaattgctcaatatttaaagtgtttttttaaaaaaaagtttcttgatcttcctaaaccaaatcaactttgttccaaattcccatttgccaagtttgcaagaatccaggccatttttcttggctcattcctcttccttgggttgaactaggatcctaataagggtttttgaaattgcccttctaaccccactttcctcaagggggaaatggcacccagaggacacacccacgaactattctagaattcagaatgggtagggatttagagttccctccgaacaagactgtccagagtcatcaaaacaaaatcctccacaagtcataaaattgtcatatatataataccaatagtgcttcatccatctattcatttatttatatgactttatagatcagaggcaacatagggtcatggttacaaacacagatcctagaaccaaactgccagatttgaatagtggctgcaccacttactagctgtgtgaccttaggcaagttatttaacctctctgtgccatggtttcctcatctgtaaaatggaggtagtaataatacgtatctcattagtttgtcataaaattaaatgagttaacaggtgtaaagcacttagaacagtacctggcacatggttagcactcacccaatatagcctatgttataacaatattatactgtctttgttgggcatagtggctcatgcctgtaatcccagcaccttgggaggctgaagcaggtggatcacttgaggtcaggagtttgagatcagcctggccaacatggtgaaaccccgtctctactaaaaatacgaaaattagccaggtgtggtgatgcatgcctgtaatcccagcctcttgggaggccgaggcaggagaaccacttgagcccaggaggcggagttgctgtgagtcgagatcacaccactgcactccagcctgggtgaaagagcaagactccatctaaaaaaaaaaaaaaagagattatgctgtcttatgacacatttacagtatggcaataaacatactttcacatgtaccaggatggcttctgagatcttagtataacagaaaatgaaaaaattcagctatattgttccttgtctgctgctttgaaaaaatcaagtgttcatcattagatagtatgtttttaaaaacttagcctgggcttgaacacttcctttatcacttatttacagtgtgactttgagaaagttcttttaacctctctaagcccagtttcctcatctaggaaacagagatcataacagaatgaacgtaaggatacaagtacatacgctgttattgcacagtgcttagcacaaagcaagctctccatcaatattagctgctcccaggagcatcatcagcaagaaaggctatggcatctgaggccatcagagcctaggaaggcaggagacaggtgtcattcagaagtatgaaaaaataccttggttctaaaggctaaacaaggatccgctgtcagtaggtcagtccacagaaccagtctttatttgtaagtcagttcatgttattgtcagggggaagaaaaaaaaaacatagaacaaagagctagaaaagcccttatgagatgatgccaaatactcaaagaaaggaacaaacttcctattaggttggtgcaaaagcaattgcaaacttttatagcaaaaactacaattgctattgcaccaacctaatacaatgtgtactgggcttttctgccccagagatgtgtaataacttgtgtcttccctctcaagacagcctcagtatttttcagatccctgagtgagaggttcttgtacctgagctacctaagtagtctaacacaagcatttttcttcaaggaaaaggtaaacgaaaaaaaaaaggcagattcccaaacctcacccatcatgcacatttgacttatctcatgttccctggagagtcacatttaaataagaaattagtattcatcgtccgggatcatcatagtgtccccagccctcagttatgaacgtagcttccttctgaaggtttcgctaatccttcttgctggttttctctgcaaatctagaagacctttccttggacttcccatctctgcagccagcctaccgctctaattctcccttgcttgtttgacacctttcatctgtcccgggagacagtgattttccagagcatactggcttttaagaaaaaactaacagtggaaggaaaagtcggaagaactggcttttatgcttttttgtttttctgcaatttaggatgccataaaacacaattcattcctgtgccgtgaaaaaaaaacttgaaaaaggaaacgttgaggaggcctttgaaaaagtcgaccaaattgttgaaggtgagctcccagggatacttaatagactctgcctgattctattctgaagcaaccatcaaaagtgtatgatttcccctcagaaagtccagcctctaaagtcttggtgctttgccaaatttctcttacatctcttcctttcaaattgtgtgtgtgtgtgtgtgtgtgtgtgtgtgtgtgtgtatgtgcagttttggcgttggtgggtagggagcaatagcataaataaaagaaaatctctaagattttggtttgggcagagtaaggaacaaaacttggcacttttaatttgtgatccagaactattgtctctgaaacagattgccacaggacaaatgcctggttccttcgtcaggataaatccaggccagccaggcagggcacggtgactcacacctgtaatcccagcactttgggaggccgaggcaggtgaatcacctgaggtcaggagttcgagaccaacttggccaacatggtgaaatcccatctctgctaaaaatacaaaaattagccagtcatggtggcaggagctgtaatcccagctacttgggaggctgaggcaggagaatcgcttgagcctggggggcggaggttgcagtgagccgagatcgcgctgctacactccagcatgggtgacagagcgagactccacctcaaaaaaaaaaaaaatccaggccagccagtccacatcttactggcttttgaattctccaagacggtggctctccaagacggtggcttcccaccagcacacaccttaggagttgttctgtgcttatgcttaacaggagaggtccatgttggaggacaggaacatttttacatggaaacacaaagagtgcttgttattccaaagacagaggacaaagaactggacatttatgtgtccacacaggacccagcccacgtgcaggtgaggtccaggataatacccacgtccccaccttcctaattccatgatcacagtcgatcccacagcctcacaatcactggccattttacctgcagaaacctggaatccaagcattagacatcagacatcaataatgcagccaagacctcagaacctttttttttttttttggtcttttcaagtaaataaaaaaatagtcacagtaattttaggtttcaagagtacgttcatttgcatcatgcttagatgagctctgtgatgagatggcatcactaaactatttctgtacttgatttttctctaaaataatcatcacagataacctttggagtcaacacatcactttatagtacattttcatttccccagtcacaaagtgctctaggtttagctgcaaacacatcatctccttggtaggttgtcaggagttcgccggctttcatctccttgggactttagactaggaacccagcttctcacaggaatccagggctctgacagttttccttctggaaaataccatttttctgctagaagggctgctctgtgcggaccaacggtgtttacgagctaaacagagccccaccagacagattcagactatctccattttttttaccaatggtagatgtgaatgaattctgctgggatgctgtttcaagaaacaaaaagcttcttttccatttcactcttataaaccttcttgttatctcacttttacagaaaacagtgtcctctactttaaacatccccatcaacaggatcacctgtcatgtaaaacgagtgggtggaggttttggagggaaggtaggaaagccagctgtattcggggctattgcagctgtgggtgctatcaagtaagtatggttggggatgcttagggatacagaatggcatcaaatgcacagagctgagggcaaatcagtggctgacagtcatctgggctgccatcataaccatgtgtgtgtccttgggcaattcagcctcctgtctgtttctttaaaaaatgtaaataatcatacctaccctcccacacttttagagttattgcaaaagtcaaatgtacacaggactttgaatagctgacatgctattgaaaggagcagtggtactattagctgaatacctcctgagcttcagggaaagtgagccgttgaggggtggggcaagtcaccctgcccaagtggagtgctaggggaggctgctccctgactcttctttcctgctctcagaccaagaacagggtgaggtaaggaaagaaaggctcttcatcctctgcctccctgcacctgggaagggctgcgtcctcagagtctgctcaatggacagatgactcatcctcaaagacagctcccaggctgacctcagcggaaggctcactcctttgctgttcatgcctcagatttgtatttagttggtgctgctttttctgttaatggttcattttctgtggctaagtattctgtcagagccccagagggcatgcaaagtttacaggccctgcttcatttgacaactcttgtagttcagagctaggtcctgaaacactcagacatatgtctcagtcctcagtgagaagtgggaaaaagcaggatctgaatcccatctccaattctttccataattaaatccactccactcacacccactggggattcagcacaagataatcagttcattgaattccccccaggcgttgtggctttaagacttctcaaacacgactgcacgttagaatcatctgggcagcatttaaataccagtgcccaggctgccccatactgacccaggcatccgtatattttaaaacttcctcagtggttccactgtgcagccaagtgtggcaaccagtgccttaagatacaactctaccttggtacccaagggccatgcattaaatgatccccagagtaatgttcccaaacctaatagtaagtaagagttgcctgatgtcatagaaattcctgcctcagctgggcatggtggctcatgcctataatctcagcactttgggaggctgaggcaggaaaatcacctgagcccaggagttcaagatgagcctgggaaacatggtgaaatcctcatctctacaaagatttaaaatagaataaaataaaaatagctgagcacagtagcacgtgcctgtggtcccagctactcaggaggctaaggcaggaggattgcttgagcccaggagatcaggctgcagtgagccgtgttcataccactgcactccagcctgagtggcagagcaagaccccgtctcaaaaaagaaagtcctgcctccccatcccagcaccactgaatcagaattagcaggggatggacctggaaactgcatttccctgatgttccagattgtcctcacaattagggaacaccaggaaaccctgcactagaatagtgattttcaacatttgcctgaagacacctgaatcaatatcactcagaaaaatgcattctaaagcccctccctgacccactgaatccaaatcctagtacaaaggcccaggaatatgcattttcaccagcgtgccagaggattcttcagcactccaaagtctagaagcctctgctctggagatggagaaaagctgaggctcctccctgaatgagagcccaacttggccagcatagccttcacggatgagaatggagacgctaacccagacatcctaggatgagtgtttggccttgttttcccagtagggttgttaagtttgcatttatctgttcacattctttctcttttgtaaatagtggtggagataatgcaaatatctggatctgggtgaaggtcaaacttgaagctatagaattcaacttaaccgaatgtgacattaatacttttaacaagatctccaaccattgagttatagaccacagagacaatgaagatttagtcatatattaataattcacgttagtgtctagcatattgtatgatattaatacatttatatgggataaatgaatggatggatggttgaataaagagtgggagaatggatagtggatggatggataataggcagatacattgatgggtgggcagatagttaaatgaggggatggataaatatgagtagataggtgaacgagaagatggatggatggatggatgggatgggtggagaacctaagatttattttctttagaactggtcaccccattcgtctcatccttgatcgtgaagatgatatgctaataactggaggaaggcatccattatttggaaaatataaagtgagtattaaagattaattattaaaatatctcattttggctaggcactgtggctcacacctgtaatcctaccactttgggaggccaaggcgggcaaatagcttgagcccaggagttccaaaaccagcctgggcaacatggggagaccctatctctaaaaaaaatacaaaaattagctgggtatggtgccacatgcctgtactcccagctacttgggaggctgaggtgtgtggatcccttgagcccaggaggtggaggctatagtgagccaagattgcaccactgcactccagcctgggcgacagagtgagaccctgtctcagacataaataaataaataaataaataaataaataaataaataaatagataatctgattttatctgaatggctttgttcttttctatcattttgattttgctaaattctaaaaacaaacttagcacctaaaatattaaatgaggatgctgtgtatttgaatattcataacattttatgaggaacttttaataattctagtaaataattgtgaagaagtttaatgataaaaatacaatttcaaataatgatcaaaacactccttgaaggaataaggatttacattagtggttcctcaaaaacaaacagacaaacactgatagaaggtacaaacattgctatgccaaaccttcttgactatacaaatatttttcagtagaaatgtttggagacaatttgaccattgaccattttaactgcaaaatcattttttagaagtgtttttaccaagtggctatgatactgtcacaaaagctctttgcatgtaggaaaaaataatacagtaagtagtgaatttaaaattgtttcagactgcatttactgcatttttatataactataatataaacatcttaaaaatacttgctggcctcgagcttacaatactacttttcaaatttgtcattgagctgttaggatcattctaatgtaatctaagtcgtatcgaacatactttacgtgggaattgcttgtagcatatacatagttagatttcctatctgattttgttattgtcttagattatcttccctgtattactaaagccacagttttctatagcacagaacaattttatttcttccattggcattaataatttttataattagagagggagatcctctctaatagttggccgattcaactgtttatttgctttcaaatgcacagatattaatagtcacagctattattgtcttctaggaccgagagcaatgtagagacacactgctaagattggagcagttgctgttgtggtgatggctgtgctcttatcaaagttatgagattcttttagtactaatacttgttaagaagattctagactgttaatattttggtaattatagtaatataaagtataaaagagggaaatagattttttgaaaaatccaagttttattttatattttggctgggtgtggtggctcacacctgtaatcccagcactttcggaagctgaggcgggtggatcccctaaggtcaggagttcgagaccagcctggccaacatagtgaaaccccatctctattaaaaatacaaaaaaataactgggcgtggtggcatgcacctgtagtctcagatacttgggaggctgaggaaggagaatggcttgaacccaagaggcagaggttgcagtgagccaagattgtaccactgcactatagcctgggcgagagagcaagactctgtctcaaaaaaaaagtccaagttttattttattttttaagaaacaatttcaattccaatataatatatataaacaatttcacttcatatatacatatatatatatatacacacatatatatatatatacacacacacatatataatccttcagacacagctaacaaagttttgcttggttattcagaactatttgtaaattaggataacatgtgtttatgtttaaatagtttcttccaaatttttgaaaagtttatatgaaatagtttaaggattctgctaccttatttatagtactattttgcttagcagtcctttcttcatgaaagtcaaaggtaaacttcagtcaaagtctaatgttaaccctatagttatatatatagtcgtgtggatccttcagttgtatttatccctgctttcagaaaggcaaagggacctggatcaatcctcgtttggtagaactacagtagggagtggggatttttcttttctttttaatgtggactgtatagacaaaatggtctggatgggtggaggggagtggcaacactgaaagaatgcaagctgccttaagctcttcccaaacagtaacaacagcacgagctcaggtttgttaggtcaggtaagcatatacaaacatcttcaccacctagtgaaatgagagcagtccccatgcatccattcagggacctcagcttcagaggctttcccataacaggatacactgtgattcattccaacacattctggaattccagagactttttcaccagggaggaaaccacacactaaattagaaagaaagtcagtaaaaaaatgaaggggaatcttccaagaataaggatgaagagggtggcaattatagtccaggagacaagcaaagtctttagaatcccatgctgactgtgaagccagaaaatcacatgttggaaggaaagagctcagcaaaattcagctcagaagaagtctccatcagtcaagcaaggcatggtacaccataaagcaaacagggagctgagtctggcctctgtcctgccctgtgggggaactgggctatgtctcacaattggcatgcaaattttgaacatctcagtaaataactatcatttggtgacaggtaggattcatgaacaacgggcggatcaaagctctagacattgagtgctacattaacggaggatgcacgctggatgactctgagctggtacgtacaccagaaagcagcaacgtgcttgaccatgagtagaatgccaaatttctagatgactctttatgaagtttatttcctaatgtagttaaattctacaagccgtttgactctgtacttgactttcagagaaaagaaaaaaaaagtgatgataaatgtgaatatccctttttaggtaacagaatttctaatactaaagctggaaaatgcatataaaattcgcaacctgttcaggttccagggccgtgcatgcatgacaaatttaccatccaatacggcctttcgtggatttggcttcccacaaggagccctagtaacagaatcttgcatcacagctgtggcagccaaatgtggccttccaccagaaaaggtaaggttgcaacaaaggccataaccaaagttgctgatgaaccagactgggaaacccagcttctttgacccaaggaaacacactagaagaaccacatgaattagccctggctcagaattcaaagtgaattaaaagctacctaaaaaaactcacctcaccctatcttcctccttccttacttacgcaaacatctcttttttttcatttgtaccaaaataattactctacttaaaattcaaaccacaccgaagtaatcaaaaaaagggaatgcccctttttccacccccatccctcttggtcaagggtaatcattgttaacaattccatgtttattgttctacccctttttctatctttggccacccatttgtattcatacacacatacctaaacattgacatataacatatatgtgcacacgtatggttatttaccagaatgggaccatagcatacatattactctgcccctttcttctcctacaggacagtatgccatggccatctttctatgtcagtagaatggtctgcttcattctttttcatgactgaatagtactatgtaatgtgcacgtaccataacttatttaaccactccactattaatatacattctggctgttaccatttttggccattaaaatgatgttacaataaacatcttggtacatatgtacccaggtatatgtttgccttatttatctttaggataaatttacagaagtggaattactggtgcacttgaaaacttttaagaaatactgccagaagaacaccctctgaaaatactgtttttcacaatagaccagaaggtgcacaggatgtacagtatgctggactagagagaggcagcttctggaattgagatcatggtcaataacttgcttccactccccacacattccaatcagagcccaccctaccttttccatttctgtcccctgtttccccaatatagaccccctactccagcaagaactctcctatgtattgtccctagaactgctttgtccctaaattcaacaggaattccaggtttgtgattgtcggggtacttcctacaaacaagagaacacctaatattttgtacaaggaaggcagtagttatcctaagagaagtcacgtacagtgttccacgggtaccagagaaggaaggcatcacgttggcatggggagaggggaaccaggaaggactttctggagaagatggcacttgagataggccttgaagaataattggcacagatgttggaaaggtgatctaggcaagtagaacagcatgagcaagagtgtcaatgtctgtgtagttcagtttccttatctataaatgactcacctcacagagttcctgcaagaatcaaataatttaacattcattacaatatttgttttataaactggatagtattattccaacgttgttgccaataataataattcttttactgtgattagaataaaatggagatgatttaaaaaaaacttctaggcaaatctcagcaggctctcctttgtcaagtgttgcaagtttccaggacatataacataaaacacaccttattcaaataagccgttttttttttctttctttcttttagagatgaggtctcactacgttgcccaggctggtcttgaactcctgagcttaagtgatcctcctgcctcggtctcccaaagtgctaggattacaggtgtcagccaccacacgaggcccaaagaaactgcttaaaagatttacccatacattccaaaggcaattaaaagacttagaggggatctgctattatttgcaatgctattcctccctggcaggacaaatcttcagttatgacaatgaatccttgctttagtgtactgcccaccagctctgctccatcctctgaaccttgtagaataaaaagaaaagaaaaatctacctccctaggcccctacatcccactgcctttcatggaatagtctccacctgctaccttccacttctagtaaggagagaccctaactggtgcattgatgaagaggtaaaaataacctctactatttttgcaaaagcatgtaccattcaaagaaaaaacagaccctgtcttcccttctctacagcttgtgctttcgtggagaggtttttcaagtctctatttggccatcagtttctgccttaccataactactgaatttcccacctgtttcagattagagagaaaaatatgtacaaaacatatctacagatatgtagataaacatatctacagatatgtagataaacatatctacagatatgtagataaaaccatctacaaacaagcattcaaccctgagaccctgataagatgttggaatgagtgtctagacaagtcttcctttcacagcagaagaatgcaagtcgaagagttcaataagaagaattattggaagaagaaaggcattgctattattcccatgaagttttcagttggctttgctgcaacaagctaccatcaggtaagacttgcatataggataaataaccttcatgctagacacactcctggcccaatcagcttttgtggactttgaaaaatatctcatttcttagagcattgagctcctccctgccaacacctaagagaaatatacagaactgtccagagcagcacccctatctgcaagcatttttaatacagtgcagtatttgtttccttcttgggaaacaaatccctaatcaactgaagtcaggaagacctgagaaatcctcggctctgtattgaccagctgtgcaacattaaattattcaacatctctgagcctcagctttcccagtgataataacaataatagtaataacaataactctgtcttaagattgatgaggactcagtaagatagtgaatgtagagcagcacttggctgggttcctggaacactgtggatgtcatccagagcatcactaggcccctcccaggacagctcagacacacctctcagggctcctcctcctctggtgggtaggatgagaccccctgaacctctgggtcacatgttcaggcccagcatgccccttctataaacaggcacaagaaggttaactgtcatgtctgcaagctagatgcaatcaaaggctgtgacatcagagaaacttgagagctgcctgtgtggtttcctctctgatgccaaatattgtcttttccaaaccaactccaacaccaagtgggtgtccaaccattctgttctcacactaactaccagagttagtgcagactccacagatcaagggctgagtcccacaagaccgcccctatttcagacaccagcttcaaatggagggccctagctactcacactcctgcctggccgactactaatttggaggttttcactacccccattcaggtttgataatttgctagaatgactcatggaactcaggaaagcactttacttatgattattaccagtttactgtgaaggatatgactcaggaacagccagatggaagagctgcctggggcaagggatgggaaggggacagagcttccctgacctctccaggcacacaccctcccagcacctccacatgttcaccaacccaggagcccccagactgcatcatttggggtttttatggaggttccactatacaggcatgattgattacagcattggccattaatgattgaactcaatctctagcccccctcccaagaagatggggaggaggactgaaagaccaatgcacaccgcctccaagcccccatcctaaagctacctaagccctcctcatgagtcgtctcattaggagaataaaacagtaaattccaaggctttacgaactctgaaccaagaaccaggggcaaagatcaaatatttactttttattataacacacttcccttcacctgtacggccacaccgcatctaaaccacagcctacgctctaccatcatccatgggaacaaacatctcatctcatcacaaagaaaaccttcaaatcaagcaatgattttaagtctccatttgaatatcctccagctgctccacagagttctaaattgaggcaccctagaatcacctggctaggaatagaagggtgttattccaggtcagctgatgactcacaaagctggaacacctaccctctaaattggcagtgagagctctgtcctcagtgggagtcaaaagacccatggtgagtaaatcctattattagcagctacaagccttgatgctcccaagcccctctgagccaaccctgggcctccaggcatctcgagacacaaatgggctgaagccttcgttcctccttctcctggaaagaaaaaaataccacctttccctttgtccagtttatcaaacattgatgtagtgtccctgtgatttttttttttttttttagacagagttttgctcttgtcacccaggctggaggctggagtacaatggcacaatttctgctcactgtaacctccgcctcccaggttcaagcaattctcctgcctcaggctcccaagtagctgggattacaggcacctgccaccacgcctggctaatttttgcttttttagtagagtcggggtttcaccatgttggtcaggctggtcttgaactcctgaccccagctgatccacccgccttggcctcccaaagtgctgggattacaggcatgagctaccactcaaggccaggacctgctcagaggtatttacgggacacaaagatgagttaagaccaggtgtctctccatggcaacactcagagaagagcctcttacctccaggattccttacctgtggctgctcttacaaagtaccacaaactgggtgattcaaaaacaacaaatttattctctcacaattctggaggcctgaagttcaaactcaaggggtcagcagggccgtgctgcctctgaaggcttcagggaaggatcttcccttgcttttccagcttctggtggctcctggtattacctggcttgtggcaacataactccagtcgctgctgcctccatcttccatggccctcttacaaggacaccagtcattgagtttagggcccgcacaatccagtatgattttatcttaagtagttgcatctgcaaagactacataaagttccatgttgaggtttcagacagacatgaattttagggggcaggggagggacattcttcaacccagtattcctgtaaggagaagtacaaagaaggaggtgattgatccttcccagatggggatgagtacaggcgtgagtcgccgcatccagccaagtgaggaagttttaacagaacatagactgcagggcgtggccctgcaggctgtgcagacaggtaaggaacaggaggagaagccggccaggacaagagattggacagaagcaaggagcacaggccagaaaggagctgcagtggggccagactcagaggcaaggcagggggcgacagggactgtacaagagaccaaatcccacaggacctcctagtggaataaggagccgagctttcccttacaggctgtggggggtttgcccaccttgcccatggcaaagccttcttcggtctgtgattctgttctgttgtcacttgtcatccctgagcagcacaggagttgcacctgtcctcccaggtctcccagggccccctatgccactctcattatctcactgatcatcctacactacagtgacttgatctccagcctgcctttccaccacattgtgagcagcttgaagaagagccatgtcttgttcatctttatgtatctggagctgagcacacttggtacacactatgtgcaagtacctaaaacatttaaataactagcttaatggtcagccagtgattttaagcatgagagtgactttcaaacaattggaaccaacgctctcaactcctgaggtatccaaaggggctcctatgaaaaccaggaggaatgttctttacaggcgactttttgcacaaaacagaactaagcttcagcatcccaccaggaaagtttgcttctctgaccccctccactccctaagactggtgtttcactaccttgtgttttatattgaacctcaccaaatgctaacttgcactgagctatgccttccggattcttttactaggcagctgcactggttcatatctacacagatgggtctgtgttggtcacacatggaagcaatgaactgggacaaggtattcacaccaaaatgctacaggtaaaataaataaaattaaaccattattctctatatacattgttgaaagttaggattcatctattagggtaaatgttgactccctgtattcaaacactgagatcttgactatttagttggacggcttcttacatatcaaatagaatgtagaatggctgaggtggcagaaatcccacgtgtatgcagacagtcctggagcttggccagggttcatggatggggtgatcattagtgaaaacgccactaagaaacccatggagccctgtggtgggagatccaagcaggcaaccaggagcaggagtttctcagctagttttaatgtttacattttagacaacaatattaggttgctaatgttttattttgacaagtaagaacaagtatttcatcaactgccatcatcctacaatttttataagatatttaacacacatacatacacaccaattagtacgaatataatctcaggagaaaaacaagaataattctttaaataaccctgtgacaaatgtattagatttctatagcgcattagatttctatagcgcacatctgtagcttttgactatccagccccttagctcatttggagtactgtacctctcacatgccatatattcctgaaagactcctcaatttggatacctttcagctccatccccatccttactcccacgcctgctgcagatataggcacaagacccgcctctggtcagtcagggttccggaatcccactgactctgggaaaggacacatgattcaagcaaggccactcagagcctttcctgggactgacgtgtagatgctgggagaaaggagccatctttcccctgtggctgtttaggtactatactatagggcaggggctgccacaggcagttctgtgccatggatggaaccggccatcgtagaaagaaaagcaaatgtgagaggctgagaggagaccctgacgagaccacaaagcccctagatacacatgtacttcacactagctccatctatcctgcccagttatatgaaccaacaaattccctttggattttcaccacccagaaacaacaaagtcatccctttttttcattttgcttctttctggagaaacttcatattgaatgacattagtcagaagattagcatttgagaacgggatatcatgagaaggtgttttttgcaaacacaaaaagacaagagaagccaaaataatgttttttcctttccctttcttctttttcatctctttccttgtcatttcttgattaaatatcttcatctccacatgtgtttgctagagaaactggaaggaaaagagcagaaaagaagccaggtgcagtggcatgcacctgtagtcccagctactcaggaggctgaagcaggaggatcacttgagtccaggagttcaagatcagcctggacaacacagtgagaccccatctctaaaataataataataatcttttaaaaattatttttaagaaccagaaaaaatgaacagcaaatactggaggaatataagcaagggaaaacaaatagaaaacagagggggaggataagagcaagaaaaaggtcctcagggtcattccaagttcatctgatactgatatcgaaagatttcagaccaaattctgagccagtctcatctcagtctcccctctttctctctctctctctcttcctctctctctctctctccctccatccctctttttcttcctgccactgaaccaaataagtgcctgaaaatctcaatttggcctacttcctacacatctaaaacttagaaaaaaggaaattcttaacattctaaacggactcaatttgaaaagaaccactgtggaatattaccaagaaaacgctgtaaaaatgagcatgaggccttacaaaaaaagtagttttgatgcttataaagtacattattttagtcttaaaagggtaccatggatgtaataacaaataatttttattaagaaaaataatgattcaaatcttcatagaagtccttgctggacttgaaaatatttatgtttctcataggtggccagccatgagctaaaaatacccatgtcctatatgcacatctgtgaaacgagcacagcaacagtgcccaatacaattgctacagcagcgtctatcggtgcagatgtcaacggcagagctgtgcaggtgagtcttcctgtctctccttggtgtgcctctcccacatccctggtttttatgactagatacaggtacaatagttgacttcagagaagtcatctgtgtcactacacatagtctgaggtaactaaaatgttgggagagtgtatttggagtaggctaaattgagatgacagacccaaaatgtaaaggctcaaacacagtaaaagtccctttcttgtacacatatcagtcccgagcattgtttggtcattcgagcacccaaattgatggaggctccaccatcttcaacatgtggtgtgccaagttgccctgggtgtcatcattccagtgagcatggaggagccggtgtggaagactctgagccagatctggaagtgatgcaagtcatttccacacacagtccattagcagaaccagtttcgggctatgtctaactgcaacggaggttgggaaatgtagaatagtgggaaaccgtatgtccagctgctatggaagaaggagagaatggattttggtgaacaggcagtctctgttcctaggagacacagcaagaagaaatttggctaccaagtaatgcagagctgtgcaagtttcctccagcataaacaagtgcttgcaggcagataggcaggcagaccccagccaaggagacagggtgcaatagaagcattgtcttcagtggtattctaccgagtacttagagcttttctttgtacttattttttaactgaatttttttaaattgctaaattttcactgtctcagaatagaatcatgacttcatattccttaattcaaatatctgattgcatgtacttttgaaatatatctatttgtcatgtttctgttgcaaactgttcacttttccactgggatattgtggtgagccatattttcccagaatgctgcaatgataccaccaacaggaacccctttcaaatcagtcctaattttgtggtgatacctcttaaggaatcaaaaagcaaacactcttttttgctcagaacaaatgtgtaagaaacctcaaatgcatgagatctaatttggagtagggtcaaacacaagagaggaacagctcagagtgtatgggagttgtcagcccaaaataagtgtcaatccatcttctagagtattaagttttaggtttctgttaaagatcagaaaatttgtggtctaggtcattataaagtaaatttaattgttttctcatttcatacccaaagccaaggactttgttgtagtagtttgatggtggtcgaatgaacagatggagggagagatcagacacagggggattctggcatgtcattgttacagactggaaagcacaaattttaatgaaaataggatgtttattccatttattttaatagccataaaatacaaaagaaatggtcgggtgcagtggctcacgccgtaatcccagcactttggaaggtcaaggtgggcagatcacgaggtcaggaaatcgagaccatcctgcccaacatggtgaaacctcgcctctactaaaatacaaaaaattagccaggcatggtactgcgcgcctgtagtcccagctacttgggaggctgaggcaggggaatcacttgaacccaggttgcaatgagctgagatcgtgccactacactccagcctggcgacagagcaagactccatctcaaaaaaaaaaaaaaagaaatatacaaatatacaaaagatgtaggaaaaaaatgctaaaggccaggcacagtggctcatgcctgtaatcctagcactttgggaggctgaagtaggcagatggctcgagctcaggagttcaagaccatcctggtcaacatggtgaaactctatctctacaaagaagacaaaaatcagccaggcttggtggtgagtgcctggagtcccagttactcaagagactgaggtggaaagattgcttgagcccagatgttgaagttgcagtgagccaagatggtgccactgcactccagcctggttgacagagtgagaccctgtctcaaaaaaacaaaccaaaagaaaagagagagagagagagaagttaagaacctgaatattctaagaaagaggttctgagagtagaaattcagctgaacccatattttcacaggaagtgagccaagaaggggaaaaaataacctccagtaactgatactgttatcaagggcaggagttgtgttaccgatttttcaggatcacgcactccatagcacttgctgacctaatcagtgaacatttgttcacacaaatggtaaccaccagaaccactgggctcttctctaatgtggattccattctttactacttcaagaatgcttgtcagatccttctgaaacgccttgagcccatcattaagaaacatccggaaggtaaatgggaagactgggtaagtgttccactccctttgaaatgagaaaacaatgtaaaccagtactcagacagcaccacagcatgcacagccatcacacacagagacagttcctctaagtgtcacagtgatggagcatgccccctgtttcttccccagttgaatggatttctgcaaataggcaggatctctaaaggttgagaaggctactccaggatgtataccaggtgtgtatggagaaagcacacaggaaacagcaatcactagaaggagaaatagaagtgtatgaagaatacactctgctcaagtaagaaataagaggaaaagaatgagccttcctaagccacacacacacacatacacacacacacatgcaagcacgatgttttgggtaggttaggaggaaaactaaaaggcctatttgctcttgaatatggctcaaaggagatgactaagttaatccaactttacaatatcctgtgacttttttcattggagcaattatttcacatttacacacacgcttactgtaaagttctaacatttagaaatgaagtccaaataccttgtgcactgagtccctatctcatggatgtgcagcaggattctattttatgtttgttcaatccagacttctaaactcaatcagaaggaaattgttagtgtgccaattaaggaaaaataatatgatgacgagttctattattggtagcaaagcaccagcaacaattatgagatgtcaattttagattggacatttctgttttcacctagcagatggtatatttgtttcgctttaactaaatatgcccattctgcagatagaagctgcatttgaacaaagaatcagtctctcagccactggatgcttcaggtaaacatcacaataatatcttgacgtagctaagaaaataagaggtaactcaatcactgttgatggctgttgtaatactttggttcttgtcgtcttagtttaaaagaatttaaacaagagacacagcaaagcaaaacaacaacaacaacaaaaagagacacacagcaaaagatgtgcagcatagagtaatttattgcaaaaaaaaaaaaagaatattttgaaaatgaggtgcagagtagacagtacaccctgagagagaattcagggcaggctgtccgtaaggatgagacagcaaaaactggtattgcggacgctccctttatggggatcttacatgattattcatattggtgggaagaggtgttactagtaagcacgttctggatggtcttctgggtgcacatgtgcagctgtacatgcgtgttcatacatcacatgtctcattagtatcttaaatctccacccagaggtgtgttttttactattaaaataatttgattttacctgaggacaggtaaaatcaaagtgtgcatgccctctacaggggaaattccctactgaagataactttgtttgaatgagtgcgattacaatggaaatgctgaagctttcgtgttgattgtgccgtcaccacagtgctggtgctgcgtccagagaacgtggtcactttcttgactatctatgctgcctcaactctgggccgcaggtccctcatttgtaaaatacatttttattgtatgattgctgaggtcccttctaggcccaaaattctatgatttcacataggcctttcagttatgtccaaaaaaaaaattaaacaataaaacacccttattggggaaaaaaattagatgcttgacttacaacagctaatccttataatcattatttactatttatttaatcattacttacaatatctaatcattatttactattctttatcatgaatagtaaaaatatattatcattagaaatgacttgcatctcaattttacaaatctccctccttttaccataaaacctgtctattttgaagctccgtactagacaagggagaatgggtggatgataatcaccagtcattgtcaaattcaaaaagcatgtgacattagttttacagtctaatgaaacaaaccaccaaacaatagatacacacacacacacacacagagaacagtaaagcaaatcctcatgaagaatgaggaaataaggaggtaacagcccagcctagagccttgtacctaatgagttctaaattcctaagttcagttacctaagaagagagcaaaccagccctctatctgaatatatcttctattataaattaatgcattgaattaccagtccttttttaccaaccctgaattaccatcagctccctgtgagtttggttagcactatccatggggtccctttgggaagagtggtcccagggggactactgataaaattcaactgaggttctcagtgggcaggcaggctaaagctcaaatcctttgtggtcaagatacaggcacactgtgaggtccggtcccaaacaatctattggcttctccctctttttgacatcctaactgtggcacaaggaatgtcctctttaaatgagtttaaaaggcaattgaaatgaacataaatcaaatgaaatgctgtacttacctggcaggggagatactgtgattctgaaggtggttttcctagagtgaggcttatcttacctattttactccagaaatgctgacccctgtgatttccccaaatgtaggaaactcaactgcataatttatgataatgggagactgtatttgtgccctccctggcaaaaaaagaaaacgaaacactaccataaaaccttggtaacttttaaaataaatcaacattctatctccccagctcaagctaaaaggctttatttcttctgtcaggggctacaaggccttcatggactgggagaagggggtgggggacccatttccttactatgtctgcagagctgcctgttctgaggttgaaattgactgcctgacaggtgctcacaaggtaagtcaagtctaactttcctcttggcaaatcaaaacaacaaaagtgtgttgtatagtaaatagcccaattccattatgtaattctcttataacaagaacaagattctttcaattccatgggagggtccagagatctagccttatcctgaatttccacttaaaaagacaatatagtagtcaaaaatgaattgctgatgacagtctaaaatgtattaaatttcttatttcatttagacaacaaaatcactttccaagatttctcccccaaaaaagcttctatttataaagaaaaaacacattttctaatctgaaggaataactaacttagtaaatagtcttgagcaaacattttgaaagcacatagcaatgtgctgtttctccaaagtcaattatccaaaaagtattactggaacagattttgggggaagagaggtattaaaataattgttacattttctatttaattgaacagccaagaaaccacacattggagacagggaatcatacttaacccaaaattaacaacttgcattataaaggatgcaattttacccaagggccttggaataaatccctaaagatatgaaacttatgaggatcttccagaatttatgatgctagaaaagtcaaaatgtggtcttttctgtgcctttcagtttacatttacagtttaaggttcaataatttcagtatcactttgatcccttaaaatagtttatttcttaaagaggcaaaacttcttttaactaaagagaaatcagagaaattcagtgacaggcctgttgcagctggccatttgtggttggtgaactaaatcatccatcaactcagtgttagtgcacagccatctctttccactgtccagcacttatagtgcaaaacacaccaggtttcaaggtagaagtaaactgaaggcccactctgaggtgtgtccaatctccctccctatccaggttgaggatagatgaaggctggtcccaatgcccagagtaggttgtccaagaggccaaggtttgagtcaaaagagaattgccaagtccaaaaggctagatagaaagtaggagcccaggtattgagcccaaacagagaatgatgatcttgtcagagcaagcactgggaaatggggggcagaagggaagccctgagacactccggagataggccacaggcacttaggggcttttagtggctccttaataacctgcaggcccatgcccagtgccaaaacaagggccagattcatgtgatgcttctcagagaaggaagtagattagcaaatcaaaggtggtctcaacatttgccatgaataccttccaagatcttgcaaatccacaaactcatacatgccagtatggctctaggattttcacagtaaaatggcaatagtaccacctgccacagattatcatgaggactacatgagctcataaattatattccaacaacaaattcaggttgagaatcagatgaacaaccaggcacaacaattatttaccaagtgactcactcagacacactagcatgtcatggactttggagtcacttaagaggagtcaaaaccatgaatgtacaagatcttccagggtcatggacagtcctggcactaaatttgaagagttcagcaggcatcttaacagctctaatgttgacagggttcaatgcagtgttaattagccagcaggagttctggaaaaactggagatcatttgagtatacctgaaaatgatacttttaattcaaatttttatggtgaggtaatttttattttgggcagaaaatcagaacggacatcatcatggatgcatgttgcagcctaaatccagccattgatattgggcaggtaggtgctggcccatctgggcagatgccccttcctgggagtcatttcagggtaggtaaaggccttctaaaaatgacacaatgtcacaaagcttgaaattgtccccctccagattgaaggtttgtttattcagggaatggggctttataccactgaagaactgaaatattccccagaaggtgtcctgtactctcggagcccagatgagtacaaaattccaaccatcactgatgtcccagaggagttcaatgtctccttgctgccatcatcacaaaccccactaaccatctattcgtctaaggtaagcatccaaacctaccactgcacggtgtcatggatcgggtagcacaggacagatgaaagcaggtggacaaaatagtaaatcaatgttaactgttatcaggaacaaatcattatagactgctagaatttggagatgactcacccatggcaatcgtgagccaagaattttaataatttcctctttcactgaaaactctaaaactcgccaaaaagctttgacttcttaatagaataacacttttacttaagaccctgaagactataatattaaacaggattggaggcgcaatgcgactgaaatcctagcagtggcagcatggacagaaccctggactgaggtcgcagaagacctgcgttcctgccacagccctatcccctccccatggtcttaggcaaatcactcacctctgaggggctcagggtcctcaccatacccagaaatgcatctagaacagtggttctcaactgggagtgggggaagtgggggaagtgattttgtacaaggcagcccccgaccccattacaaagaattatctggcacaaaatgttactagcatcagaaagcaaagacatcaacccttaataattgctaaagtaatgaaactgcaaattaaaataaagatcattatttgtttgccttgctctatgcagattacgtgaaaaccaccctcagagtaagaacttcatctagggttgagatgtattgttaaagtttcttgactcctcttaagatattaaaatctttcctggccatggtggtgcacatctatagctccagctactcaggaggctgaagcaggggattgcttgagcccaggaattcaagaccagcctgggtaatcaataaataagatcttttgggagacttcttgctagtacccatcctccaaaaaaaaaaaaaaagtatccaactccatctgtagaaatttcatcatgtccaaactggatcccactgtcagcccaggaacaccaggaacttcctctagacctatagtgatgaggtcagggcaaacctgaaaggaaggacaatcaatggggcctttggattctcatcgaactggaaatcactctaaggggaaaaggcaaaagggagctaagagcccacagagagcagcttttaagccaccaagagtaacacagggcagaaaggactcttgagtccttgtagttgcagacagccactcacaagcagacactcaggaaaatcatgggtttgcaggtcccacatggagggtactatgtagaaacaacagagagctaccaggcaccgggagctgtgctaggtgcttttgcgtttcctgatccttgcaacacccaataaagttggcatcactgcccacacttcactgacaaaggaacagaggagattatctcacttacccagagaaacatggggagtaagggccaggattcagactcagtctcactaacttaagggtcacaaattggtggtctactggctaaatctagcctgaagatgtacttttctttggcctacacagtgtttttacaagtcagggaattttactttaaaatacagatatctaaattctcttgagaaaatggatgatctggtaattttggctgcattcttggaaaggcaacaactaactacaaccaaagaacagctgcccttatagacaggacatgggggtgctcttcctcaccttactttccactgctccttattgtccttcatctgcctgcatcactcattgacaatacctgcctgttccttgcagatgatgggtttacaacctttcatctggtatcaaagtctgtactctttcttctagagtaccctgcctatcctgaccctgaagttaaaaaaggcatttttctctctgctgataaaactggctagttcaatccattgaatgtgttttactaaatagggtactttcccattaccacgcaaagacactcatacacacacacatacacacatacatacctttcctagggaacaaaatttaacccagacgggattcaagatctgggaaattcagattatgctgggactttttttctttgtctttgcttttttttttttgagatgtaatcttgctctgtcacccaactggagtgcaatggcattatcttggctcactgcaacctccaactcccgggttcaagcaattcttctgcctcagtctcccaaatagctaggactacagacgcgcaccaccacgcccagctaatttttgtatttttagtagagacggggtttcaccatgttgggcaggatggtcttgatctcttgacctcatgatccatccgcctcggcctcccaaagtgctaggattacaggcgtgagccaccaagcccagcctatgctgggatttttaagactactcaagcttctgattcagtcagtaagtcagccaacaaacatttattgagaagattttgtgtacaaaacactgtgcaggggttggggacacaatggtgaacgagacctggcccctaccctctagaaacttgtagtgtagtatggaagtttcttaaaccaatgtgccttcttacagggcctcggggagtctgggatgttcctggggtcatctgtgttctttgccattgctgacgctgtggccgcagtgcgaagagaaagagacatagctgaggacttcacggtgaagagcccagcaacgccagaatgggttcgaatggcctgtgcagatcgattcacagaaatggtaggaaattgtttattttcctaaaaggtgatttgtctatttcctgcttcttagacctcttgggtaaatgtataacctaagctgtgtctagctaatcaaattatgaaatgaaaaaagcaaatcacacaaatacaccttgtatacatgtagtaattttaacttttaaaaaagtatttcccaagtgttaatttgatcatcttagcaaccctgaagtatgataatttattaatatcatgctgcagccaggcacggtggctcacacaagtaatcccagtactttgggaggccaaggtgggcggatcacgaggtcaggagatcgagaccacctggctaactcggtgaaaccccgtctctactaaaaatacaaaaaattagccaggcatggtggcacgcacctgtagtcccagctactcaggaggctgaggcaggagaatcgcttgaacccaggaggcagagattgcagtgagccaagatcacgccactgcactccagcctggcgaagagtgagactccgtctcaaaaaaataaaaaataaaaataaaaagtatatatattaaaaatgctgcaaaaactaatagctaaatggaaaggaactgactgatttctccaaacagtggttaagtattccctccctctatcctaccaactccatcctgcccttcaacaaaaacaaacacacacatacagaaatccatgtgtcatatagccatatttgataatgtcactttctgtgttccctatacagagagtatacacagactgcctgtcatttagaagtagggtgatcccattgcaagctactgcctttctccttcattctgtttcataccaatgcctccaagcccgggagagggaggcctagggagttatccatggggatacacacatggcaaatcccacctgctgaaggttacagataagcaacttcccagaggtcatcgagcctcgcctttgccaatttcctaagcatcctaatttaagtaataccaggtagcattacgtgactgagcaccaaactaaacattttacacgtattagtcattacagcaactctatcaggtaactgctggtattttcttcattttactattgaggaaataggtgcaataactttcccaagatcacacacctagcatttgggggccaagattcaaacccaggctgcctggcttcactataatatatggtctctcagagagaaaagagttgattctccacttcttaaaaggcaatttctattttcaaatctatattaaaagaagcccaaatacttaactgacctcttcaaaataaccaaccatagagtgaaaagatcttatagaaatattgcttaaaaggaagtgtcataattattaatttccttcccctacataacctattcctatttccatcttcaaatctaactcaacaatatttcttatactccaataataccagtcaccctgtaatttccctccaagtcttctcccagtctatggatctgaccctcatctgattccattgtctacagcaatgattacaatcacctgcctctggacagatgccctcctcagatgggcagggccgggaaaccagcaccctccacccactccaggaactcctctgtgcggatcttggcctagaggtcagtcatctgtccgttcctgactctgctggtgacgtgatcactgtagaatggtgtcatctcataccccaaaagcataagcacttctgacctttaaaaaatgttcttattcacattttgcaataataaataccctcttctggaatggggcagattaagaaaactaaaaaacacaaaaaacaaaaatatacttctaatcttcctttcttgcctgaggttaatgttttcagtcttccaatggtctggctcctagaaaatgaattccttcatgtctaagatttcaggctgttttgaatagtccagttgtctggcaaagtagctctgtcacatacaatggtaagaagtgaaacactttgatttcatttaccatttgggacttagcttcttagctacctggtccatatgatgaaaccatattttctctcaagtctgatggttccttgataagactaacatatctttgcagatataaatcatctactaatttgtgcccatcaatcaaatgctcaatgttagaataacctagcattttctaaaatactcgtagataaatggtttataaatatcacttcatgttataacctatgtttgctattttagacctccttttaataacatacattgcatttcgtctttgtaaaagtaacatatgtccgttactgaaaaattagaaaatgctgaaaagaataaggtgaagttaaaatcagccataatcccaccaaccagaactaactataaccatgttttggagtgtgagcgtgcatgtgtgtgtgtgtgtgtgtacatttttaaccatcctttaatttatatgtttatatgtacaatatatcttatttgtaaactcatttaataaaatcaggatatccctgacgtaagtcttgaaaagatttgaacagtataattgggaatgactctgctgagcctcagtcacagaaaaatctggattgggaatttcatgggaaaagtatcccatgaagcatcactcaaaaaatagttgcttaaacacaaaaagagaatacctggccaaactcgtttatcctacaactcttaatctttgtctatagctactggaataaatttgaggggtgagggcaggacagaatgtttaacttttcaataataagccccttgttattaaggctacttagaccatatggagaatgatcatttatgctttttttttttcttttggagacagggtcttgctctgttgcccaggctggagtgcagtgttgcaatctcagctcactgcaccctctacctcccaggttcaagtgattctcctgcctcagcctcctaagtagctaggattacaggggtgtaccaccatgcccagctaattttggtatttttagtagagatggggtttcaccatgttggccaggctggcctggaactcctgtcctcatgattcgcccacctcagccttccacagtgctgggattacaggcatgagccaccgtgactggccataatcatttatccttcatactgataattacctacaatattcctaaccattgcactgacctcacatgtatttgaaacaatgaaaagaaagccctctccaaatacatgagaagacttcagttagtttgttcgagcctccagaccctgtctcctcaactgttcaccaacagagagaaggggctggttagaagccagccttgattgggacctcccaaggagtgcagagaggaggaagtcctgggtcttagtttaacagaggccaagaaacacacaaaatttagattcttctactattacctgttgcaggaaatggcaatactcatctatctatacagaaacataaacaagaaacccaggagccatcctggcatttctctccctcatactcagtagctagtccttcaccatgtcctgttcattttcacccccaacaatttcttgacccagtccattttctccatccttaaccactatattattcattcatcccacaaacagatgttgagcatctaatgtgtgccaggcattgttctacagaacaattctggggctacagtagtgaatgaaacagagaccccctaccttggtggagtttagtttctggtgaccctgaagctacctaccatctctccaccctggatcaaagctgcctcctggctgatctctctacaccccctgcagccagaagcttgtggtgtggcaaagcagaccatgccacaccagcacacacattggcaaaaagcttccctttgctcataggagacagaaaacttcttaacttgccttcttgagcctacaaaccttcagagtccagcatggccaaccccacccacctctccagccacccatgaccccacccagccacacttgtcttcttctgtcattcctcatgttaaggacagagacgctcactcctgctttagggcctctgccatgctcttccttctccttggaaccatcttcttctgttcaacttgttaactcctactcagctttaatcaaattcaacaaattcatttgatcccttcctttctgcatagtttgaggtcccaggaatataaggtccctgctctcaaggcatttatagtctagcagggaaggaagacagtgactgtgaattataagtgcttggctgaccctggggtatactactacatcccacagaataaaacctttctgacttagcctcgctcttttcttgaagtcagaggggtcatagatgggatcccactttggttactcgtcatgcaattgttcatttatctaacatatttattgagtaccttccatgtgccaggcactgctggggaactaaaaaaatagtggtgagcaaggcaatctctgccggcatagagcttacattctgtgggggaagccagacagtaagcaagtaaacaaacgcacaatataattgcaagcagtattgaatactgtgaaggaaaattgaagagaagggagctagaaagtgatggagagattatttgattatagtttcttggggaagttccctctgagagtgttcacatttgagccaaagcctgaatgaagcaagggaccaagtataaagctggcaatgatacagtccaggccaagaacagctcatgcaaaggccctgcagcttcagaagaatcaaagccacttgggactaagcagccctcaaaagtggcccttttgtgtctgatttgcccctctggtagaaaagtgtctgatttgcctctctggtagaaaaatcttacaattgttgttctccatggctgagagataaaatagaatttgtggccacaccatttattttcacatcagcgagtgaaacctggatagtccttcttccaatcagcaactttcctagtctttatcatatgctttatcacacttcaggtctacttctttagatctttagtgactataattaattcatccccttagaagccacagcaggcctcctgaagttcttatagcctggctgctcacacagaccaatttctaaagcatcttagaacaaatctgaccccatatcagaatttactcttttttttttttgagacagagtctctgtttcccaggctggagtgcagtggtgcagttttggctcactgcagcctccgcctccaggattcaagcgattctcctgcgtcagcctcctgagtagctgggattacaggtgcacgccaccacgcccggctaatctttgtattttcagtagagacagggtttcaccatgttggttatgtctcaaactcttgacttcgtgatccacctgcctcagcttcccaaagtgctgagattacaggcatgaaccaccgtgccagccagaatttacatttttaatacatttgatcaaattacaacatggtttttaattgaaatatataatgattcacactggtacacaatgctgtactatgcaaatgtgtatatagaaagagagaaagaataagaaacatatatattaacagtctttgcattgggcctttgaatgcccttgtcaaaacacaatttgttctaatgaataagaaggtcagggagtcagagtgtctgtatactagagcatgagtattgaaaagttcaagacctcctcttttaataacctccttatagccataaggtaaataacagcccgactagatctatttcttaaatagaaatgatggtaaaacactcagtacttttccctcggaattaaataaaataatgcatgtaaaaatactgtgtaaatatgagtcactctgtaaatattagtgttaaggtcatcaccaaaaacccataaactgttaatgaccttcttcaaaatatgcctctcccaaaaggcttgaaaagtgtttccacattaaatcaagttgacctgctgaggccagaataaacaacaactcttctaactagcagcttcattttcatgggtaaattagcttcaaaaaaggcaggcattggtaagaagcctaaggcatgtttgttaccaaaaaaatcatactgtatgaatgagcatttactatgtcaaaaggttttttttttttttttaacatgtttgggtttgtttaaccttaatcacagcctaatgctggctgccatttttgcatggctgtttctcaggtggttaatttctggtgaggacagtgttgctggtttctactctgagcccagcaggtcagtccggctcaactaggcgtggccagaaacatcatctctatgtaatttccttttcggtgatgggagaaagaaaaatatgtatttcctggaaaatgtgttttgtacagtcatcttaaattccacaaggggaaaaaagtaaacttcctttaaagatatacatatttaacactttcatatgaggacttctccttagaaacagtgatttcatttaaaaaaaatatatatttaggattcagagacatgaagggttccataccctcaaaaattagaaaaatactgccttggagaatgtggaataggcagacattttttacatgttatcttaatatcaccaacagcaaaacgttatttattgagtaatcaccaaatgtggtctatgtgggctgccatagtgggaggccatgtagagccaattaacagcttcagtttccatctcctggaagttaaaatcagacacctcagcttggaaacaggtttataagcaggtttcagcttaccccacttctgaaggggcagcctggaacacgctgactcataagaaatctttgcaatcataacaaatggctcatgtcctgcgttaggctgacgcatgatcttatcgtaccctagtgggaaaagtccttcattcttagatcagtcctcagttccaaatggccatgcctgtccttcatagaatctgctattctatgagactgaccaatggctagtttctaacggccttcaccttcttcctacgccgcaaaccctaatacagtctccatccacggactcccctcctttacagcactgcgtctctcacatccccacgtctcattttccctccctgcttcttttgcatttctagatgcccagactcagtgagaactggcagcattaaaagcgccacctgtttagttcagtatctggagcccttcctccctgctgaaggaggagaggcacgtgaacattttgcatgctgccagacgcctggtttacccactcctctcgggcagttcactcccaaacactagccgttcaagatgaagcctgctcaaccccatactctatacacagccctggatttctctgagctgggggagacatctaccagccctacaagactgtattctatttcttggggctcatttaccacaacatgtgaaaacatgaaatctccagcctgttcagctataatctcagctacagataattggtagggccttagaccagcacggacatgcttcggtcacctggattccttgagatggaacacagagcagactgcacggctcaggacagactgagagtagagtctcccatggtgtcttcctcagaatgctcaacctattgacctgttcccatgagacacatacacatacatgcatgcatgtactcacacagacacgcatgtacgcacacagacacacatgcacacgcacactcagacaggcatgtactcattcttaaccacattcttctagcctctcatgctgtcttggaagaggttttattggctgtgaaactgattccacattgaatatgtttgtcccaggatgcaggaactgaatcatttccctgcaatgcttggtgacatttcacagagtagccattcttactcctgaagggagagtctctgatactgttattgaatgtatatttttgtatctaaaaactctcctatgtgatctcttcctccttaggtttgtaggagcagaggaaagggagagatagggagaacacctaaaagggaagaggcaaaagctggaggcattcctcagtttaagggaggaaataagagatgcagaatataaaacaggagaaaagagagccatctcatcctgccaaggagaagagttacaatgaactattttagcttagtgcttgagacaggccctgagtagagtgaatctgggtttcaattccagctctactttttttttgagatggagtcttgctctgtcacccaggctggagtgcagtggcacaatctcggctcactgcaaccaccgcctcccaggttaaagtgatcctcccacctcggcctcccgagtagctgggactacaggtgcacaccaccatacccagctagtttttgtattttttgtagagacaaggtttcaccatgttgcccaggctggtgtcaaactcctgagctcaagcgatctgcccacctcagcctcccaaagtgcagggattacaggcatgaggcacaggacccagccccagctctacctctgatgctttatttaagttctctgatcactcagttttcttatctataaaatgagggagaggtggggtagtggagagaataactctagttactttacaggattgttgtgagaattgaataagataatactaaagcagttggcagttgttgcacatagtaaatggtcaatacatattgatgatgatgatggtgaagatgattgagtcagggatccctaagaccacccttaggtttaaagattcgctagaagtggccaggcacagaggctcttgcctgtaaccccagcactttggaaggctgaggcaggaggatcacttgagatcagaagttcaagatcagcctgggcaacacagcgagacagataattggcagggccttagaccagcacggacatgcttcagtcacctggattccttgagatggaacatagatcagactgcatggctcaggacagactgagagtagagtctcccatggtgtcttcctcagaatgctcaacctattgacctgttcccatgagacacacacacatacatgcatgcatgtactcacacagacatgcatgtacgcacacagacacacatgcacgcacacactcagacaggcatgtactcattcttaaccacattcttctagcctctcatgctgtcttggaagaggttttattggctgtgaaactggttccacattgaatacgtttgtcccaggatgcaggaactgaattatttccctgcaatgcttgatgacatttcacagagtagccattcttactcctaaagagagagtctctgatactgttattgaatgtatatttgtgtctctaccaaaacccaaaaaaattagccaggcatggtagcgcatgcctatagtcccagctactcaggaggctaaggttggaggatcgcctgagcccaggaatttgaggctgcagtgagcttgattgtgccactgcactccagcctgggtgatagagcaggaccctgtctttaaaaaaaaaaaaaaaaaaaagagagactaaaaattccataactttagcagaatagtagacccaaatctgccacagctaaactgaggaattttgccctgtgtccagcccagaccttgcagaacaggctcattctaaagaagagagccaagaagctcccacagggacagctaagaagagaatagggaaggccctttgggaaggcaaacccttcgtttacatttcaatacagagggcaaaaagtaagaatagaatttaggaaaatgtcctgaatggtagactggtgggtgaattatttggcttctttttgtatttttgtgaaataaatacatattaggaggggggagaaagctttttggaaccttcatagctttccatcattggggaaaagcttgctttgctttttaacacatttgtaactaaaagccaacacttcaaacaaaaacgtagcaggggagaggagagatgtgtgttctgctttgggcttgaacctaaggggaagaattccccaaagaggagacaggcattgaggaccacgaaaaaggatgaataattctcggagctt

SEQ ID NO: 589 - DNA, 2946 bp, Homo sapiens
ggactgacaataggcgctggctgcagcctggcccagatgcaggacatcttggctgagagggtagctgagctcccagaggagaaaacacagacgtactgagccctcctgaagcacctgaggagtctggcaggccagcagatccggaatatggcgtccttaggggggcatgtgataagccggcattgctattcggacctgaatccaattcttgctgtgggcaatgctaccctcaatctgatttcagcagaaggtacgcggcggattcctctaaatgaacattttcttgctgggttggcaagtgcagaccttaagccagaggaaattttggaatctgtgcatatcccgcactctcaaaagtgggaatttgtgtcagccttccgacaggctcaatgccagcagaatgccttgccccacgtgaatgccggcatgcgagtccttctcaaagaaggcacagacagcattgaggacctgagcatcgcctatggaggggtgggggctgccaccatcagtgcacacagatcctgctagcagctccttgggaggtgctggaatgagctgttgctggatgaggcttgcaggctgcttctggatgaagtctcgctcccaggctcagccccgggtggccgggtggaattcaagaggatgaggaccctagtcgtcagcttcctcttcaaattctacctagaggttctgcaggaactgaagggtggcttgaggatcagattccaagcagtcagtccaggtcctcattatgtggagggaggaggggaacaagaaacattcataaaacatgaagccggggcaggcagtatggatcctggttatgcacactatgctggatacattagccaaagtgtggatcctcaccagcctctccaagacccagttggacaccctatcatgcacctgtcagctcttaaacatgccactggggaagccatgttttgtgatgacattcccatggtggataaagaacttttcatggctttggtgaccagtagcagggctcatgcaaaaatcatatcaattgatgtgtccaaggcccttgaactacccgaagtggttgatgtgataacagctgaagacattccaggcaccaatggcgctgaaggtgacaaattgctggctgtagataaggtagtctgtgtgggccagatcatctgtgctgtggttgcagaaacagacgtacaggcaaaacgagcagctgaaaagataaagctcacctatgaagatctggaacctgtaatcttcaccatcaagaaaacagtgtcctctactttaaacatccccatcaacaggatcacctgtcatgtaaaacgagtgggtggaggttttggagggaaggtaggaaagccagctgtattcggggctattgcagctgtgggtgctatcaaaactggtcaccccattcgtctcatccttgatcgtgaagatgatatgctaataactggaggaaggcatccattatttggaaaatataaagtaggattcatgaacaacgggcggatcaaagctctagacattgagtgctacattaacggaggatgcacgctggatgactctgagctggtaacagaatttctaatactaaagctggaaaatgcatataaaattcgcaacctgttcaggttccagggccgtgcatgcatgacaaatttaccatccaatacggcctttcgtggatttggcttcccacaaggagccctagtaacagaatcttgcatcacagctgtggcagccaaatgtggccttccaccagaaaagcttgtgctttcgtggagaggtttttcaagtctctatttggccatcagtttctgccttaccataactactgaatttcccacctgtttcagattagagagaaaaatatgtacaaaacatatctacagatatgtagataaacatatctacagatatgtagataaacatatctacagatatgtagataaaaccatctacaaacaagcattcaaccctgagaccctgataagatgttggaatgagtgtctagacaagtcttcctttcacagcagaagaatgcaagtcgaagagttcaataagaagaattattggaagaagaaaggcattgctattattcccatgaagttttcagttggctttgctgcaacaagctaccatcaggcagctgcactggttcatatctacacagatgggtctgtgttggtcacacatggaagcaatgaactgggacaaggtattcacaccaaaatgctacaggtggccagccatgagctaaaaatacccatgtcctatatgcacatctgtgaaacgagcacagcaacagtgcccaatacaattgctacagcagcgtctatcggtgcagatgtcaacggcagagctgtgcagaatgcttgtcagatccttctgaaacgccttgagcccatcattaagaaacatccggaaggtaaatgggaagactggctcaagctaaaaggctttatttcttctgtcaggggctacaaggccttcatggactgggagaagggggtgggggacccatttccttactatgtctgcagagctgcctgttctgaggttgaaattgactgcctgacaggtgctcacaagattgaaggtttgtttattcagggaatggggctttataccactgaagaactgaaatattccccagaaggtgtcctgtactctcggagcccagatgagtacaaaattccaaccatcactgatgtcccagaggagttcaatgtctccttgctgccatcatcacaaaccccactaaccatctattcgtctaagggcctcggggagtctgggatgttcctggggtcatctgtgttctttgccattgctgacgctgtggccgcagtgcgaagagaaagagacatagctgaggacttcacggtgaagagcccagcaacgccagaatgggttcgaatggcctgtgcagatcgattcacagaaatg

SEQ ID NO: 590 - protein, 802 aa, Homo sapiens
QLLGRCWNELLLDEACRLLLDEVSLPGSAPGGRVEFKRMRTLVVSFLFKFYLEVLQELKGGLRIRFQAVSPGPHYVEGGGEQETFIKHEAGAGSMDPGYAHYAGYISQSVDPHQPLQDPVGHPIMHLSALKHATGEAMFCDDIPMVDKELFMALVTSSRAHAKIISIDVSKALELPEVVDVITAEDIPGTNGAEGDKLLAVDKVVCVGQIICAVVAETDVQAKRAAEKIKLTYEDLEPVIFTIKKTVSSTLNIPINRITCHVKRVGGGFGGKVGKPAVFGAIAAVGAIKTGHPIRLILDREDDMLITGGRHPLFGKYKVGFMNNGRIKALDIECYINGGCTLDDSELVTEFLILKLENAYKIRNLFRFQGRACMTNLPSNTAFRGFGFPQGALVTESCITAVAAKCGLPPEKLVLSWRGFSSLYLAISFCLTITTEFPTCFRLERKICTKHIYRYVDKHIYRYVDKHIYRYVDKTIYKQAFNPETLIRCWNECLDKSSFHSRRMQVEEFNKKNYWKKKGIAIIPMKFSVGFAATSYHQAAALVHIYTDGSVLVTHGSNELGQGIHTKMLQVASHELKIPMSYMHICETSTATVPNTIATAASIGADVNGRAVQNACQILLKRLEPIIKKHPEGKWEDWLKLKGFISSVRGYKAFMDWEKGVGDPFPYYVCRAACSEVEIDCLTGAHKIEGLFIQGMGTTEELKYSPEGVKRSPDEYKIPTITDVPEEFNVSLLPSSQTPLTIYSSKGLGESGMFLGSSVFFAIADAVAAVRRERDIAEDFTVKSPATPEWVRMACADRFTEM

SEQ ID NO: 591 - DNA, 51698 bp, Mus musculus
ttgtgtgagcatgtacatagggttatttagtggaatgtggccaacttaccagtggctagcaatagcatatagaaaaatgagtccacactgaggagatagttgataaagtgcttaccactcaagtttgaggactttggtttgattcctagcacccacaaagaaaaaaaagtcaggtgtagtggcacacacttgtgatcccagttctatggaagtacagacaagtggaaccctggggctcactagccagccaaagtcacccaatcagcacgctccagaccagcaagacactccacctcgcaaaataaggagggcagatcctgaggaagcatactgaaggttgacctctgacctctacacacatgtgcatgtacacacatacacaccaacacaaaataacagcaaatgaataacagcaaaatacattctaaaagaaaattactcccccttcccaggagccattagttgtcaatagctcttcagtaggctttgacgttagtttaggaagaaaatgacagaatttttttacattctgttgttttaatttctttatttatggtttttgagacagggtttctctgtgtacctctggctgtcctagaactctttttgtagactaggctggcctagaaatcacagagatccacctgcctcagtctcctgggagccggaattaaaggcatgtgcttgtttgtattgtaattttatcatattttaaaatacagaaccatccgtttccgtattggatgcctgtgttgcatcgtgtcccgggtcataatgcctggactcggttccagctctgttccagctctgtacaggactgtggatggactcatcaggtcctcacacctcagcttcattaactattaactacaagatgaggcagaggaacatctacttcttagagctgtcaccgagattcactgagtcagaatggggaagcacttaaaatggcagccagcagagcttcaagccccgggtatcagccactctcgagtccccagctgtccaactcagcatttcccctgcagcggtccctgtaacacactagtctgttccccttcctgggtgacgtcatgttccttttcctgtaagtgcttgtacatgcttctctagcagcctggctgatcgctatttttaaaacaactagacacttttctcatattgatccattttgaagaatgatcgtaccaagtgctagcaagagaaagggtgtgtggctggagagatgactgagaggttaaaatcaggtacagaactcttgcagaggaccgaggttttgttcccagcagccacatgttactccatttcctgaggactgacactcttttttggcctccaagggctcctgcatgctcgtggtacatacatgtacttccaggaacacatgtatatacaaaaaaatgaataaaaacaaacataaaaatatttaaataaatctttttggggggagagtttcgagacagagtttctctgtttagccctggctgtcctggaactcattctgtagaccaggctggccttgaactcagaaatcctcctgcctctgcctcccaagtgctgggattaaaggtgtacgccaccactgcccagctaaataaaaatatttaaaagaaaccattttcaggtagagatatataatatgatacaattaataaaagcttatttttgttttgttttgtttttttgctttgaagagagttgggtcttttgctttctttttcattctttttcttgttgtttgaaaccttctcatagcccagggtggcctagaactagccacagagttgaaacaaagccttgaactcttaattttcctgccttcactgtccaggaaattgctgagatttcaggtcaacacacttaggtttttatactgaagtggaaatttaagggttctttggagagtgagatgtgttgaatagtgttttgctggggtaaactcatgaaggagtgttttcctgaagtggacacaggtgaaaggctaagggagagtcgtgaaggaatgtttcactgacgcagacacaggagagaggatgttctgctaaagcaaccatgtgacaagacgcatggtgaaggattcctcactaacgacacttgtgtatcagtccgccttacattgtgtagtcaagctgcatttgtcaggacttcatagagagaaatgcaccaaaattcttctggtgatgtgctgtagcttcttgcctcttcctcggacttgggctgattggcagagtgacgtcagctgagacagatgcacatgctgaggtaaacacgtgctgaggcaaggcacatggaggacacgggatgtttggagggtataaaaaggacccgatggatgtggctctgtggcgcaatggataacgcattgaacttctatgggaacaaaacacccatggaaggagcaacagagacaaaatttggagctgtgacgaaaggatggactatctagtgattgccatatgcagggatctatcccataatcagcttccaaacactgaaaccattgcacacactagcaagattttgctgaaaggacccagatatagctctctcttgtgagactatgccggggcctagcaaacacagaagtggatgatcacagtcagctattggatgggtcacacggcccccaatggaggcgctagagaaattacccaaggagctaaagggaactgcaaccctataggtggaacaacaatatgaactaaccagtaccccggagctcttgactctagctgcatatgtatcaaaagatggcctagtcggccatcactgcaaagagaggcccattggacttgcaaactttatatgccccagtacaggggaaccccagggccaaaaagggggagtgggtgggtaggggattgggggggtggggtatggcgggacctttgggatagcattgaaaatgtaaacgaggaaaatacctaataaaaaaaattaaaaaaaaaaaggacctgatggatggtgatggaggctgagctaggcttgcttatagagctatctgtgcaatgcttgtggatctcgagtcttcactgatatttgtataatccaaaataaatataagaccacctagccccttccacctctgaagggacttcccaaactacactagcaggccaagtacagacccagataaggaagctggccgactaaacaatgctgagaaaaaaacataaaggcaggcagagtgagggactaggccaaaggtagtcatcctatgcaaaccaaccaatgtctgaaatggttagttgctacaccaattagaataagccagctagacctgttgcctaaatctgccccttagaagatataaaaagtgtgttctttgtttgtttggggactctcctcttgcctgcatgtgaggggggtccccaatgtgttggaaaaaaaaaaacctctttggtttgtagtaatgttggtctctgtggtctttgtgagtgagggtcttctggtggactccatcatcttcacttccctgagagaggcacagctaagaacttgaaatcctggtgttcctcctggtccctcctgctgacatgagccaaggctgaggcatggctgtcctgttaggtcctgccaccactgctgctaatccaactctaccgaactggacagctggtgtatccatgaagtgtttacaagtgaattgagctgcctgctgacctgtgaactgaactgccagtttccaaacaacacagccgggagttgttccaaagaacctttctaaacaggtcccacttctcccctatcctttctttcccactacctctggtgggtggtgggctaaaagagaggttaaagcttttttttttttaatcttttttttaaagatttatttatttattatatgtaagtacactgtagctgtcttcagacactccagaagagggtgtcagatcttgttacagatggttgtgagccaccatgtggttgctgggatttgaacttcagaccttcggaagagcagtcgggtgctcttacccactgagccatctcaccagcccgaggttaaagcttttaagaacaatcattaaaaataggttttggaaaaaattaaattacagtctactgttctagacacatgcatacagaataggagcacagattagaagcacacgtgggaaaggtaaatgtcaaatgcaggtcatggttatattttctagatttctaggaggaagcagagaaagggctccatttagatgggcctgatagaacacctcaactttatttcatattttgttttataatttatttttattttatgttcatttgtattttgcctgcatacatgtgagggtgtcaggtcccctggaactgtagctacagatggctgtgagccaccatttgggtgccgggaattgtacctggatcatctggaagagcagctagtgctcttaatctctgagctgtctctccagccccctgtatttcattttttaaaagccctgaaatacgtttataaatgttaaatttcaagaaagctgggtatttattcccttaatcataagttgaaagagaccaaaaccaagacaaagtacaaagtacatggcggggggggggggggggaggggaacgggaaataaagtgggggaatggctaaaagtctgtgttcaaaacctttagaattcttggtctccaggcagtgtgcaggctctgtcccagccatccattccacacccaccccttcctccattcccaccactggagattatattatctgcatagaccatagcccagtagaaggcagtaggaggcacaaggctgctggggctcaaaacattctctcatccttagcaagccattcagtgcttgcaatcaaatttcttttttttttttaagtgttttttctttctttctttctttctttctttctttctttctttcttttttttttttccattttttattaggtatttcgcagcaatcaaatttctaagcctcaaatagtctcctagtgactcccaatgccccatgctggctctcaacatggaggatattatcagagcactatacaatgaagcccattagtcctacacttctcaagaaaaaaaaaaaggcatgctattctaggagtcttcttgttttgttttttttgagacagttttatgtaatccagcttcatgcagctcaaacttattatggatccgaagatgacctttgactcctgattctctaacctcctcctctggaatgctggaatcacaggaatatgttgtgtcatctcccccttcccccattgacttcacaggattgttttgtcctgtttgtttgtttgtttgtttgtttgagacaaagtctcttatagaccatactggccttgaattggctatgttactgagggtgatcttgaacttctcatgccttatacctcccaagtgttgggattgccaaaacatcaggtttcaatgggatcctgggagtcaaacccagggcattgtgcatgcagggctacatacatacacaacctatcacaggacccttaatgaaagacatataactggatgtagttcaatcctttctgaactgagtgcttatcagaacactgataatgccctgtggcgtatctattaataatccaaccagaagagaaaagaaagagaaaaaagaaaaagacccaaaatccaaaaacaggaactacaatatagtacaataaatattaaaagcaaaaaattgaaaaattaaatttcatactatctggggtgtttgtttgtttgtttatttgtttattttttgagacaggtttctctgtgtagccctggctgtcctggaactcactctgtagaccaggttgaccaggtgggctttgaggtttccaaagcccaagccaaacctagcgtctctctctccctgctgcctaagaatctggatgcagagctctcagctatgctccagcaccatgtctgcctgcatgctgacatggtccctgccagatggcaatggcctaaacctctgaaactgtaagcaagccccattaaatgctttcctttatgatagcggcatggccatggtgcctcttcacagcaacagaatgattactcagacagggagtgatgcttcagtgggtagaagtgattgtcatgtaagcccctaatgagctggctttgactccaggaacagaccgtggaagaagaaaacggacttccaaaaatggtggagaccttttgacctccccatgcgcgcacacacacacacacacacacacacacacacatggattatattaaaacaaaactttaaggattttttttttagatttatgtgtatgagtgttttgccttcgtgtatgtgtactacatatgtgtggtacctgttaaggcctaggtaaaatattaaggcctatatggaatgttaaggcctaggtagctgttacctgactagcctgacattttgtgctgttactactgttataagtaaactctctcatatgctgtttctgctgttactagggaactttctcatgcccaaattgattccatattctgttatgttctgtacccttggaaaccaagcacgatagaagtcagtagaactggtttgtatagttacccacactaagcttggaccacagcctgagacagacatctgcaccaatataagaaactatttggaataagacttccattttgagtaggggtagagtaaacttgacgcttccaagacctccctgggaactgacatcctacttagctagaaaaaaacatgtaagtgggtaactgacatcctgtgaatattatacaagtcccttcctggaaacaagttagaacctgagtattagataaagcaagtcccctgccacagttgaatacctcaaccaataagagcaggagaagtttataacaaagacttgtttctaaggaaatcccttatccctaaatcctgattggtggaataacttgacaaagatgtttgtggattttaggcttaaaaatcctgtaggagggctagtgagatggctcagtggttaagtgcactgactgctcttccggaggtcatatgttcaaatcccagcaaccacatggtggctcacaaccatctgttatgggatccaatacactcttctagtgtatgtctgaagacagctgcagtgtactcatataaataaaaatcaaaatgataatgacaaatcttttcacactccaatatccagtacaaatacatactaaggatcagaatagtctaaacttgctgcatagtcaaagtgaacctaaaacttctgttgtcatccttctacctcctgagtgctgagattatagttactgctaccaggctcagtgctggggatgaatccaggatgttgtgaatgttaagaaagtatgctaccaacagagttatagcccttcctttatatacacatttaaaactgtatgcatattgttttagttaaaaaacattaatgttcaaatgtttgaatgttgtggtagaaaatgtctgtaatatcgtaaagtttatccgctgcccacaggaaatcggatttcggggctagagaaggctctgaagactgaggctcagttaagggcatgtgttgcccttgcagaagaccagagcacccatatggtggctcacagtcatctgtaacttcagttccagtgtttccaataggcgcacatgtggatgtggtgtgcatacatgcacacaggcctgtgaatcacacttattcacacaatggcacatgatcacacttttcatatccttcctgttactttgaaagacatatctgaaaacatgtcaaatacacacacacacacacacacacacacatacatatattcaaattgtataattaaaatatttgtttgtttgttgttactgatttgggggcaggtttctcacacagcagcccaagctgtcctgagcttacttcttagcccagggtagactcaaactcaccatgatcctcctggtcagcttctgaagactgaggcataggcaccatgtcctgctttaaagacttttattccttctaaacaattgtgctgtggaatgggatgtttggggtaaggtgatacaggcaatgtttgtaggtgttctgaccaaatcgggtccatatttgctcatttcgcagtatatcagtcattgaatggccttatttgctaaaatctgttccttgggcaacccagtgtggagtccagaagagggatctcagggatatttatggaataaggaaggaagtagtctaaggattgggctaaggtgactcaagcaagaaaaagcaagtaagaaccggtaggctgtgctttccaaagcaaactttacttctcttcagattgtgcatgctcagaaaagggcagcacaaataccttctaagggtggagtcttgtccctctgtaggtgacaggtcagctgtcagaaacctgcctaaacctgaggggcctatggcctcagtgtgagaaagacgatgctgttgtcaacttcttgaaaaaaaaataataactcaggcaaagattagacacgtcgtaggtgtcatctttagcaaagctagtgggactctattgcttagcatacacatttgtgctttggggtttgagagatggctcagcaggtaaagtacttgctaggcaaggctgatgacctgactttcatcccaggattccacagtggaagaagataaccaatgtccaaaagctgtcctccagcctccactcaacaaccacgatgcacatgtactctccctataataataaatcttagaattccatatttgttcatttgctttgagacaagagacaaggtctcaccatgcagttctggcttgcttggaacttgctgtgtagaacagactggcctggaacacacagaaatctgcctgtctccacctcccgagtgctaggattaaaagtatgcctcaccacaagcagcaaaaaagatttttttagagacaactgaaatgaagtaagaaaggcatattggtgtgaactgagaatcccagaacttggagacaccaatacatgttcaaggctagccagagctacagagcaagtccctctttcaaaaatctggacaaacagggccagggcgtggctcagcaagttgtgcctgttgttaagcccgatgacctgagttcaattctcaggatccatgtgttggagagagaagggaactgactaccaaaaggtgtcctctgatcaatatcaaacaaaatttttttttttattgcatggagaagaggcttaattaaaattgttcctggaagagaaaaaagtggaaacatggtacccaagctgaaaggacaggtggcggtggcggcacttaagcaaagaaataaaggtatgacaggaatccctaaggcccatctggattcctttcctttattgcccaataacaacgtggaatttattgcgtttttgttgttgttggttttttgtttttgttttttttttttttttggttttggtttttcgagacagggtttctctgtatagccctggctgtcctggaactcactttgtagaccaggcttgcctctgcctcctgagtgctgggattaaaggcgtgcgccaccacgccgggcttttattgcgtttcttttagcagaccataagctttagaaggtcaagtcctcatctattgcattaatcactgtatccctgggaaggagagatggccactaaacagtcgctggcgaagaataggcacaacggtgctgcagggtagccctaagcacggaatgagcaaaaagcacccacaagttggaagcaagggatcccccccaccccaaacaagcttcttaagggggcttctgaaataatatcggaagggtggaatcaggcttctggaatattcgcgaaaggggcaggtggattgtacggacaacggggaatgacaggtgagcgtaggactctcctggtcaggaggagcggggcggcgtgtggcgcatgcgcacgcatgccctctgcctgcctcctcaccgggacgcgcttgcgggcgagtgcacgcgcgaggtcgaagcggaaatggcgccgcggggccgcgcgtgcgggcggcgagcggaagtgggtgtgagagcggaagtggccggctggagccgggggctgggcggggaccgggatcgtcaagtaaggcggcggcggaggcggcggcggctcggcaggcgggttgaagcttcgggggccaggtcggtcgggtggtggctgcctgctacaggcagcgcgtgccgggccagcgcgtgtgtccgcctctccccaccccgctccccgtccccttctcccctcacctaccgcacccagcccccctcgtcaggggcagcggggccgctccctccgtcctaccctcgattgcccaccctcaccgcccttgtttctccttcccctgcccggggcagccgccgccatgatcctgctggaggtgaacaaccgcatcatcgaggagacgctcgcgctcaagttcgagaacgcggccgccgggtaagcgcacgccgggaggaggccgagttgaccccagctaaatcccgggtggcgtccagctccccagccctagagggggacaaatcgggaacctggcgcggcttcagggtttccctggcaggatggacgtgggaagccacggggcgcggtgagccgagggcctgagatgcgtggggagaggctgagatagggatgcggaagcagcgagaggacaggggcaaggcgtgccagagaacaggagacctgtaggacgtgagggcagccgaggccagaagtcacgcccgagagcctacggtcctcaggggggaagagaggggtgcacttccctctgtcttttccgtcattgtaccgaacccagagagacccttttggggaagctggattgaatggagttttcaggaattcccagggcgaggtgggaagaacgtgtaggcccagatcgccaccagcattctgcttccccacccccatctctcgagaccccaggaaaagcaggaggcaagactgaaagcagacccaggctgctaggggggtaaaaaaaatctctaacctactgtgaaactagccattttgttatatatcctttaggcaaagccaacggttctccatccacactctctttagctctcgagacaagcttgctctatttacttattggttgtgtgtcttaaattcttatcaaagaccccggtctttgatttcttctgtagtaatgccgactgggttaatagctgcttctgctcccagaatctataaagttcttaagataaccatttataacatcagcatcttaatatatgggacgtatttccagccctctctgtcatacacaaaaaagcaaactcctcccttaaagccgcgttgcctctctaatatatttaaaacctgagcagaggaattgggttttaggttctaatttatggtggcctgtggccattcctttgcctcatttcctcattggtaaaggtggggcttcacattttggtttcacagttaggaaataagtgcaggctgttttctgtgaactaggaactagaaataggaaagtgcttgccgatccacagagggaagaggactgggagagggggaattcattcattctccccctttaattctaagcatttgtaatgaacttgtggttcacagacatcgaaagcatgaacccactacttactcggaatacattgtctgctccgtctcttttgtaaggttacagattttacctgcaaaacaaaatgggacattccttgaattggtgcattcagtgtcatgctgtttcctgccctggactgcagttgagcatttgtgcacctcacttgtttcttgtctgcagcttctttgcattttgagttttggagttagtcaacacagggcacttactgtgggtgaggggggtgcgtgcttttttttttttttaattagtgtagcacaaaggaggaagttaaaataacttctgcattttcactgctgatcttaatacatacattctcaagtcttgactagcaaagaatgagtcctgggtggttacaagctgatctacaagataaatggctgtgtgtgttcaagtggaggcatgcctttaaatggaggaggactttcacacttacttattaataacttgattctaagatgtgacccattattcagaactttctgtagccctttttcttttagaaaactctccttaaagttctgtggttggtggtctatgcctgtagtccaagcacattcaactgtaactccagctttcaggagctcataggagacaggaggaacaaaagttctaggccctagtgagactttgtatcaaagaaaaaagaaaaaggcaggccagactgggtgtgatgtgcttgtaatcccagtgcttgggaagtggaagcaggaggaccaggagagcaaggccagcctggtctaccctgttgcaagtaaaaagcttactctttcagaaagattaaaatagggttttaaatttggagggcataagttagaatttctttggggggaggtggtaagggtgctcactgcagccaggtaaaatgtctgaggaggtaggaggttttgtcttattctagctcatccttagaatgtatgacttaacaaatgcactcaaaacattgtgttaaaaatactttgatgtctttgagaagagactatggagggcggggattttctgaaattggctgtttctgtggggtgtaatggcaccctcctataatcctagcactagggaaacaggcagaagggtcaacacaggttctagtccagccagggatatttagtgagactttatttcaaaagaaaagaaattaaaagaaaagcctacctctgaaaaaaaaaaagtgtttccaggtccgccctttaagatgaggcagcactggggtggttacagaggtcaacaaggatgtctagtgtgctcatcataaacatgggtgcgtctcaccagagcccaataccaggcagcagctgaaagcatggggcccttccgaagagagcctgttatcgaagttagggagggactgatgtatacgctatattgggagaagataacgagcttaaagagaagaagcccggagaccccagagagatgagaggctgtgcagggtggaagtggggagagctgagccccacactgctctttgcacttggcagaagagattagtcagggaagttatgatcatgtagcctttgccagagggattctttctgttctggagtgtcctgtaccatagccacttactatatgtggcccgttatttaaataaaaagatgaagtaaaactaaaatttgtttcctgagttggactagctgtgttggatctttagactccattgccacttggggcgagcgactgctgtgtttgcccactgttcgagcttgttactgcagacagttccgttggacggtgctggtcgcctactgacaatgaaggtgtgagctggtttcctctggggagggtgtttgagtcctcagggccttgcacatgctgggaagcactcgcctgcactgcttcccagctctcgggaggcgttcttcaaagatgttagagtagtgcagtgcacactccagagtgacgttgcactggctttccttttcattgtttcactttatcttttttatttttaatgatcccttgggttatcttgctgtatctttttgcctatagcatcagactgaaagcttaaacttgtatttgggtgagacttctgtaaaacaactctttaagcatacagttggccacaattatttgtaatttaaagacaattttaacaaagtttcctattctttcctgccatactcctgagaaggagtattggatctctctgtaaatgtcttcataaagggatgcaggaaagtaactcctgtcagatgacacagtctctacactatgactaattcaaaagctacacccaacactgtaaataatgtcctgcgtgagtcttatcaacagcactgccttttcacttgggaattcttgcccagaccacaattaaagcagaagtaatctggaaatttaattgacttcttttgttactacatacacaccaagaatcttttatcctcagaagcaaggcctgtcaacttcgcagttacacagtccagagctgaggaatgctgttagatttgagctgctgctggctttcagtgccttctggctctttaccacagcctgtgcatattgtgggagccgtggttctgtgagggggagagctcagtgagcaagcagcactgagtggggtgggcgagggccgtgggaggagaaatttgagaaaagaacacattaaatcttgtagctaccgtgttctcattcccaaatatgccacatatgtcctcagagagacagactgactggcttaagagattcggaattaggacattgtttaaacctatagatgtagtgggatgtactgtctgattgttaagatcaagttgatctttttataccgtcttgtgattgacactttgctacctgtcctctggcccctgcattgtctttggggaaggagtctctaaaactgaggactattgtttcagccatttctgtttcctcagaagagagagatctgctcagtaagtttatcttgaaggaataaatgcagactaagagattcttgttttctttaaaagcttatctccctccccttatttttgagagagaggaagagggaatgagagccatcatacatcagagaccagagaagaaatgtcgtaatgtgtgtcctaccgtatcgctgtctcattcctttaaaactaggtctcttgctggacttggaattagtctggcagtcagcaagccccagtcatcctcctgtctcagcctctgtagcactgaggttataggctttttccgtgggtcccggggattctagctcagaccctcaggcttgcccagtgtgcgctcttcccacttagctatcctgcttcagtggcagccttgctgttgctgtggtgctgagacggggtctctagcccaggctggcttcaaactcatggtgctccttctgcctcagtttcctgccccacttttctaagagtgtatgtcagcttttattttcttgttttttttttctttttaagatttatttattttatgtatacgagtacactgtagctgtcttcagacacaccagatcccattacagatggttgtgagccacaatgtggttgctgggaattgaacccgggacctctggaagaatagtcggttctcttaaccactaagccatctatctctccaagccctattttcttgttcttttgaagggtggtttagggaaaaaaaaaaaaaaaaggtggggtttacttggaaagaatgattggaactttgtagaggacttaaagtaatcagaaatcttcaagctgggcgtggtggtgcacacctttaatcacagcactcgggaggcagaggcaggcggatttctgagttcgaggccagcctggtctacaaagtgagttccaggacagccagagctatacagagaaaccctgtctcaaaaaacaaaaagcaaaaaaaaaaaaaaaaagaagaagaagaaatcttcagtgaacacaacagaagatttctctaattgagggtagaagggataaccagaagagggccacaggtgccccagtggaaaattatttccaggatgtatttagaagtaaaaactccacctcacccaaaaaaaaaaaaagaggtgatatagttgctaatagtactttactaactgttaacattctagaagcatcttcagaaaagtacagaactacaacacccaattttaagaaagtatttgggtgcaagagcgatggttcaacagtttagcagcattggctattcttgcagagttcagttcccaacctacttgagatagctcgcaaccacctgttaactccagatctaaaagaaatgatgccttcttctggccaccgcatgtgtacacacaagcaaatacatctgcaaaaaaatttccctaagagatttattttcattttatgtgttttatgagtgagtgtttgcctactgcatgtatacatacaagaccagtgccggtggaagtcacaaaaagatacctgatcccctggaactggagttacagacagtgtgagctaccatgtgggtgctgggtacttaagtcttctacaagagcagctaatgctagagccatctctccagcctccttttaagagattttaagaatatttcttaaaagtcagatgtggtatctcatgtctgccatcccaggttgtgattctagcacttgggagggctgggcaggaaaatcagaagcccagatcatcctcagctacgtattgagtttgaggccagtgggttgcatgggactctgtttcaaaaatgaaaataaagctgtgtgtttggggtggggagggaggaccaggggttgggggggaggaacatgccttaatcccagcacttggaaggcagaggcaggggttgaacttgagtcctcaggcttggtagcagtgcctttactcactgagtctgaagctcgagcagatggtaagcagtaaatgtttcatcttcttagtctattacatggactatcactatgattttattttaaaccataaagcagaacaagctagctgtagtgtatccctgtgacctagcatgtaggaggtggaggcagctcaaaacaagcctcagctacaaaataggtttgaggaagcctaggctacatgagattctgtctcaaaaataaaccaattaaaatacagtaataatggaggcagaggcaggcagatctcaattcaggacaagcagagaaaccttgtcttgaaaagtagaactaacggggctggcgagatggcttagtgggtaagagcactgactgctcttccgtaggtcctgagttcaaaagccagcaagcacatggtggctcacaactgtccgtaaggagatctgatgccttcttctggtgcttctgaagacagctacagtgtgtacttatatacataatgtatatgtataataaataaatctttgggccagagtgagcagggactgagtaagaggagttggccagagacagcggggctgaccagagcgagcagaagtcctaaagttcaattcccaacaaccacatgaaggctcacaaacaaccatctgtacagctacagtatgctcatctacattaaataaataaatcttttttttaaaaaagaaaagtagaattagcttgctcgagctctctcgctcctcccatctctgccccccctccacacacacacacacacacacacacacacacacacacacacacacacacacacacagaagcagaggaggtgggaagggcactcctgtgcttggggctaagcaatgattgtcacagtgttttacattcagcattttccttgttggggcacagagcttacagatctccagctccagctctcctgttctttagcccagtaccttagcagcctttctcctccaaaccttttgtgtagccatgaagagtaaactaaaatattcatggtggtggtttgatatatattcccaaatcatatagcaagccacttagactggatcttagcagtgttccccagtggagatccatgctcaggctgctttcttgctagagagactcaaaccttcagggtttatgacttagaacattaaggttcttcttaagttgatttttctcaggtctgttgatgaaatagtaaggtggggactctcctggttttgttcaagcctaagggttagagggaaaacagcactcctaatatccctccctcccacccgaggtaagtcagggagggtggtccctgactataggacggacagcctatcaggtcccaagagtgtgtttgcatgcttccttcctctaactggcatcatgttagtattttatttaaatggacttgttaaaggttatgtatactcttggtttttaaaggtgaggaaagttgtattgttcttcattgccctttgtttgttggctacatttggaagtgaaagctcaggagcagctccagctttctcctttttggaagggcattcattccttgagactggatctgcttccaactcaacattgagccaaggttgactgaattctgatcttcctctagccatctcccaagtgataaagtatctctagccacatcccttttgttgttgttgttgttttcttgagacagagtctcccccctgtgtagccccaactaccctgtaactcactatgtagaccaggttgcctctgcctcccagatgctggggatatggacatgctttgaaaagtagggtaaacttggatgtttcctctgtgtgtgtgtgtgtgtgtgtgtgtgtgtgtgtgtgtgtgtgtgtgttttctttaacataaacttaataaaagctagtttgtttaagggatatcatttagcgtcagtatcagcttttaacattcatgaaccacagtagatattccataattgtccagcagagttggaactcttgttggcttctttcatactcaagggctggagagatgagctcagcagtcaggagcacttgtcgccttacagaggaaataacttcagttcccagcacctactttgtagctcccaactgcctataactgcagttcaggagatctaatggcctcttcacatgtatggtgcacatgccttcgtgtataaataaagtatatttaaaaagaagattcctactaaacaggtcttgagcaacggaataaaatgtggaagtgtgtgtatcttgtctgctaaatgtgaaacaaactaggatctcttgaattaactgctaacaagatgctagaggcagtaaagttttctggcattggcattgaagagaagagaagtgtaacagctttcactggggtgtaatagagtaaaccatgtagtagctgttgtgtatcagaaggtcttctaggcctgtcttactgtctgtctatagtagttctgcaagattgatggtttgtattctcccattttataaatgaagagatgaggaaaggagggtaagaaatcttatttgtccagtgcataagtctggtgagaaagatgagaaaacgagtgctttgcctctgctcagtgatttttttccctcagtgttagtttgtgctgcgcttctgtgtaagtcctgagatgtaacaagaggtaggaccagagcagtcttgatggagagtggcggtgctctgatgatggaaggaaggggaggtatatgtaaaggcctaaaaaaaacgatctgtgggatggaacagaacttactgtgctgtagatagcttaaatcatccttttaccttaaacaaacagaatcattctacatgactatacttagccatttttctgtctgatgttatttcccttggcattctgctgagggtgggggaggggcagggagccattaacacaagctacaggtgttctttgtctgactttcatctttagcaagttcaggttttcttcatttgttagccatttaaataggatgctccaatttcagtaaaaatcaggaccccttcaaagtcctcctaaaagcaacccacagtataattattttcccctatttacatttgatctgtttatgtatttgtggactcggaggtcagagtacaacctgaaagagtcggctctctcctttcgccctatggaacttggggatccaactcaggtttgaggtcattatgactaaaaatgtcttactaagggcctgtttgttgttttacagaaacaaaccagaagctgtagaagtaacatttgcaggtaagtgtctttatctcatcccttataattttagtgtgttttgtctgtgttccttgtatgtgcctgatgcctgaggaggccacaagaaggcatcagacctcctggaattagagttaacaaatggctgtgagctgctatataggtgcttggaattgaacctgggttctctggaagatcagctagttctcttaaccagggagctagctctgcttccctggaaagagaagttttgcttttcaagtctttcttgaggccttcaagaattattttatgtatttgtaatgttgctaactgattttggagttcagaaaactatgtaagactaacctacatatcttagtgagtggggacatttgatatcttagaaatttggttttggtttaggttttgtacaaagaactgtctttaatccgggcatggtggcacatgcctttaatcccagcactcgggaggcagaggcaggcggatttctgagttcgaggccaacctagtctacaaagtgagttccaggacagccagggctatacagagaaactctgtctcgaaaaaccaaaacaaaacaaaacaaaacaaaaaaaaaacctgtctttctactttggaagtctacagagttataatctagtagccatcatctaagtttgcctaacatttgggggaggcaaggtcaacgatgatggagcttgtttgtcaaatcagagaaatgggttttttgtttgtttgtttgtttgtttgtttgtttttcccattctctgttggccatatatgatggtacaagtcatttgtgccaggaggcagaggcagagcaggtggatctctgaaaatctgaggtcaggttggtttacatggagagttctaggctgtctagagccatgtgttgaaagtgtgcttcatttaaaaaaaaaaaaaaagacgagtcaaatgtgagctcagagattttacagctaagtgtccagaaaggcaggtgctttgaccagaggatctgaggagatttgtagctcctcaggtgggagcatctgtgcatgctcatcgccagcagtgcccagtccgcatggttcttgtgattgccatgcaagttctctgcattctgcccctcagaacctagccacagtaatgctacagatgagctcggctcactttatagtgcaggaagaaagagcctttaagaaaggcctagacataaagggagacctaaaagataatcatctgtcttgtcttgatcttggttagatcttaattcaaatattttttataaagaattatttattttatgtatatgagtgtgctgtagctgtcttcagacacgtcagaagagggcatcagatcccattatagatggctgtgagccaccatgtcgttgctgggaattgaactcagaacctctggaagagctgtcagtgctcttccactgagccatctctagagtccccttaattcatatatttaagacaacagtgtttgtggggtggtgttgttgttttttaagacagtaggtaaaagatgaatagcttaccaggtatttagtattaaagtagaatcttttgtttgaatttgagtatgactggttgtaactatgttcatgttaaatgtctcccaaagatacatcttgatgtatatatggatcagatgtctggggtttgctttgtaatagattgaggtggggtgagtacactctgaaagaagccccacgtgcttaccagcattgatgctgcataggtggactctttaatagctttttttctgttggaaacatgttacaatgaaagggttttgttttttaacgttactttagtataaactatggttacacaaaaaaatagctttgtaattttaaaagagaccaaagagggggccatggagcaattccatagcagatttttggttggcttcccatgaactaaaaataaacattgttttacttgaatctctcttattggagctctcctcctggccagccctgtggtagatagtagattactcctgtttctagagtgagcaatcttacttgcttttttcacagattttgatggcgtcctttatcatatttcaaatcctaatggagacaaaacaaaagtgatggtcagtatttctttgaaattctacaaggaacttcaggcacatggagctgatgaggtaaggtccacattggtttccttgggactcttgtttttgctttacctttggttggccccttgcccttcagtgagggccacatcccccttacaaacagaggcttctttatacagctaacaggggcttccaactccattccccataaaaatgtttttcagagatattgcctcttggcttgcttggttttatcttggagcaataatgatatttcctaagcgaagtttagaagttttttaaaaagggtctcacatagctcaggctggatggaaagcctccaattcctgattgccttcatcttccaagtactaggattataggcatgtaccaccatacccaactcgggaatcttatcttttcaaattattcaggctagacagattgtgcaaaatagtgaaaacgaaacagtcctccagaaataacagagaatatttcttaacaaaaatagttacagtaacaataagacaggttctggtccatatttagaatcttatcaaggcagcttggaatttatgtgtattaaacgtcataatcttggtttccattccaaaagggaagcataagtaactgtcttgtaagttttttaaagttaatattctttagagctgacctttccacctgtccttccttataactaccatagggaagtgcacagggctgtccaggccttgtgccctggctttggtagctagagtagaaggcttggttcctgttgaactgcagttgctctggggcaagccatttatggaagagagaaaatgctgttacaccagtgcctgcctgcacattgtggttgggtctcaaagcaggaagtatgactcagttcctgaatccattttaacaaactagactctccttaatctgctacgtgaagatgcagccatttctcattctgaaagtggtagcttttgaacagcttcagatttctgaaaggctgtgtattgaggaatgtgatgtagaactttgtaaagtttgctctaaaatcaagagttctaagatcttcagggagctgagcccttttttgttcaggtgcttttgatttgctgaaggaaggggagtaaccagagggaatttaagggaattttttcagaagacaagaagctggtctgctgcagcttgcgacccagcatggcttggatttattaagactcattttatcctgtgtttggcctgctagtgcaactctggaacacattgctgttttcctagctcacacatagaccaaagagcccaagtgggtggaggaaataacattcccagtgtgggagtggagtaagcagtaattgactccctaggttggttaaacagtgaccagcctgtgataaccacaggaagctcgttactgtttcatagtccctttttaaaagcagaatgctctgctgctcagtaggcaggtttaaaagttataagtaggtagatcaccttcctcttctcccgactgctaaaaagaggcacagatgtaaaggtgaatcaagataggaagtgtgagtgacagtgtgctacagttgtacacagctgtgagcccagcagtgggaggcgggggcagggggatcatgagctcgaggccagtgtgggttacatagtgaggttggtcttggcaaagtagcagggaatgttcaagggatatgcaggaacagagaaggccttcagtggctcagtgggtgaaagctcttgacttgcaaacctgatgaccttagtttagtccctggaatcatggtgggaggagaaaacttgacttctagaagttgtcttctgacttctacacttggcgccagcagccacacacgtgataatagtaagtttttaaaaaatagcttttttaaagaagaaagaacaaaggaattaaaagtggtataaacgtgcctctaaatactttatagatttcagaatatcgacttggtgaacctgggggcctttggtttccccgtgtgtgatactcccttccttcaagtatcagtggtgtaggattgtagctcagagggagcttgccaatgttcctttacaccccagggttttaggagaagtggtatctgcaacacctgcaggtcagaacttgacctgccaccaacagagtctgtgaccttggtccctttgcagaagttcctcttctgtaaaagctcgctaccacttagttattacactgggcagtgcctgcttttctctgtaaacaagtgtggtcaagaattcacattttgggattcacactgttaccagattctgtaggtgaggattaagtctagaaatattaggaagttattcactgaactattttgaggcctttacttgagataattctaaagactatttaagagtggcaaaactatttaagagtggcttctctgggagggcacagctccatggggaagagtttattgagcttctgcaaggctctgggtttggcctctggcagcaccaagaaaaggaatgggttgggcgtgaagggccttattaacctgtaatggattttgagggtttttagatggaacgtaaaacacagttttgtttattttaacactgtctagagagttcattgaatatgagaacattcatacacctttagacagctgttgaatgcaatgagggttttgtgtgtgctctccttccaaaagctggaacgtagttagcagaggaaatgtttggttggggagattcaaggtaggtagagactgttgtgtagaatactggtattgctagctcgctgagattctgttgtccattgctctttgcattaaaagccagccatgagctaaattaatttatagcacacagtattaacatattgaataacagaagacagtgcctggaaattgaccccttcattcacctgagctaggcttcagcctgagtttagttgatgcattcttttgtcagacctgaattgtcttcctctactctataaagtgcagtgtagaatctgaaaggagaaaacaggtctctgagagacaaccactgaactaacctttgaattataatccagttctattaacttttcttctctctctctctctccagttgttaaagagagtgtatgggagcttcttggtaaatccagaaccaggtatgtagtgacgcagcagctctgaatgacggcacagcaccgtgtcctgtttgtctcaccttttgtagctagaggattttgctttaaattttcattctataaaatgcacctgcaggagtccagttcttgagtcagccccctctgtgtaagtagccattacaggattctacttttttcagtatgatacacaataggttaagaattggtaggtgggttattattaacacccaagaatgattctttaggtcctttacccagaggagcctccatcatcagagtgagtgttctttgagcataatcataaagtcggttatctctaaagcatgaaggcctgagcctgaacagcagcatctaattaaacagtgcacagttgtagtcccagtgctggggagatcacaagtgtggcaataaatctccaacctcagtaaggccgtgcaaaaacttacaactcagctacagtatttataagctgcactcctagattgggcaggtttaccattacactgctctgttccctggctattccttgctccttaggcttctctgggccatgttgttctgctccattgtcctttcacctctcctgtctcctttctctctccttccttctcttcctccactctctaaaatctccagccccacctttcccttctactgcccaatcacaagttaaaatggggagaatgttcacatgaagtcacctgagtatgtgatcaattcctccttggggcagcccttcttgaggaagcagaatttacattagaatacaaacagtgccagggttaccacacaggtaaccccagagcttgcttgtagccaggctagcctaattgaccacccctagttctcagtgagagacccattttcaaaataaaagataaagagatggagagatgtttcagcagttaaagaacactggttgctattccagaggacccaggttcaattcctagaacccatatggcatctcacaagcatttgtaacttcagattaaaacaaaaaccagtaattataaactggttagcttaaaattcttttaaaaaaaaaggggggggggcgggcgtggcgcacacctttaatcgcagcacttgggaggcagaggcaggctgatttctgagttcgaggccagcctggtctacaaagtgagttccaggacagccagggctatacagagaaaccatgtctcaaaaaagaaaagaagagaagaaaagagaaaagaaaaagggaatgtaagatggacagctcctaaggaatcaccacagattgattcctagtctccatctgttcacacaaatactcggacaaatgctgttcccactcgcaatcccttacacagttactgtacattagtgtaaataaccgtgtaagctaagcatttacattcactagcttctttgggaagctttggaaagcacaaccagccacgaaattgatgattgatcattttgttgagtttttgtttgtttgttttgttttaagatttttttttaaatttatttgtcatatatataatgagtacactgtagctgtcttcagacacaccagaagagggcatcagatcccattacagatggttatgagccaccatgtagttgctgggaattgaactcaagacctctggaagagcagtcagtgcttgtaactgcttagccatctctccagcccgtttgtttgtttgtttgtttgtttgtttgtttgtttgtttttaaattaaaaagtattgtagctaggtggtggtggcacagggctttatcccagcatgagggaggcagaggtaggtggagcttcttgagttccaggtcagcctggtctacagagctggttccaggatagccagagttacaatagagatcctgtttcaaaacaacaaaaaggtgtgactgtatatatgtatgtctaggggtgtggctctgaagtcaggggcagcttactgtcaattccctcctttgaccagtacatatattctgggctgagctgaggctgtccagggtttgtagcaagctctttaccctcagctgactcactgatgcttgatcaatactttgcatcctcagtgtgtgctatctgagttccctaatgaggtcagacattgcttatactttgctttttgggtggattctgagcaagctttaactcttttattgtcttgctttttaaatttcttcaaatgccccaaaattgaatagtgattgttacaggttttgatattaacataacaaaaatgggcaaagcattacttagagtgaagacttaaacagtctgtgctctcagaaaggcaggtaggagtaggaaaagtaggctcaaggaataaccttattaataataaatagtataaaagttgattatttgagaatatgagacccgtatggttccggtattctattcccatcaatttactgttttaaatgatcctcagctgtttaaagatcttcttgagaaagtatgtatagactttggtataccattattgacttcttgtaccattattgacttgattaggcttttcctgacattcatgggacagaaggagcagggtcacttaatggtcagtaaacatgattttcagtccctgttctgccccatttattggtcacctcatccataaattctatggatgttttagatacagttttgctatgtagcccaagctgtcctgaaactcaaaagatagtgacctcagtctcttgagtgctggctgacattgcaagcctgcaaccacatgcctacttaaataccgtacttgtccctagcttgatgctcaccgccatctcttcccttctaactactacattttcctctaccaccaccctaggacctcccctccctgcttttgccacagatgagggcattgcagaggttggacagttttctggacagttttccaaggtcatacagtgaggccagaatttggattcacttctgtccagttcaaaacagactagcctatgttgtgctatatttaacaagacgctgcttctctgaagaacttttctttctaaatgaagataagtttatctgtcctgacttctttgaagaaaggcatgggggtcaaatgaagtagaattctgaaaacactggaaatttacatttttagataaatgctctgggggaagtacatatgtgagaaacagattttctaccttgccccctctctcagagtgttgggggggtcgaattttattctcagaaagcttccacctgctggccatgcatattaatccattggaggaaatacagacttgtacagcttagcttcatatagtcctccttcacgactgtctctaggaccctaaagttgtaattggagttccagattgttacttcttcccattacatatttgtaattgctcatctttgatactgcttatgatttattaactagctgtaaatatttgatattgtggtataaggtaggtagagatgagcaattgcctctccactatgtttacttgggagagatgggtttgatatggtttttgttggttgggtttcatacatctgatggatggttttttccctcccacaaggatataatgtttctttgctatatgacctggaaaatctacctgcatccaaggattctattgtgcatcaggctggcatgttgaagcgaaattgttttgcctctgtgtttgagaaatacttccaattccaagaagagggcaaagaaggagagaacagagcagttatccattatagggatgatgagaccatgtaagtatgaacgtttgctcctcaagcctgggtgtggccatctcacaaggtgcttactgagagaaatagtgtgatgaaaccttaaactctggtatatggatcctgttgaaaatctttcttacagaatttcttaatctgggatataaatgataaggaagaaaatagaccacttctcagcatctaaagttgacagaagatgaaaagaaaatcctatgctttcctttaaggcactaattttatgatttttctaaatgtgtttattttttagacctccttgttattttatgtgttgtggtatttcgtggttgtcagccgccttgtagtatgagaattaaactcttgccttctggaagggcagccagtgctcttaaccactgagcagtctctatgctcagggcaccatttttctgaattcttttactgaaaagcacttcccttcgcctggggagatagatagttcagctcttcagtaagatacttactgctttctcagggaattcgagttcagttctcaactcacatgccagctcacaactgtctgtaactccacttccagggcattgggcacacatgtgcacaggtttatggacagacaaaacaccccatagatatcaaattaaataaacacataaacaaattttaaagatgtcccagataattcagacaccataggctaaacataaagagtttttttttttaaataagtgacattctaagaataacttaaaatgcctagtatatacaagataaatgaatctagctttgttaatttcttttccttgggaatacgtttattgccctgcctttcctgactccaaatactatctctggcttacctgtgttttattgattagaaactttggacttcacccttccacttgcaggtgaggttaggaacagttcttctaatgctgttcttacttcctgagttttgtgccctcaggtatgtggaatctaagaaagacagagtcacagtagtcttcagcacggtttttaaagatgacgacgatgtggtcatcggaaaggtgttcatgcaggtacggagcaaaaatctagaggggaaattgtgctgtaggaagttcaatcttcacatactatgtacacagccaccagatggtctggacttgaagctcagcggtagagcattgcattgcctgatatgcataaggtcccaggtttgcctccattgcctgggcaattggtaacagaaatagaacaacatacatgtcatatactccaaggcctagaaaagatcagttctgttagtgttgaaacttgaaaatgtaatgaacaacctgtcttcgtttgtttctttgttgctatgataaaacactggccaaaacaacttggaagaaaggggtttatttcaccttagacgtccaggtcacagtccacctctgaaggaagtcctgatagctcaaaacctagaagcaggaaccgaagcagacaccctgagaagtgttgctttctggcttcatccccatggcttgctcagcctggttctttatgtaatccagaaccagcagctcagggcgtcactctacaggaagagctgggtccctacaaatcagtcattaatcagaaacacaccccactagcatacctacagcacagtcctaacaaagacagtttctccacgaggttcccctgccctgatatgtctaggtttatgtcaagttgacaaaagccaaccagcatggccccccacccaaacccgaatgcctgtttcttgttgatggctctgacaggacaaggcaagagggtggattagttttgactgaatagtaactatccttccttccttctatgatggagtccttggtctgaagtgtggtctcatttccttatgtctgtgtttgctcagttttgtagcaaggcctactggtttaggtcccttgcctttcagagtggttagtaatgaattccagagtaggagataacaaacagtggatggagctgtagcctgattgacaggagagcggtgccaggggctaagggagtggccggagcctgcctcctgctgggaagtcttgtgatttagaagagcatcttgtccttggggttttggtgcaatgggactcggcatattctagacccttcttgagtgtcgttttgtctgctggccagtcactgtcttcaggcactgagagcttactggtcaggaggtattcaggcactgccttctgaggtaggtcaacattccaagtttaatacattggttagtttttttaaagctttaatacatttacctatccttggcagaaggtgaatgcggttttatttttttaattctgaagcagccaggctcgtggcccagcctctaatccagccacttagaggcctgaggcaggaggattactttactgcacaatggcctaggctatagatagtaaggccttacgtcaatttttttttccttaggaagaaaattctgaaacaggctctcctcccctcccccgcattgacctgaaagacagttgtgcctctcacagctgcccctacctagccagggccacgttcaaaacgctgtcctcagtaacagccttgtactgggactaactaatcagatactggtttaggagtccctgtgcagagaaacttgaaggttgacacttgggcatttgatagttctcggcttactaaagaaaacgaaaatctcaatatctgactcgtagcagcccttagatagacatttcataatattttttctgcagaattaatgggaactaaatacattagttaagaaattgggctagggctggtgagatggctcagtgggtaagagcacccgaccgctcttccgaaggtcaggagttcaaatcccagcaaccacatggtggctcacaaccatccgtaatgagatctgactccctcttctagagtgtctgaggacagctacagtgtacttacatataataaataataaataaatctaaaaaaataaataaataaaatgctaaaaaaaaaaaaagaaattgggctaaatgtagactagcaactaattttaaaaactatgaagtatgcatttagatttggctggtttggagggtatgtgtgtgtaattttttgtaagtctttttccactttgtgcctggaaaatttcaagctatttttatacctcaaacaaatgttaccccctagagtttactgcaggattttgtaaatgttctttttgtgtgtgtagaggagaatatgaatttaggctcttcaacattcatgtggcaagacagttacctaaaacggaaagcaaacctactgtagtagttttggttttgggtctttgttcgtgctgccagtatttctagccagtgatgtgcgacccatctcctctgccatcttctccataccagaggctagagtgactcgctttggtgaccacaaagaccaagttaatcaagtaggatttttcctgagtccaggaaaagttagttttgttctgcacagagacagggtttctctgtgtagccgtagctgccctggaactcactctgtagaccaggctggcctcaagctcagaaatctgcctgcctctgcctcacaagtgctaggattaaaggtgtgtgccaccactgcctggctgttttcttaaagcaggcagcctctcactgtgcagcccaggctagcctggagctcatgtgtttacctagctatcttcacatttggagcagtccattccccccaccacccatgtgctggaattagaggatctgtcaccacatctgacaattgcttgtgtcaagacacacactttgttacattgggaccagtaagaaaagcatgaaatttgcgtttcatttttacacaggggccatgttgaccttgtaatgtatgttccagttttagttcgtgtagctactcaagtgagcacttccgttttcttagactgtctcactgtggcctaggctggccagtaacttgtggtcctccctccttagtctcttgagttctaaagtgtgccactgtgtccagcttgaactacaccctgatttaagatgctcctttctcgtaaatagtttgtctccaaaataaatgatactttcttacaagagatagcaccatgggcttagcaggtgaagtcttttgctaccaaacacctgcattccaccccaaggtcccacgtggtggaatgaaagaaccaccttcctaaacagcacagatgctctcacacacagcaaatgaagtgtaagaaaaaaaaaattttttttttttttttttttttgagacaggatttctctgtgtagccctggctgtcctagaactcactctgtagaccagtctggcctggaactcagaaatccgcctgcctctacctcccaagtgctgggattaaaggcgtgcgctaccaccgctcagcttaagaaatgttttttaaaaagaaatactgtcctggtattgagcagacatctatcctgtcagaaaaaaaagaaacaatctgtgtaatagataatgaagggggtctctttggaggggctgagtgctgttgctgtttcaagacaaagcagggaagaacagaagacatcaaggtgtctaaaggctatttcctgctgcagagagtgtggagtaaatctttggcgggggtagagaaggagaagagagagactggatctcaggtagccaaggatgatcttgattcttttgtgtttgtttgctttttattgattctgttttgttctttgtggggaagatggttgagacaggatgttactgtatagtcatggctgtcctggaccttgatacatagaccaggctagcctcaaactcagagaatctgcctgctcttcctcctgagtgcggggattaaagctgtgcaccatcatgatgttgaattcttaatcctttcccaagtgttggctttacaaatgtctttcctttagggaaaaagaagggaaaagttgggaagggagctaacctaacactgtgttctttctcttctctgtaacccaacaacagtcaggcagtgctatctcagaggcagtgttttttttttttttttttttttttttaaaggcagaatagcacgtgttagggttcctgttgctgtgctgatacaccatgacaacagtaacttttataaagaaaaacattttattggggctgttcagaggtttagtttattattggcatggtaggaagcaaagtggtatgcaaacatagggaggagctaaaagttctgcatctggattgacaggcagcaggaagacagtgggccactaactaggccaggcctcaacagccacccttaatgacgcacttcttatgagtctgtggggtcattttcattcagatcaccatactgtgttcttcctacttgcagtacaagtgggagcttagtccctgccccttcctgcccattgcaatggttctgtattggaggcctgggggcactttcttttactgggcaggattgtgctagacagactctttgaaggacaggggaaaaataggaataaagcaggagcttcggcctaaggcacctagcctggcatggaagccagatgccgtaataactagtgatgtatagtgatgcttgtggagaagagaataggagctctcagagtatccaggtgtgtctggctgttggaggctgactatagaagaaatggtatgtaagcagcagcagccacacttcctgtcatatggttgtgtgaccaggttttcagtgtcctaaccctgagactgtccttagcttcatgcagctgccctgtttcaggaccaactcagtctacatgttgggtttgtctcttctttaaagggcaggctagtgaatccaaagctttgcatgtgctgctgggaactctgggagagaatgttatagccacacgcctttttgtatagggatgcagagggtctggggattaaaggatcaaagaggtggcctggggtttttgttgttgttgttgttttgttttgttttgttttttttaaagatttatttatttatttattctatgtaagtacactgtagacacaccagaagagggagtcagatctccttacggatggttgtgagccaccatgtggttgctgggatttgaactatggaccttcagaagagcaatcgggtgctcttacccactgagccatctcaccagcccttgtttttttttttttctttaataccctagtcctttttcttacagtttgataagcactgtacttttgttaaggacatggctcttggttttttgagacatctgtaggctggggccaatcttgaactgtcaggtatgtcccctcccaggttctgaatgatgcatctgtgcactcctggctgactagaattttcttactgtatgtttgtgtgtttaattgggggagaggtatctttctatgtaatccatgctagcctgacttgattcccctgccctaccctttaagacaactgagttcttacattctgtcatggttggcccctaaagggagagattaaatttgctttagagttttaattgttaaattttaaataataccagataaagatcttgtagttaaacagtacttgatcaaaggcccagcacccaataaaagcacgatattcatgaaactgaagtaaaagatcaggtgtgggtatattgaggatgcagacaccagatagtcaggaattcaaagttttcatcatatacattcagagtacccacagacagaaaacacatattttttttaaaagtcctgattgaagagttggctcagcagtttagagcattgactgctcttgcagaggtcctgagttcaattcccaacaaccacatggtggctcacaaccatctgtaattctgtaatgagatctgatgccctcttctgttgtgtctgaagacagctacagtgtactcataaataaagaaattcttttaaaaaaaaaataaaagtactcatcaggcagaagaggtggtttggctctcttagtgagttttaaaatcagccctgccacatgaagccccgcccgggggtgaagggataaaacacattagggaaagcctgggtcctagataccatgaagttttaaagatttcctattttaaaaaaactaagaacaacccttttcacactgcacgagagagcagtgagttgcagtactcatctgcactggaaccaaacctgcgcttcagctgtttcttttctggtccactctgcactggtgggcatgttcttgctgtgtagcccaacctggccttgaaatcatgatcctcttgtcgtgttagtccaagctaagaaaggagaaagggcagcattgctgtgctttgtaccacagtctgacggtcctgcttgtcggtgctctcgtcttccttttgaatctggtgtgcactgaaagcggctagcactccttgtacctgaggtctgacggttcatttttagttatctgctggtgaggaggactatgaaggtctgagcacatagtgtgaataaatgctacacatctcatacaaatttcctttcctctccacaggagttcaaagaaggacgaagagccagccacacagccccccaggtccttttcagccacagggaacctcctctagagctgaaagacacagatgctgctgtgggtgacaacattggctacatcacctttggtgaggctggagaggtagttgagtggtagggtgcttgcctacgctcctggccctgggttcattctcggcactgcagagaacaaccccaaaaccttcatggcagggtgcccacatctaggcgaacttaaggaacatttttagtgggcagaagcaggcacggcatgtttgtgtttcctcttgtgggctgtgacgctgtcacaggggactgattacagagataggcactgttttgctgctgacatcatttcctgtttgtttttcttaaatggtaaaggaaaaaggtaacctgggattgtcaggagttaggggcggccatgtcagcatcgctcagcagctcaggagacttctctgtcggttagcagtgcttgaatttttgcttctaatgcccaagctcagctgcaatttgctgaggcttcttttccactgaagataccaaacttcacgtgtgtcggcttagtgagctggctgactcctcatttcaacactgcaggattgtctcctttagttcacctttagctaaggatggagctgtttgttgctggtgactacagttttgttttgttttgttttgttttgttttgttttgttttgttgagacaaggattctccctcttgctctggctatcctagaatttgttatgtagaccaggctgggctcaaactctgagatccacttttttctttattttcttcaaaccaaggtaaactaagaaccagagttctacctttcttctcagccattcatttcagctcagttgatagaactcagggctcttggtgttagtggcaagtacaatacaaacaggagcccagaggcaggtctgcccagagtaaaagtcagaacaggcctttgggtgaagagcagcttatcctgccaggcctgccttagagtttggtagtcatggtcaggagatgagttctcttcagaacctagtttttctgacagtagcagtctgtgctttagcacctagaacccaggacaagctagagttcagaatggtgtccagatttgaaatgagtgcccatagtcatcctggctttctgtgtcgtgagcctcacctcttgcactcataggcactctgcgattgtgttgtctgatggtagcgcacacaccactacaatgccttgttttctgtccctgccttagtgctgttccctcgccacaccaatgccactgctcgagacaacaccatcaacctgatccacacgttccgggactatctgcactaccacattaagtgctctaaggtgagagagaggcaccagcgtccctacggagccattgatttaactcccagtagacactgccccatggcgctgcagagatagctcaacaggaagagttcttagttctttcagaggacctgggttcattttccagtaacctgatgctgtcttctaacctttagtatacataaattcatgtaggcacacaaatacagtaaaaaaaaaaaaactttaaaaagttacagaaaccatctcttggaccaaaagtgcagctcagtggtagaacacttggctagcatgctcaaaagcaccagtttggcccccactaccccagtaagaaaaatgtctctccccttcgccttatccttcctatagcagaggaatgagtctgcatctctggtattgctgcttaaccatcccgttccccttacgtgctgctccccaacatcccccatgacttactccagtgaaaggaactctatctttctagaatgtgagccgccttcagttcttcctgtgtttgctcttaggcctatattcatacacgaatgcgagcaaaaacatccgacttccttaaggtgctcaaccgtgcacgcccagatgccgagaaaaaagaaatgaaaacaatcacgtaagtaggagcagccaccttcccttccctgatgcctgcctgcagcccagggcactgaagagtaccatgtgcgaggccagcaggccacgcgtagagctgcccaagtgcaagtgaaattgaaagggctgcacctggacgcagccggaacatctgaagaagcctgggccagtgcctacttacttctggtctgctcagcaggaaaggtatacagggcaaaggctgccttggtcagggaggaagacgacaagcagagtagtaagcagtgtggctctgtatactcaaggccaacatggcgtgggacctagagttgactctagtgtaagtagcattcagaacacctttagcttcctccacccccaccaccgtgtgtgagaccactgtgcctaattagactctattgccatttgagagctcaactgagtactgtgtagtacgtgagggtttccggtcccaggagcatcaggcatctgtgcttggtgagaagtctgcctttctgtgctgcctcctacagcctgaaggttgctgttctatctgatctctgttcagagactgcatcaatgccatgtcagggtgtaacacctgcatagcatatctaagggtgaacaaggtggatgagaaaggacatgcatgcccaaggaggcacttgttccttctgccctttcaagactttgtctgctggtgcctgcaggttctcctttttctccctgtcttacaaaagtactttccaccagccatcactgtgtgacctgagagagaaagaaaacttgtctgggtgatgtgtcagaactacacagaaccagctactgtgggctaaggcaggaagataagttgagtttgaggttggcctgagtaacattagcaagatcttatatgaaaaccaaacagagaagtgggctgagagaaggcctacctgctacagggctgctgtgtgagcctgagggcttgggtttatactgttacccatgtacacacacactaggcatgggggcacttgcctggaaccctgggacagaggggacagaggggacagacggatgggttgtaggagctctctagccagtcagtttaagtccgtgaattccaaggtcagtgagaaaccctgtttcaaaaaataagacgaagagccaagcatggcagcacacgaatttaaccccaggactcacttggaaggcagaggcatggcttcagtgatttcttggttgttttggttttgtttggggtatgtggttggttggttgggttggggtttttgggtttttgttttttgtttattggtttggggtttttttggttggttgtttggttggttggttttggtttttcgagacagggtttctctgtgtattcctgactgtcctggaactcactttgtagaccaggctgacctcgaactcagaaatcagcctgcctctgcctcccaagtgctgggattaaaggcatgtgccaccatgcccgccaccccaagcaactcttataaaggcagatatttaattggggccagcttacagtttcagaggtttagtccattatcatcatggcaggaagcatggcagcatccaagcagacatggtgctggagaaggagagttctgcaccttgacctgactgtacccaggagaaagaaacttgaatcttgtgtactgggaggaccttcaacacctacccccacagagatttgcttcctctgacaaggccacacctcctaatagtcccacttctcataggccaagcatagtcaagccattgtgtagctcggctgttctggaactctttgtagatctgcctgacctggacctcagagatcctcctgcctctgcctcccaagcactgggcttaaaggtgtgcatcaccaccacccagcaagtctcagtggtttcaagactaccaagttccaagccatccaggccatccagagctgtcaaataggaccccgactcagtggggggccgcagttgactacttaaggaaagtacccattgctgacttctggcctttacacacacacatacacagagagagagagagagagagagagggagcgagcgagcaagcaagcaaagaaaaacaaaatcagacagaaaggtcaaaaggtggggatgttaagatagccctgggactgcttgcatcacctaccttcaccctgataactgccctcatctctctgtcttgtggccagccaggtgttcctggtagttgctgcctaatgggacagaaagaggcaggaattgattcctttcctggtggaggagcctgaggaaggatgaaccctttacaggaataaatttagttgttcgaaaacctctattatgctacgtatagacattgaaaattaaagtgggcctgttaggagtgtggccccaagctagaagttgcctgtggagtcagcacaacacagtgctcagcttttcttgtgtggaaggccatcaagcagtttcatttggggtgagcacaaaacatggagagctctgtttcttctgctctccttttctgtagttctcaattccaggctactttaccaaatacccttggagtaagtaccatttgcaggctctttatgggtctagtaaccctctggggactcactgggtagaaaaggataccacagctcaggaagccagaaccaggccagggttctgtgagccagagtacatgccaactgacaaccaggatgtctctaacctctgaagttggatttttggggggttaattggttggttgttttagccagagtctaattatatatatccctggctaacctagaacttacagagatccacatgccttcacctcccgagtgctgggattaaaagcatataccaccatgcctagctaatgtttgaaaattttaaggtggctttgaactttctttctcctgttgaaaggttaagaaattgttacctaaatgggatcaactgggtagaaggagcctcagctgaaattcatgtctagccatctgaaagctagaggaaagtgggtgtggtagcacatgcctttatcccagcactgtcaggaggtagaggcaagcctagcgtacacacagttccaggccatctagggccacagcgtgagacactgcctttaaaaaaaaattgcagatcattttctcatctgctgggaacatccagtgtgcttatgggcttgccatggtgttacttagtgctggggcttgactgagccctgtggctctagcacctttgctggaagactttcccttcctctttgtttggtctcctttgggcaatccaccccaggcctagagtataggctgggaggaaaggacatctggagtaagccttcactctgtctctgcttttgaagggggaagactttttcatcccgctaactcttgggaactgaggaggaagcgctgtcgaccgaaggctggactgcttgctactggataatcgtagcccttcatgttgcaccttctccaggttcttgagggattctccatttgggttccattttgtacgagtttggcaaataacctgcagaaacgagctgtgcttgcaaggacttgatagttcctaagaattaaaaaaaaaaaaaaaattccacttgatcaacttaattcccttttatttttcctccctcactccccttccttttccaagctgtttgctttgcaatatgttactggtaatgagttgcaggtaatgcaatcttaacttgttttcttctaagtatttgagttcaaaactcctgtatctaaagaaatacggttggggtcattaataaagaaaatctttctatcttacttgagaatttgttgatttttctcgactgtgagtccaaaggagaagaggaaagggtggctctacactgcccttgtaccagcaagcctcccttctcttgtggaaggaggggctggtatgtaaactgtgaggttgggtggggtggggagaagtggggggcttatctgtttgggttcattttattggtcctgctttgtagcccatgttggcctcacactccagcagtcttcatgcctcagctttttgagttctgggattataggaatgagccacctttggtttttgtttctttaaacatgctttttccgttgtaaagcttggttgctaacactacccagctgagtagccaggaaactcccttagtgcaacagacaaactattctgggaatgtacttcagtggatataacatgcaggcttaactttttcaaaatctactttaataagggttcttaaagattggggagaatgatggacaagggggatggggaccttttaaaagttctttggggcaactccagtcttcactgtcaggatatatgtagtccagtctaaaacatcaaaagtcaatagtgacagtccagtccagccaaacaggaatcagtagcaatggaacaatccagaagaaacctcgaagctctgctgtattggcgcaagtcccgaagcagtcagaataccacaagaagttttttggggagtttttctcttatgaactcacacaagcgaagatcagtgaagaccagcaaaatgttgcaagagcgacctctatggggttgtatttatattctttccaagagcgacctctatggggttgtatttattatattctttccaagagtgacctctatggggttgtatttatattctttccaaataccacgccttctcaagcattggcttcatcaagacatcacatgcccctaacccgactgcctgagcaaaatatcctctgacaagacagctttcaggggctggccagatggctcagcaggtaagagcactgactgctcttccaaaggtcctgagttcaaattccagcaaccacatggtggctcacagtcattcgtaatgagatctgatgccctcttctgaggtgtcagaagacagctacagtgtagtcacatataataaataagtctttaggccagagcaaacagagctggagagagaagaaaaagtgtctgaagacaattacagtgtacttataattaataaatctttaaaaaaaagagacagctttcagaaaaacacatgacacaactaagtctccaaatacattttccactttaatgtttacctaaacttttatcaatcccaaatttcaatcaccagtatcctataatctgggtttggtggcacacacttttaatatttcttatgtatgaaagttttgcgtgtgtgtgtgtgtgtgtgtgtgtgtgcgcgcacgcgcacatgaactagaaaaggaaataatattctttggagtggagttacaggtgttcttgagctgctctgtggatctaaagccaacccaggccttggcagaagcagcagattctaaccacttactcctccatctgctatggcatatacctttattcttagcacttcagaggtagaggcaggaggctcagaagttcaaagttgtcctcagctatacagttgagtttggggccaatctgggctatctcaaaaaaaaaaaaaaaatgcttccgcctactctgcatgtgtgtgtgtgagaggtggggacttggagtgggcagttttgaaacagggttttgctgtatagtctagctgccctcaaactcagagatgcacccgtctgtgcttctgaggaacaattgtattaaaactgcatgttgttctatcataaataataaaacgtggtactgcaggacttcactatggtgctaatgcagactgggtgggcaccattactcattacacattccaacagatctgtgtactccctaaagctcactcactgtaggaaatgcctgctgaatacctagcaaatacctggatacctagcaaagtgtgctgtctcctagcaagatatggtgccaaatccaggatgatttggaggctatttttctgtctccatttcaggcagtgtgttgcagactagtttaactatcagtaaattgtgcagtcacctgactttatacaggcggcacttttattttctacaattttaattttgagataacatgtacatgcatgttagagatgataacgtgaggtcctgtcaccttcccagtgctgacaccttgagtgattgtggtgcagtgtctgtcacaccagtagaatgacaaggctatatgctttctacacatttaacccattttatttaacacttctgctgttgtatgtttctgatgttctctgcatttttctcacttggatggttttctgaaactagcatttgtaggatggagtagtacggtcactacatcgcatgtagcattgattggaaatgtgattttgtacatgtgtgtcaggacagcgttagagtaccattttaccccatccgttgtcaaatttaaaacaggtcattatttttaaatatgtcctcatgtcattaggcataattcattagaatggggtcctagggacctgcaaggtctcctgtttctgggaggtagtaaagtatcttgagagggatagacttaatagagtttcactgatagttttgatagaggagttgttcttgttggggtgttgcttttggagacaggatcctgctgtctgatccagtctggcttttgcctctcaagtgctgggactacaagcatacaccaccatgagcaactacttttttgttccatctttttgttttgtcttgtttttgacaaagcatcacttggcccaggctggtctccagctcagcagtcatcttgccttggtcttcaagggcttggatggcatgtttgctccactcagccctgcctcgcctttccctctgtgccgacttaagaaagagaactctggattgccctgtgcgttcttggcagtggtgacaagttgcttgctttgtttgtttggagatcacccgtcaccctttggtatattcttcttttcccttctgaaccctgtttctgcctacttaatctcctagtcttagactaggaaaaagatactatgtcctccagcaaccattagcaatccttagggaagggtgggattttatgggcacctcctccctctaacataaatgttggaattaatgcaggtaccctgagctgctgtgtggttgtggttccaacagcaacatcatgccttgatggcagtgtttcgtgatgctcttcccattttccaggtcttgaattctcttttacttcacttctgtcttaggattttacttctaatgaagagagagaggctttaaccaggacaactcttttttttttttttaaatatttttatttgtttcacactatacacaccaatcccactcatctccccactccataactggcttgcaacctgtcccccaaaagaagaaaaagcataaaaaacatctcatcgtggaaactgtagtatgcctcagattgctacagttagtataccatcctgtctacacatctttacttgcaaatgttcactgcagtgagtcattggtctggttctgggcctctggcttctgtcacaccatcaatactggaccctcgccaggattcctccccgttatcctgttgctgccttgtgtcctggtggatggatctcatgcagctttggatctgcatgcccacccctttctcaggctcagcaattcctacatgagataaatattggggtggtcgattgagcacacacagtttttaaaaactataaactccagtcctccttgggaggtaaaagcaggtgggtttctgtgacttcaaaacaagcctatttgatacaatgaattccaggcaagccaaggctgcataatgtaaccatatctcaaaacaaaacaaaaacaaaaaaacagctaggtgatgggggtgaattccagcacttgggggtgaattccagcacttgggggtgggggtagggataaacaggcagctctcttgaattcaaggctagtctggtctacagagttctaggacagccagttatagacaaatactgactcaaaaaaaaagccgggcgcccagcacttgggaggcagaggtagtcggatttctgagttcgaggcctgcctggtctacaaagtgagttccagggcagccagggctatacagagaaaccctgcctcaaacaaaacaaaacaaaacaaaacaaagaaacaaaaacctccaatggggtcttaccatctagttcaggcaggcaagcaacagcaataatctgactttttttggggggtggggggggagatagggagcagggcagagtacctctgagacaattaggtttctaaagaagtactacagggcctggcatcagtggcgcatgcctttaattccagcagaggcaggtggatttctgagtttgaggctagcctggtctacagagtgagttccaggacagccagggctatacagagaaaccctgtcttgagaaaaaaaaaatcatagaacatatggcattaaatattcttttttaaaaaatatttattttatggggctggagagatggcttagcagtaaagagcattgactgcttttccagaggtcctaagttcaattctcagcaacaggggattcacatatattcacatacataaattaataaattaaaaaaaatatttctcttttttttatatatatgagtacaccaccattgttctctttggacacaccagaagagagcatcagatctcattacagatggttgtgagccaccatgtggttgctgggatttgaactcaggacctctggaagggcagtcagtgctcttcactgctgagccatctctccagccctaaaatattcttctaataataaacaaaccctgtttcaattccacaatgtgttgtcaacaaccaaaacccatgctgatgggagaaataaaagacattttcttcagtgacttagccactggtaaggtgtccatgctcctgtaaacacctctaatgaaactcactgaatccttaaaaaaaaaaaaaaaaagacagcaggggacaagagggtaccaaatgtgcatgcttgtagggtgatgtgacaggacatagtgataattgatacatgctaaatgggggctaagcatggtgcgttgggcatagtggctcacacttgtatcccagcacttccaaggacaaggcagagaagccctttgcgttcctggcccacagagtgagaccttgcttcagcacaatgggaaaagaacagataaatgcatgttatgcattgtagacatctctagtacatacagacagaaagacatgcatagattatatttacttgggtggggtaccccccacaccctgcgctagggatggatcccagagcctcatgtatgctacactgtcaccaactaccactgagctacactctggttctagaatttagctgggtaagttcagttctcctttttacaatgtttttaaaattgtgtgtgtgtgtgtgtgtgtgtgtgtgtgtgtgtgtgtgtgtgtgtgtgtgtgtgtgtgtgttcgtgagtgcaggtgcccttgaaggttggctctcttccctaagatggttaggttgcctctgttggagagaggagacgaggaacctctaaatctgaatggaacatgtttagcaggaaaagggatatgagattgcagtaagatgtgggggaggggtatgttggataaggaaggaaaaagccctaacctaatccatcatatgtggcagctggcattcggttgcctttatatagggtctgcctgatgcccccttactcaatcttccctgaaacctaaacagagaatatttgttaagattgctgggattcaagggtctcacacaggataggacagggtttcttctgcctcagcgactgaatacagatttctcaaagtcagaatcctggccagtctgttacagtgtctagaagggacatccgcatcagcttttaagtgcaggccaactgggtataaaccagtgatcctagcacttgggaagctgagacaggaggctcaagagtttaaggttagccagcatgctggccaatctgttacagtatcgagaccaggggtgctcaacctgtaggtctcaagcccattgggggttcaaagtaccctttcacaggggtcacctaagaccattaaaagacatagatgtttacacaacaattcaccaacagtttgcttcataatttacagttatgaagtagcaacgaaatattgggggtgggggtgccgttcaccacaacatgagaaactgtattaaagggtcgaagcatctgaatggttgagaaccactgacctagaaggcatgttgtccaaatcagcttcaagtgcatgccaactgggtgtggtagatgcaaaccaaggaccccagcacttgggaggctgaggcaggaaggtcaggcgtacaaggttagccgtctcattggtgtggggcgtattaaacagtagctgggaaaacagttcagagtacaggaaatttcatctgcttccctggtccagagtaactgctttcagacttcataaagcacacacccacccagtccctgatgcatcaggaaaatcaaacatgaaagtgtaccagggagatgtgggaggcttctgggacagtctggattgtccagcccagcacatgctctccaccaggaaaacatcaggtcagggccacaggcagcagatggagtgtctgaaaacttgcaccagagggcaaaagaaactgtcatggccgagggcttgacagttacagagaggaagcagatgagctggtgatggagacgttgaactgaacacaggagagaacccagactcttcagctcccgctgcccgagctgtcccccctcacacgccataccacacacagtgtttagacagacagagaagaaacagacatcctgaatctctggggaaggaagctgggaacagaagacaagcttgtttattcctggcagcccctatatccaaggggtctagtaccattttagactagccccaggctgaactctcccagagcctgactcatgccccactgccactgcgtgggactgagactgtgccggccggccagccgtcatcctggaggatggatttaagaccggcctgcttagtctcccagcagaagccccacctctccaggaccctggaatgtgcgatgtagggcaaaaggtaccagagtcctcagacctccagccgttcaggctgcatctctccaaggatggtgaagtcttgctctgtgaggaggttggtctcatctccattccagcttactcactgcagccccagcctggttcagttcttaggaagtttgactgggctcccctcccttctccctaaagctgcatttgataaagagtagaaattggacacagaactctcggcttccgcactgtgaacgtgtccttctctctgcaccttgtttcctcagttcttctataaagcaaaaatgccaccccttggatgtcctaggctcccgatctgccttgcaaggcagagcacttgtttgaagggaacaggtgcagagaccagaaatcctaacaatgttctcattaaccttaatcaagtactcaagagtatgggctcatctggttcatgttacctgctttgctggagggggactcttctttggttgctttgaaacaaggtctgactatgtttctgaagctggctgcaacttgctgccacctacacgtctgtctcaacacgcaagtgctaggaccacaaacccaggttaggtaagtacaattttgagctccactctgcagataaagaaagggagttgagagaacttaaacagttttcccaaattcacacagttaaagcagtgggaccagcagccctgttacgctcactgtggggtacacctctgaaccccatggaggtggaagagccagccatttgttgacttgacctccccttggtactgtcaagcattgtggtatccacaggtccctatgcggacatcccccaccacaactgcaacaggtgacttttccttctgggaaggtttggcagtattgaagcagtctcccccgtaacccaggccagcctccgatttacactgatcccactgcctcagctccgaaatgttagaaatcacagatttgaacctctctatcagatccttttatgccttatgcatctccccgaaacttgactcagaaaccattcaggactggggggtgtagttccattgataagagtgctaacctaacatccatgaactcatgagttctgtaacctgcctgtcatgtggtggagtgtaggagaaccatcagactctgtgacatataacttgggaggtggagggaaaaggatcaagttcaaggtgacactccactccacaggagtttgaggccagcctaggcaatatgagagagaccctgtctcacaagaaaagttgagagatatgaggatgactgcagacccgggaagacaaggctggatcaggcgcccagccccacctccatcttacatcgtgcatgatcctttggtgtgtcagcagaagtatctggctggttacgggctgctgcctggcacattcagagattaagatacctaaaaatggctctgttagtgtgtgtgtgtgtggggggggagtgttgtgtaccaaacattattcattagctggaatgtgtttcccaggtaatgttcagcaatgacagcaagagggttctcagaggtaaggaaacaccacccaggtttcatgatgtagccgactgctagggaagggttcacttacacaggagggggagccctcccagtaaaagcagtcaggatgtgccacgtcccaccccagaggcggagccaagactgaggtccttcagcttggactcctccatcccttcaggagtccaggccaggccagagtctgagcaggcaagcctggttcctgctgtctccaccatagaaggcagcaccatgcgctcactgaccaggacaccaggcatggcccgaagacctgcaagagtggctgatgtgactctttgatccgcagaggaagagctagcaagcaccacctgctcctaacagccatgtgagtagctacacatcacccctccaggtctgaccctgaggtcgacactgcactggctcaagccattcaggagacatggtccacaccccaccaggacattacccctggataatctctacctttcttgctattctgagggaggctggtgcgggtccgaagggtgggtctctagctcaagccagctctcagtagtttaataaaagtgggtggcgaagggagaaaggggaacaaactagggtgctaccggagacagaaagctaggtctgagtggcaggctgtgggggagcctgaaggaggcggccagtggaggggaaagcatcaggagtgcgggttgggagcactgggagggaagaagagcatcttgcagcctaaggtaaccgtacagctgatgctggtcctaggacagaggccagaggagcagagggcagaatccttctgtattgactttgatcctagcaacagcagatgctcctgttgacaggatccaggacccctcccactggccctgcaatgtggcctggggctgagaccaggcagtcaaggaaaagtaagctcagtttggaggcttttccttgtcacctggtttcagcttgtatttaggggggtctttgtttagtacccccaattccttaccaagcatctccccacccttccctccggttcccaggaagggccctgttgctagtgtggagcggatgagtcaagtttatgggctggaagtcctacccggaggctgttcactgaagtgtaacaggctccacgtggagacagggtgggggtgcgggaacagagcactctgtgacttcccagacctggccttcgggagcctctcacccagtggctggccagttactgtcctctcttggcaccctgatgtgggtaggcaaagattgacagatgctttgggtaggttgc

SEQ ID NO: 592 - DNA, 1436 bp, Mus musculus
agcggaagtggccggctggagccgggggctgggcggggaccgggatcgtcaagtaaggcggcggcggaggcggcggcggctcggcaggcgggttgaagcttcgggggccagccgccgccatgatcctgctggaggtgaacaaccgcatcatcgaggagacgctcgcgctcaagttcgagaacgcggccgccggaaacaaaccagaagctgtagaagtaacatttgcagattttgatggcgtcctttatcatatttcaaatcctaatggagacaaaacaaaagtgatggtcagtatttctttgaaattctacaaggaacttcaggcacatggagctgatgagttgttaaagagagtgtatgggagcttcttggtaaatccagaaccaggatataatgtttctttgctatatgacctggaaaatctacctgcatccaaggattctattgtgcatcaggctggcatgttgaagcgaaattgttttgcctctgtgtttgagaaatacttccaattccaagaagagggcaaagaaggagagaacagagcagttatccattatagggatgatgagaccatgtatgtggaatctaagaaagacagagtcacagtagtcttcagcacggtttttaaagatgacgacgatgtggtcatcggaaaggtgttcatgcaggagttcaaagaaggacgaagagccagccacacagccccccaggtccttttcagccacagggaacctcctctagagctgaaagacacagatgctgctgtgggtgacaacattggctacatcacctttgtgctgttccctcgccacaccaatgccactgctcgagacaacaccatcaacctgatccacacgttccgggactatctgcactaccacattaagtgctctaaggcctatattcatacacgaatgcgagcaaaaacatccgacttccttaaggtgctcaaccgtgcacgcccagatgccgagaaaaaagaaatgaaaacaatcacggggaagactttttcatcccgctaactcttgggaactgaggaggaagcgctgtcgaccgaaggctggactgcttgctactggataatcgtagcccttcatgttgcaccttctccaggttcttgagggattctccatttgggttccattttgtacgagtttggcaaataacctgcagaaacgagctgtgcttgcaaggacttgatagttcctaagaattaaaaaaaaaaaaaaaattccacttgatcaacttaattcccttttatttttcctccctcactccccttccttttccaagctgtttgctttgcaatatgttactggtaatgagttgcaggtaatgcaatcttaacttgttttcttctaagtatttgagttcaaaactcctgtatctaaagaaatacggttggggtcattaataaagaaaatctttctatctta

SEQ ID NO: 593 - protein, 319 aa, Mus musculus
GGGGGGGGSAGGLKLRGPAAAMILLEVNNRIIEETLALKFENAAAGNKPEAVEVTFADFDGVLYHNPNGDKTKVMVSISLKFYKELQAHGADELLKRVYGSFLVNPEPGYNVSLLYDLENLPASKDSIVHQAGMLKRNCFASVFEKYFQFQEEGKEGENRAVIHYRDDETMYVESKKDRVTVVFSTVFKDDDDVVIGKVFMQEFKEGRRASHTAPQVLFSHREPPLELKDTDAAVGDNIGYITFVLFPRHTNATARDNTINLIHTFRDYLHYHIKCSKAYIHTRMRAKTSDFLKVLNRARPDAEKKEMKTITGKTFSSR

SEQ ID NO: 594 - DNA, 57008 bp, Homo sapiens
  misc_feature (1)...(57008): n = A,T,C or G
tgttcactctattattgaaagtaggacattgaagtctccaactattatcgtagaactatttttccctttaattctgtccatatttgctttatatattttggactctgttgtttgatgtgtatatgtttataattattatattttcctgatgaattgatcctattatcaatataaacactttttgtctcttataacaattcttgacttaaaatatattctttctgatactagcatagccattccagctctattttggttacagtttgcctagaatatcttttttttttttttcagagacacagtctcaccctgccacccagactggaatgtagtggcacaaacatagctcactgcagccatggctgcatagtattcccggactaaagcaatccttccacctcaacctctccagtagctggaaccaggtgtgcaccaccattcttggctaattttttttatttttagtagagacagggtcttgccatgttacctaggctgatctcaaactcctggctcaggtgatcttcctgccttggtcttccaaagtgctgggactggccaggcatggtggctcatgcctgtaataccagcactttgggaggctgaggtgggtggatcacttgaggttaggagctcgagactagcctggccaacatggtgaaaccccatctctacttaaaatacaaaaaaattagctggggtgtggtggtacccacctgcagtcccagctactcaggaggctggggcaggagaatgactcgaaccccagagacagaggttgcagtgagccacttcactccagcctgggcaacagagcgagactctgtctcaaaaaaaacaaaagacaaagtgctgagattacaggtatgagccactgtgcccagtcccagaatatatttttctattctttgattttcaacctatttgcatctttggatcttaagttagtctctagtaaaagcatatagttggatcattttttaaaacttcattttgctggccaggtgcagtggctcacgcctgtaatcccagcactttaggaggccgaggcgggcagatcacttgaggttgtggtgactcacgcctataatcccagcactttaggaggccaagacgggcagatcacttgaggtcaggagtttgagaccagcctggccaacatggtgaaaccccatttttactaaaaaaaaaaaaaaaaaaatagctggacatggtagcatgtgcctgtagtccgagctacacatgaggctgagacaggagactcgcttgaacccgggaggcggaggttgcagtgagccaagatcgtaccactgcacttcagcctgggcgacagagcaagattctgtctcaaaaaaaaaaaaaaatttattttgccaatctctgtcttttaattgtttaatccatttacattttaaatgattatcgataataaagaacttacctctactatcatgctatttattttctttttcttttttttttttttacttttaatttaggttcagggtacatgtgcgggtaataagcataatactcaataggtagtttttttgatcctcaccctcctcccacccttcaccctcaagtaggccccggtgtctcttgttcccttctttgtgtccatatatactcaatgtttacctcccacttacaagtaagaatatgtggtatttggctgtctttttttttttttttttgaaatggattttccctctctcacccaggctggagttcagtgtcccaatcttggcccactgcaacctccacctctcaggttcaagtaattctcctgtctcagcctcaagagtagctgcgattacaggcacaagacaccagagctggctaatttttgtatttttcgtagagacggggtttcatcatgttgaacaggctagtctcgaactcctgacctcaggtgatccacccgcctcagcctcccaaagtgctggaattagaggtgtgagccactatgcctggctccttcaagttttgaaagaacattttacaggctataatattcctggttgacaggtttttttatttcaccactttaaagatatcatcattccactgccttcatggtttctgatgaaaaattagctgttgttcttatgcaggagacttgtaaatgagtcacttctctctttcactttaaagattttctctttatttctggctttcaacagttttgactataatatgtctcagtgtgaatctctgagtttatcctgctttaagtttatcaagcttattagatgtattgattcacatctttcaccacatctgggaactttatggccattacttgtttaaatatttttccttcccctttctctctctctcctctttctgtaactcccataacgtgtgttttgatatgcttaatttgtgtcccacatgtccaataagctctgttcaattgttttatttttgttcctcaaactgggtaattttaactgccctatcttcaagttcactgattctttcttctgcctgctcaaatgtgctgttgaccccctctagtaatttctgcacttcagctattgtacttctcagctccaaaatttttatttggttcctttttattatttctatctctttatgatattctatgcttgtatatacaccatgctcccgattttccttagctattcttcatggtttccatgagctcttttcttttttccttcagcatatttaagacagttaagtctttttatataaatccaacatctgggctcttcacggatagtttctatcaatttttttctatattccttttactatgaatgaaccatactttcattttatgttgcatgctttataattttctgatgagaactggaaattttgaatattaaaattgtaactcttgaaattagattttctcttctgccccagtttcagggattactgttgcctgaagaaagctacagtcatctgtttatttagtgccttttcctaactctgttgcaaagactatattccttggcatgtgtagtcactaaagactcataatttctgcagtcagccagtgacctaacagagatttccttaaatgcctgggtccaaaaaagaaaagaaaaggctgttttgtctctttaaatcccttccatcactcaggaggctgaggcaggaggattgcttgagcccaggagtttgagtctagcctgagcaacatagcaagacttcatctttttttttttctttttgagataagagtctcgctctgtcacccaggctggagcacagtggcatgatcttggctcactgcaccctccaccttccaggttcaagcaattcccctagcctcagcctcccgagtagctgggattacaggcacataaccaagcctggctaatttttttcatttttagtagagacagggtttcaccatgttgaccaggctggtctcgaacccctgacatcaagcgatctgcccgcctcagcctcccaaagtgctgggattataggtgtaagccaccgtgcccggccaagacctcatctttaacaaaaaaaaagaaagaaaaaagaaaagaaaaaaaaagagctttttaaatcccctccaccaataagaaaaccatttcagctgagcccatggaggctgaaacaataaccaaccttagcagtggccccttagcaaactaaggcatatcaaaatacacaagcctgatttttggaggacaaggtccctatagcccaccctcacatcgccaagcacatcagggatacagactgccatctccacaactggatgctgctgggaagaattcaccaaaattcaccagcctctttcttaatcaagtactcccttcaatgctgcaagtgcttcactagagtctggagctccaaatagttggttctgacagttcttgccagctcaatagtggtttcagtgaagggatcaattctactctgctatcttccatgacatcactcttcccccaccccaccacattagtctttatcccataggaaacagaaggcaccctcaagataggataatttgagaagaatgtatttaagaaggattatttacaaaagtgtggatgtaggggagccagaagagggaatgcattaacccaggactaatagcagccaagctgatactatccctaagcccaaagggttgaggagagggatcaggaccaggaaggaaggaaagagttgtgctgaggtggccaccttgaaaggggcagtgacatttggttgatgaacacagccagcctgaggcgacctcaaaagatgaaggaagcccaagattaaatagcctgatattactcttttgcctcctcctcctactactactacttctgttccccttcctcctgctggggctccttattggccaaccaaacacccaggcataagggagtccagttgatataggggtgaaaaaggatgaagagtggatctggaggactaactggagaatggccagacagccattccaaccccaaaattacctctagcctctatcttcaagattgaatgcagcaaatttctggctatttaagaacagccactttccaaacacaactggaggattcttccctggagagaagacctcccaatattgacattcgacatctggcacatcatctgtgcaacttacggtcaacctagtgcttctcaaaacgtaatgtgcacttgaatcacctggtgatattgttaaaatgcagattctaaatctgtaggttacagtggaacctggggttctccatttccaatgagctcccagatgatgtcaatgctgctggtccaaggagctagtcaactcatcttgcccaaacacttagagtctccactcagctttttagtgtctcatccttaaatatgaatagattgctaaagtagacagaagtttgagatggccattagcatgagagtaaccaaaataaattagcattaaaaaggacccaaggaaacagagacaaagtggagagaaggaaaactaaaaacaaattcactaatatcctcacagacaggaaaacttatgcctgtccataaaaccaggatagaatattatggaaaagagacagtcagcaggaaaaaaaggtcttgggaattaaaaataagaaaactgaggccgggcgnnnnnnnnnnnnnnnnnnnnnnnnnnnnnnnnnnnnnnnnnnnnnnnnnnnnnnnnnnnnnnnnnnnnnnnnnnnnnnnnnnnnnnnnnnnnnnnnnnnnnnnnnnnnnnnnnnnnnnnnnnnnnnnnnnnnnnnnnnnnnnnnnnnnnnnnnnnnnnnnnnnnnnnnnnnnnnnnnnnnnnnnnnnnnnnnnnnnnnnnnnnnnnnnnnnnnnnnnnnnnnnnnnnnnnnnnnnnnnnnnnnnnnnnnnnnnnnnnnnnnnnnnnnnnnnnnnnnnnnnnnnnnnnnnnnnnnnnnnnnnnnnnnnnnnnnnnnnnnnnnnnnnnnnnnnnnnnnnnnnnnnnnnnnnnnnnnnnnnnnnnnnnnnnnnnnnnnnnnnnnnnnnnnnnnnnnnnnnnnnnnnnnnnnnnnnnnnnnnnnnnnnnnnnnnnnnnnnnnnnnnnnnnnnnnnnnnnnnnnnnnnnnnnnnnnnnnnnnnnnnnnnnnnnnnnnnnnnnnnnnnnnnnnnnnnnnnnnnnnnnnnnnnnnnnnnnnnnnnnnnnnnnnnnnnnnnnnnnnnnnnnnnnnnnnnnnnnnnnnnnnnnnnnnnnnnnnnnnnnnnnnnnnnnnnnnnnnnnnnnnnnnnnnnnnnnnnnnnnnnnnnnnnnnnnnnnnnnnnnnnnnnnnnnnnnnnnnnnnnnnnnnnnnnnnnnnnnnnnnnnnnnnnnnnnnnnnnnnnnnnnnnnnnnnnnnnnnnnnnnnnnnnnnnnnnnnnnnnnnnnnnnnnnnnnnnnnnnnnnnnnnnnnnnnnnnnnnnnnnnnnnnnnnnnnnnnnnnnnnnnnnnnnnnnnnnnnnnnnnnnnnnnnnnnnnnnnnnnnnnnnnnnnnnnnnnnnnnnnnnnnnnnnnnnnnnnnnnnnnnnnnnnnnnnnnnnnnnnnnnnnnnnnnnnnnnnnnnnnnnnnnnnnnnnnnnnnnnnnnnnnnnnnnnnnnnnnnnnnnnnnnnnnnnnnnnnnnnnnnnnnnnnnnnnnnnnnnnnnnnnnnnnnnnnnnnnnnnnnnnnnnnnnnnnnnnnnnnnnnnnnnnnnnnnnnnnnnnnnnnnnnnnnnnnnnnnnnnnnnnnnnnnnnnnnnnnnnnnnnnnnnnnnnnnnnnnnnnnnnnnnnnnnnnnnnnnnnnnnnnnnnnnnnnnnnnnnnnnnnnnnnnnnnnnnnnnnnnnnnnnnnnnnnnnnnnnnnnnnnnnnnnnnnnnnnnnnnnnnnnnnnnnnnnnnnnnnnnnnnnnnnnnnnnnnnnnnnnnnnnnnnnnnnnnnnnnnnnnnnnnnnnnnnnnnnnnnnnnnnnnnnnnnnnnnnnnnnnnnnnnnnnnnnnnnnnnnnnnnnnnnnnnnnnnnnnnnnnnnnnnnnnnnnnnnnnnnnnnnnnnnnnnnnnnnnnnnnnnnnnnnnnnnnnnnnnnnnnnnnnnnnnnnnnnnnnnnnnnnnnnnnnnnnnnnnnnnnnnnnnnnnnnnnnnnnntgggaattgaacaatgagaacacatggacacaggaaggggaacatcacactctggggactgttgtggggtggggggaggggggagggatagcattaggagatatacctaatgctaaatgacgagtcaatgggtgcagcacaccagcatggcacatgtatacatgtgtaactaacctgcacattgtgcacatctaccctaaaacttaaagtataataataataaaaaaataaaaaataaaaaaagaaaatgtagtataccttcaaaaaaaaagggaaaattattttcaaacttgaatatctagcccaacaacacatcaagtgttaaatagaagtaacatattttcaaatatgcaaagattctaacaacatatatcccccatctccctttcttaggaagttattagaggagatgctttagcaaaacaaggaagtaaaccaagaggaagacatgggatccaggaaatgggcaaaaccaccccagaacaacaatgaaggaaaattccagaatgacaactgtacagcaagtctagcgagcagccagtccagattgaaataagaggaaggaaggctctgggacaaaaactccaaagaaaaagtggaacttatatattgagtatatggaaaacattattgctagactttttgatagtcttagagcatttgaggggaaaaaccaactgtaaatactgtttacagaaaatcagacagatgagagaaaaaaggcaataattaaccctaagaaaaatgaagggccatgtaaactagaagtcatgattatagtgcatttcttggctcatcagtaaacaatatttgcatacataataattttaatacagctaggtgcagattattggttttaccaaaagttattacgcagctatatatggtgggaagcagaagtgatagagtcaagttcttatctaccgtgtcaggaagtcaacacataatgctaaaaattcacaaaccaaaaaataatggtataaacatttacttagaaacatgaagataggccgggcacggtgactcacacttgtaatcctagcactttaggaggctaaggcaggcggatcgcttgagttcaggggttcgaggccagccgaagcaacacggtgaaaccctgtctctactaaaaatacaaaaattagctggacatattggtggccacctgtagtcccagctagttggggtctgaggccggaggattgcttgggcccagggaaatcggggcttcagtgagccaagagtgtgccactgcacaccagcctaagtaacaaagtgaaaccctatcagaaagaaagaaagaaagaaaaagacagagagagaaagaaagaaagaaagaaagaaagaaagaaagaaagaaagaaagagattatgaaggtaaatatcaggatgaatttgtgaaagagttgagcatattgcctccaaagagtaggacagggaactgcttttttcattacaagccttttagtattataagcatacatattttaaacaatttataaacattattttagttcaatagtcattaatgttacaaagctagcttatcggtcgggcatggtggctcacgcctgtaatcccagcactttaggaggctaaggcaggtggatcacttgaacccaggagtttgagaccagcctgcccaatacggccaaaccccgtctctacaaaatatacagaaattagcccagcttggtggtgcatgtctatagtcccagctatttggcaggccgaggcaggaggatcacctgagctcgggaggcgggcagtgagcagagatagcaacgtcactccagcttgggtgacaagagtgagacaccatctcaaattaaaaaaaaaaaaaaaaaaaaaaaaaaaaaaaaaaaaaaaaaggccgggcatggtggctcacgcctgtaatcccagcactttgggaggtcgaggcaggaggatcatgatgtcaggagttcgagaccagcctgaccaacatagtgaaaccccgtctctactaaaaatacaaaacattaaaagggcgtggtggcaggcacctttaatcccagctatttgggaggctgaggcaggagaatcgcttgaaccggggaggcagaggttgcagtgagccgagatcatgccattgcactccagcctgggcaagagtgcaagactctgtctcaaaaaaaaaaaaatttaagttagcgtataattttaggggatcagcaatatcctgaagcttatccatagcccgttaagtaatgtttcaaagggctatctgtgccttaatgataggagctagtttcttgttcatttttttatccccatccccaaacacatagcagaaaataaattatttccttgtatgtagaacggactcagctaagtttattatattctccccggaggagggaaaacacaaaacaaggcacaaaggcagaaggtgcagatgtagcacaacgatgagttaagattccgcacgcaggtaacaaggagggtatggtatatctctgccagaggtactggaaggtttcaaaggcagaaaaaaatgtgttccggacacctggacgcagaattggaggcatgacaggaacacagggaggcccatctaagttgcctattcacccaggtgacctctctttcatttctttaattgtccttttaacaatatggggaatttcacccaaggaaagggtcctcttctcgccccagcaggcaaggggtgttcctccagcgcaagttccggccccagctgcccccacgtcccacaggtctcctgccttttggcacgcacactcctgaccactcgctgcttccgcatccctactctgatcctctccccatgcatctctgcctccttagacaactgagaattttattgtctgtttcctttgccagactgtaagttccacgagggcagggcctcgtccatttcatttaccactacatccccagtatagagcaagagcccatgaaaatgtttgttggagaaatgaatgcatgatggtgtcgctggacagctatacctggaaagaaaaagaggcacccccatcaaacaagctgggagctaagaagcccgctgggagacgacaagggcgagcttcttgcgaggtttctgaaatgacaagaccggaagaatggagttggatctctgggacaagcgggagagagaagctgaacagtcaggcaagcctcggggaatgacagctccgcgggggacgcactggtaggcggtagacgtaagcggggtcggtgggaaagtagacggtggggcggcggcatcacacatacgcaagcgcagcctccgtttcctccggcgcgcctgcgctcgcgttcacgagtggttgaagcggaaatggcgccgcggggccgcgcgtccaggcggcgagcggaagtgggtgtgagagcggaagtggccggctagagccgggggctgggcggggaccgggcttgtcggtgaagcggcagtggcggcggcggcggcggctcggcaggcgggttcaggcttcgggggccaggtcggttgggtgggtgggtgtctccacagtctgcgtgcgtgggccagcgcgttcgtcttacccttccctccaccccggcccctctccccttctcccctaacctcctaccccacccagccccactcagggggcagcagggccgctccctccgtccttgcctcccttacccaccctcaccggcccttgtttctccttcccctgggggcagccgccgccatgatcctgctggaggtgaacaaccgcatcatcgaggagacgctcgcgctcaagttcgagaacgcggccgccgggtgagcgcgcgcccggggccgggggtggcgggggaagcagagttgaccccagctaatccccagtgttgtccagtcccccagacctggaggagagaaatggggtgcctggcagggtgtaggggctgccccagcggggtagacgtgggaggcgattgggcgcggccgggcgaggggcagagatgcgtggggagaggctcagaggagggatgcggaagcagcgagtggtgagggctgtgcgtgccaaagggcaggagacctgtgggacgtgggggaccctggagccggaactcgcgccggagtagccccctgccctctggggcgagaaggggaccccttccctgcgtgaaattccccggcattgttctgaacccagagagagcctgtttggaattgggttggaaggagttttcaggaattcccaggactggaggagggaaggagatgcaggcccacatcgccaccagcattctcgttccccacccccatctcctttaaaaggagcagaagagaagactaaaagccgacccagtcttagagccggaaaaacgcgatctctggtttcccttccccgaacccttctgtgagagacactgggccattttgttacatatttttaaagcaaagccaattgtccctcgctccacaccccttccttatctctcctttgaggttctaatgctctctcctcacccactagcctttatctggttatcttgtaaattcttacatcaagaccctaggtctgtgatttcttctgtggtagccctggcccagttacacacttcaaagactccagaatctataaagttcttagataacctgtctttacgattggactttttaaaagatgggcttagggcatctttccaaggcagcctctctgccaaacacaagaatcagtagaagacaatctgctcctccaaagctgctttgcttttctagtataatatttaaaacatgagctaaggattttgggttctaatttttggtggcctgtggccagtccctttgcctcatttccctatgtatgagcatggggcttcacatctgtgtttcacagttaataagtgcagaccgtttctggtgaactgggaactagtaataggaaagtgcttgcagatccacagatgggagaagattggtagaggggaatttttaagtggtcataatgtacttgtggcttggaggcattagaaagtattaactgccatttaaattgaatatatagtatgtcctgtctcctttataaggccacagattttatctgtaaaacaaagcactactttccttgaagtaatacgtgtagtgagcagtactgtttcctgccaggggctgcagttggttatatttgaggctgacttgcttctttcttgtcttagcctctcttaccagtttctttgcattttaaatattcaaatgaatcagcccagagtcttattttgggtgattgctgtatacttttttctgagcagtgtaacacataggaggaagttgaattaacttctgcattttcataactgatcttaatgcattctcaggtccagactagcaaagaatgagacctgggcggttataagctgatctacaagataaatggctgtgtattttcaagtagaggcatgtcttttaacataggagtacattctcatctatttgtgtattaatgacttgtgattccaaaatgtggcccattattcggaacttcagttctttctttttcttttagaaaattattcttaaaaagagaagctaaccatttcggagggattaaataggccctcaagtctggaagacataagttagaacttccaggacttttttttttttttccgagacagagtctctcactggctggaatgcagtggcgcgatctctgctcactgcaacctcgccctcccaggctcaagtgagtctcatgtctcggcttcccaagtagctgggattacaagcacgtgctaccacacctggctaatatttgtatttttagtagagatggggtttcaccatgttggccaggctggtctcaaactcctggcctcaagtgacccgcccgcctcggcctcccaaagtgctgggattacagcactgctcctttcctcaggacattttttacaaagatatgcattgtagggaagctgtatagggggtgcactggtgtgtatgcttgtgcacatgtgcgggtgtatgtgtgtataaatctaggcttttattctggcccatctccccctttgagatgtggttttcaataagcaggctcaaaacattctgctgaaaatttgaaactttgaaaatctttaaaaaaaaagagaccatgatattgtgcctggtaggcagggctctcctgggattacagatgtatcacccagtagaagcccgaatgaagcaaatgtaaattatcagacattccagtaaggtaaggcaaggtgcatgcctattccagaacttacagcagagtttgcctagtgtggttatcataaacatgtatgggattctaccagtgctcagcccaggcagcaacagaaaaaaaggggcctctctgagagcctattagccaagttagggaggtgctaaggggtgaaaggtgttggggtggagatcagagaaagacattaaagggagtagtttggaggagaaaccctggagatttgaaaggctttgctggtgtgggaacctgctaggagaggtcagctccaccctactttttgcacttctcagaataaaccgatgggggaaattacagttcggagcagccttttccagagtgcatcttccatctctgtgatgtccaataagatagccatacaaagtggctggctaaatttaagtaaaaattaagttgaaataaaattgagttcctcggtcacactagccacatttctggtgctcatttgccacatgtggctggtagctgttgtatttagcacagacatggaacatttccattattgcaaagttctattagcactgttccagcttctgaaaatgaaagcatgagatggtcttaaaaatagttctgtggcatatacttcagaatatagttgcattaattttccgtttgaagttgattttttttttttttaatgattcctctcagatcatcctgctggatcttctcaccagtggcctcctactaaaagtatcagctttcttttgggtaaagcagtgttgtcatctaaactgtttaagaatacatttgatcatgataaccttttaatttggaggcagtttgacaaagcctaaggttcattccaaacagattgctttttaattttttcctacacacttctgggaagtggcttattgaaacaactcatagattgtcacaaaataataattattggtaaattgtcttcccagcagcccacaaactaagagaatgtgactgacttaaaagctatgcccaacactgcaaataacctcatgcacaggtctgatcaacagcattgccttttcatttggaaattcttacccagaccctcaaagcaaaagtaatcagacaaattaatttaattctttcgttagtgtacacaccaagaaccgtttcataactgagaagctaggcctgtcaacttagctggagtctggagtccaaaattgaggaaattctgtcagatgcaaattgctgttggatttaagtgtgtgctggctccgtgccacagccagtgcatattgcggggagctgtggttccatgggggggagtgaaactcagtaagcaagcagtgccagttggggtgggcgaggatgatgggaagagaaatttgaaaaaggaataaattaaatcttgctgatactctgttctcattcccaaatatattgcatatgtcctcagagagacaggctgtttggagtgatttggaattaggacattgtttaagcatttagaagaaatggaatgttgtgtccaactcagtaagaagacctggttggtctttttacaggtcactgtagttaattacacactgccacctgtcctgtggcctacttgggaccactttggtcctgaagccccagagctgtgctggaccaaactgataactccttaagagctgggtctatcactttaatcatctttgtttccccagcatcctcattgtgtatatagtcaactcagtaaattggtttattgaagaaattaatgaagccagatagaatgattccttgtttctttaggagctgacatttttgtgacattgagtaaatcagcttttaggtctctgttctccatattttgatatatggcttagtggagaataggaccacctcttacctaatatgatctatttttttaggctttgctcaaaaagaatgatgggagctttatagaagatttaaaggagaatgctcagaaacctttatagtgagcagaattcagtaattcctctaattcaggacataagaagggataagtaggagagagacataaatgcccaaatggggaattggggccaggcaccctggctcacgcctgtaatcccagcactttgggaggccaaggagggcggatcacttgaggtcaggagtttgagaccagcctggccaacatgacaaaacatatgtctactaaaaatacaaaaattagccaggtgtggtggcgcacacctgtaatcccagctactcaggaagctgaggctggagaatcacttgaacccaggaggcggaggttgcagtgagcagaggtggcaccactgcactccagcctgggtgacagagcgagaccccatctcaagaaaaaagaaaaaaatggggaattggatcctagggtgcattcaggagtaaaaaccccaaagttgttaatgagaaaagaagttgagataatacagttgccagaagccctttctggattgattattgacattctagaagcttccttagagaaaagatagaagaaaattttttctaaagggttttaagaatagctcttaaaacctgtctgaatgaattgattatgttttagtgtcttgggttgtccaggcagtaactctgaggacttacccagccggcttgttctaggattccagacattacagcagtctgacacttataggagttctgtttttccttgtactgctaaccaattcctgattcagggaattaccgcaatcctaaaacctctcccaaccacagcttcagagtctgatctctgactccacctaggagaagaactaatttattgattaccttctatgagctaggcactgtgctatatgccttaacatggtttcatttcatttctgtgacagatagtggatctcatttacaactgagaaaaccagggctcttgaggattgggggtgggggtagatattgaataagtaactactacatattaagtaagcaccgtgcaggcatccttcactgtgattcttgaccttgtttatcgtatggcacacagaacatgattgtatttgtatggcacatttgggtaaatggtctagcctctcagagatcctgccacctgctgcctgccctaagggatatggggatcattacctcagcatatctataacttaaaagacaccgtttgagaaactttgctgtacagtagtccccccttatctgtggttttgctttctgcagtttcagttacctgcagtgagcagtgaaccatggtctgaaaatattaaatggaaaatcccagaaataaacaatccattaattttaaattgtgcaccattctgagtagcataatgaaatcttgcgctgtcccgcccaggacatgaatcatctttttgtctagcatatctacagtgtgtacgctaccctctgttagtcgcttaatagctgtctaggttatcagattgactgtcacagcattgtagtgcttgtgttcaagttacccttattttacttaataatggctccaaagtacaggagtaatgatgctggcaatttggatatgccaaagagaacccatgaagtgattcctttaagtaaaaaaagtgaccttggtgtttctttgctacagttcagtgctatccacacttttatttatccactgggtgtcttggaacatatcccccacagataaggggagactgctgtactgctggacatatatcatctcagtcttcacaccaacctgggaggtagatgttttgtccccattttgtagaagaggaacctgaggcccggtgacatttgaggagcattgcctgtggtcacatagccaataaattctgaattctaaataacttgctttttctcacccccagcatctgaaattttagcagctggtagaacagtaaataatgtaactattaattctgggggcctatttagtggaacacttttcctgggccagtcttcctcccgctcctttgtaattttaaaccacagaagtaaaataacaaacgccaggtcttggaattgagaagcaatcttgtgatggtatacttcacgctcagcaaactcatcgttaaggcactgagttctcggacctctaactcccagaagacttcccatgaagtctcctttggcctaatactctcctcagcagccattctctctcttctagccataaatagtaaactaaaatattaatgaatgtgatttgacaaatattgctaagtcagacagcagaccacttaagatcgatcgtagcaacttttcccacaaggatctgtgctcaggatactttatgcctagagaaatttgaaattagagactcaaagtgtgtatgacttggagcccaaaggttatttatttatagttggtttttctcaggtcttttgacaaagtaggagagtgaggaactcagcccttctttggctgaattaaaacctaaaggttaaaaaaaaacttactaagtgatgtaataatgggcttttataaactccctgactcttcagcacagtcagccttccccaggaaagtatgcttccatgcttcctcccattggtcatcctcttaatatttcattcagttggtccatgattaacatttccatatttttgttctttgctcttgttttctagaggtgaggaatggtattggactcgttgcctttgtttcctggctacagtttcaaaatgaaggctcagaagcaatttaaattttcatctagttttttccttctattctgaactctctgcttctccgtaaacccacttgatacttcaattcgtagagatacccagtgcgcttttcctaagtcacatatagagggctttgaagaagcaaggtgaagctttgtatgattcgtataggttgatttttcagcagggctagcatgcttcatagaagccagtttttttgaaaggtattgtctggcttctatatcagctttttaacactcataaaccatgttatatattccattatttcccagcatccctggagagcaacttagtcttggtttctttcgcaggtaatggagcagagatcgtggaaagatacgtacttgattaagaggtcttgagcaagttagacaaaaataaatgtgaaaacatgcgcatcttgtttgctagcccctaaaacaaagtggaatcattgagtttacaggtagctagctggtaaggcaatagtcttcatttgcttcctactttggacttcaggtctgttcttgtgttatatgtagtagttccatgaggtaaataggttcatttttattcccccattttattgatgataggggagaatgcaaaggtgtaagggtatttgtcccaaaacatgagcgtgatgagaaagctaaagttgtaaagcagatgtcctgactattcttagtgatttcatagtgttattttgtgttacactgtctattttaagttccgagctggaatttacaaagcaagacaaaactagggtagaactaaagagggtttcttgaaggtgagtggtaagtactttggtgatgtaaaggaagaaagaaagatgagtaggaaggcttacagacgggttttgaagtggaatagaacttgccgttttgtttatggcccgaaatcatcctttctctttaagcatattaaaaccattctacattatacttagccattttcctgctgaacgttttactcctaataccactgtcctgtggggaaggcattgaccaaaagatggcattttgtggtatatagcatgttgttaggaaattcagaattgaaagcgagcaccaaccaaagcagtagattcaacagcaggtgaaaaacaaaagctatagctgaccttccttttttatctgaccttccttttttatcctctacttaaagcaagtccaaaggttcaggtccatgagaaaatgaattgtgtactctgattggcagtaacctaaaatttatacagaatggtctgatcttaagtgaagctcaggtgcctttccagttccctttgaaggtaagcagcaatacagtcatcttaactgaggaccttttttgttgtttacagaaacaaaccggaagcagtagaagtaacatttgcaggtaagcatctttatctcagccctctgaagagaaggtacaatatgaaaaataggaaataggctgggtgcagtggcacatgcctgtaatcccagcactttgggagtccgaggcaggtggatcacctgatgtcaagagttaaagaacagcctggcaaacatggtgaaaccccctctactaaaaatacaaaaattagccgggcatggtggtgggcacctgtaatcccagctactcggaaggctgaggcaggagaatcacttgaactgggaggcaggagttgctgtgagctgagatcacaccactgcactccagcctgggcgatacagtgagactgtctcaaaaaaaaaaagagagagacaagaaaagaaaattgtacctaaaataagctttgacatggattgggtgcggtagctcatgcatgtaatcccagcactttgggaggccacggcaggcggatcacgacgtcaggagatcgagactatcctggctaacatgatgaaaccctgtctgtactaaaaatacaaaaaattagctgggcatggtggcgggcacctgtagtcccagctactccggaggccgaggcaggagaatggcatgaacccaggaggcggagcttgcagtgagcagacatcgcgccactgcactccagcctgggcgacagtgagactccatctcaaaaaaaaaaaaaaaaaaaaaaagctttgacattttggatactgtccctcatcaggtctttttgagctctttataatagatgaccatttcatgtatttaatccactgatgactgacaatataaagttacctgctgataaattagaagtttggatttaattttgtggtaaaactgaggtttttttgttgtgttttttttttaatttggaaatattacattatcttcaagtagctgtcagtcttagtttgcctagcactagagtagtagggaaacatgaacagctagagatgtgttcatcaagtcagagagagatgttgctgctttctgttccctataaagaattaggtgttggtactatttacttgttaggtgaatgaactcagaggaatacaaccaccctttctacaacaagagtcctcgacaagatgatcttggaagacttttgcagctctgaagtgctgttacctggaggccaggcaccatccctttaccctcctactaactggcattgccagatatcccttcgtgattcccatgacagctccataaagtgatggcactcagcacctaattctagtttcaggaacctattcctagtttcaggaattacacaggctgagtcagtcctgtgtactgcagaaagatagaaccgaaaaagaggggagtcctatagattagaagcaactcaaaagataaccaaatgcaatgtgtggatattgtttgcatcttaattcaaataagacaacaatgcttaaaattttttgagacagtagagaatatttaaatacttgactgaatatttgttttgtttttttgagactgagtctcactctgtcacccaggctggagtgcagtggcgttgataatctgctcactgccgcctccacctccccgagttcaagcgattctcctgcctccgcctctcaagtagctgggactacagatctccaccaccacacccggctaattttttttttttttccagacagcgtcttgctctgtcgcccaggctggagtgcaatggcatgatcttggctcactgcaacctccaccccccgggttcaagcgattctcctgtctcagcctcccaagtagctgggattacaggcatgtgccaccacacccagctaattttttgtaatttttgtagagacagggtttcaccatgttggccaggctggttttgaactcctgacctcaagtgatccacccacctcggcctcccaaagttaacaggctgggttaacaggcttgagccactgtgcccggccttgactgaatatttgatattaagaaattgtttttaaaaatttaggcatgacactagtatcatggttatgttttttaacaaatagtcttctgtatcttccaaagatatattctgagtatttatggatgaaattatgtgttgtatctgggatttgcttcaaaataaatcaatgggaaggaggatgtctaaatgaaacaagaattgtccatgtgttaataattgttgaggctgggcaaggtggttcacgcctgtaatcccagcactttgggaggctgaggtgggcagatcatgaggtcaggagttcgagaccagcctggccaacacagtgaaaccccgtctgtactaaaaatacaaaaattagctgggtgtggtggcacatacctgtagtcccagctactcgggaggctgagacaggagaatctcttgaacctgggaggcagaggttgcagtgagccgagaccacaccattgcactccagcctgggtgacagagtaagactctatctcaaaaaaaaaaaaatcgttgaagcctcatgatggagatgagagttcattatactgttcgttctgcttatatacatgtaaaatccaattatttcagcaccaagctgtgattaaggaaagaatagctttgtaattttaagaaagagcaaagaaacgagtgctcagcaattctatcccagtgtttctgctgatttgtcacatggatttaaaataagttccattttacttacatgcctccttaaaagtggtcttccttgtggcctacggcaaggtaggcgcttggagagattatttcccattcccaaattgttacgcaatcttatttgctttcctcacagatttcgatggggtcctctatcatatttcaaatcctaatggagacaaaacaaaagtgatggtcagtatttctttgaaattctacaaggaacttcaggcacatggtgctgatgaggtaagatccacatcattttccttgggactcttgtttcctcacctttcattggcagtttgccattcatggaagatccatggcactaaatcacccccacatgactacttgctcacctaactaggggctcttgacttgattcctataatgaattgtgtttcctagaaaaggttttgactcttgcttgcttgctttaaaacaatggaaacaaaaatagctttagttctccaaaaacatagcaaagaatacttttccttgatcagtacaaaaatagctgttgcaagaattaggttctgttctatttttgtaatattatcaaggcagatagataacttctagcttgtttaaattttatagtctcaggttctcattctggaggcttaggcacaaatagctgtcttttgaaatttttaattaaagctctttaaagctaccgtctttaaatatctcttctttataactaccataggggaaataagaaagatgtccagacattatgaaacttcggtggccatgccttgttcactggcttctttaaatagttaagtagcaggtttggttcctgttgaactgtatttgctctgaggagagccatttatggaagaaagaaaatgctattacaccagtttgtgcacgctgtggttgggtctcaaagcaggaaatatgactcagttcctgaatcagttttcaaatttcttagttttaacaaactaggttctccttaatctgttaaatgaagatataaccatagctgtttctttctgaaaagtagtagcttttgaattatttaaaacttatataataaaagatgatttgtaaaggaatatggtcaaaagcttgtttaattttttagcataaaaactaaaattagtcttaataccaagagccattggttgcttcccttagttattcaaatgcaattgattttctcataagttcaaagaaagaagaaatatttagaggatttggaatccagattagtttactggaaaaagaaaagcttcagaaagaagacctagtgcttttataaagcttatgaagaattgttttgtaaaagatagtggctgacacttctttaccagataaagagtgaaagaaaacaaatggctattaaagcagccctgcctcttttttttttttgaggtggagtctcactctgttgccccaggctgtactgcagtggcgccagctcagctcactgcaacctccaactcctgggttcaagcagttcatctgcctcagcctcctgagtagctgggattacaggcatgcaccgctacacctggctaattttttgtacttttcatagagatggcgtttcaccacattggccaggctgctctcaaacttctgacctcaggtgatctgcctgcctcgacctcccacagtgctaagattgcaggtgtgagccaccgtgcccagccttttcttttttttttcttttttttttttttttttttttttgacaaggtcttgttctgtcacctaggctggagtgcagtggcacaatcacagccactgcacccctcaacctcccaggctcaagcagtcctctcacctcagcctcctgagtgtctgggactacaggcacgtgccaccacacctggcttattttttgtttgtttgttctttagagagaggaggtttcactatgttgcccaggctagtttcaaactcctgggctcaagcagtcctccttcctgggcctcccaaagtgctgggattatagatgtgagccaccatgtccagctgcatcgctgctttggatcagctataactacctgaaaagaagtgttaaaatatttgaatagactttttttaaattgtgtaatcattctcccctagacagtcttcactaggtgcaagcctgcacagtggcacacacctgtagtgccaactgtgtgttgggacttcacacagttggcttgaggggttcaagtggggagagttgctggagcccaggagttcaagtccagcctggacaacatagtgagattccacctcaaaaaaaggaaaagatctaaatgcaataataataatcctggaaagaaagagttaagctagatttcttaaatctcctttccattctgtgcttttcttacgatggagctccagaacacattgctattcttgtagctaccacaagggtcaaagaaccagccccacccactcaagtgggtggagtaagtaacattcatagtgttggagcagagtgcacagtaaatggctccctgggttggttaaacagtgaccaacccatgataaccacaggaaggttattactttgtcacaggccatttttaaaggtggaatgcctctgctgctagagtgggaaggtaatggtgatgagtgataggttgcctccacccatctcctggtgtcatattgggagagggggtacaaactgaaaagtgaatcatggttaaaagtgcaagtgaagtgacaaggaagtgttggctggttttaccaaggggagggagcaaagcagttgaacatgatataaatttggctctcagtacctcttagatctcagaatattaacttagtaagcttgaaattaaactaaatcttagggacttagggatttaaactaaatccccaccacatctgatttccccttcctcgaaataccaatagtacgtgcaacacagacttgtagctcagaggtcgcatgctgtttcaaattcttgggatatgcatgttacttttttttaaagaagtggtatatcagacacctgaaggtcaagtctctctgtgccaccaacaaactctcgtgaccttgagcccctcctctcaattcctcttcggtaaaagaaatacctcacagtggctgtgcaatcaccaaataggaactacaggtggcattatttatcttttgcccttgtgtaagaaaatgtagtcttgcaggttgaaaatttcttccagctataggaaaatggttaaataaatatgtggaatattaggaaattattgttcagccaggcgtgggggctcattcctgtaatcccagcacttttggaggccaaggcaggagcatcgcttgaggtcaagagttcaagcccagcctgggcaacgtagtgagaccctgtctttgtatataaataaataagtaggccaggcgcagtggctcacgcctgtaatcccagcactttgggaggccaagacaggtggattgcttgaggtcaggatttcgagcccagcctgggcaacatggtgaaaccccatctctactaaaaaatataaaaattagcttggtgtggtggtggacacctgtaatcccagctactagggaggctgaggcaggagaattgcttgaacccaggaggtggaggttgcaatgagccgagatcacgccactgcactccagcctgggtgacagagtgagactccgtctcaaaaaaaaagaattaattaaattaaaataaaatgtttgtttcttaagccatgtcattctggaagcagtttccaccaggtgaagcagtcacggtgacagagaaaaaaatagggagtctcagtctgttttttgttgctataacagaataccacagactgaataatttatgaagaaaatatgttatttgactcatgttctggggactgggaagtccaagagcgtggcaccagcatctggcaagggccttcgtgccctttcccgtcatcctgtagcaaaaggcagaagggcaagagagggccagactcaatttttttttttttttttttttttttgggaaacggagtcttgctctgtcacccgggctggagtgcacccaggctggagtgcagtggcgcgatctcacctcactgcaagctctgcctcccgggttnnnnnnnnnnnnnnnnnnnncatacctagcccagactcacttttttaacagcccctcttgtgaataacaaaccaacttcccctataacaacatgaatccattcatgagggcagagccctcatggcctaatcacctattaccgtcacagtggcaattaaatttcaacatgtagccaggcatggtggctcactcctgtaatcccagtactttgggaggccaaggtagaaggatcacttgagcctagaagttcaaggctgcagtgagctattgtatcaatgcactgtagcctggactacagagtaagaccctgcttccaaaacaataataataatcgtaaattttggctgggtgtggaaaaattagccaggcatggtggtgcatgcctgtagtcctagctactcaggaggctgaggcaggagaatcgcttgaacccaggagatggaggttgcagtgagctgagattgcaccactgcattccagcctggacaacagagtaagactccgtctcaaaaaaaaaaaatcataatttttaacatgagttttcgaaaggacattcaaaccatagcagaaggtataaaaggggttcttggttttttgggttttttttgttgttgttttcatttaattcaaaaacctggaaagtagccagcagtaggttctggtttggggggaaagacatgtagagtatacaaccttctggacaccagtattaatagctagctaagatttcattattgactgtcctttgccttaagagctggctatgcactgagtaattttaaagcatacaagatcagcagacaaacagatcagttcccgagagtcctggtttttttctctttattcacctgggttagtggctcagtctgtacttaggttgataactaacaatctgttctctcacttggaatttggcatccttttgctctcttgaaaacaaaacatgattaagtacaatgtaggatctggaggagaacagagaacatattaagggtgtagtcaagtcctaaaaaaggatgagctttgattaaagattctcggccaggcatagtggctcatgcctataatcccagcactttgggaggacgaggcgggtggatcatccgaggtcagtagttcaagatcagcctgaccaacatggagaaaccccatctcaactaaaaatacaaaaaaaaattagccgggcatggtggcgcatgcctataatcccagctacttgggaggctcaggcaggagaatcacttgaacccaggaggcggaggttgtggtgagccgagatcgcgccattgcactctgtcccaggcataaaaagatactcatctcagttttgtgacttgtttggtgactaaatccacttcccctctgtctctactttcccatccaccaaatgaaagttaggaagaatgccaacttaggaagagcttggcaagtgcagtactttaaaaataatgaaattatcatggcctttggattaacgtatttggttttgttttgtttttattttctagttattaaagagggtgtacgggagtttcttggtaaatccagaatcaggtatgtagtcatgtgagcaactatggaatgacatgggaagagaggtgtcctttttatattatgctttttttacccaaaggatttcgtttaaatattattacaaatatttctgcatgagcccattcctaatttcaactccctccataaaaatagcttttaaggggctttgctttgtccaatatggaacacagtagaggtacaaaattgatgtgtgacatttttaacatttacttgatggggccacatgactcttacttaatctttcagccagagggccacatttgtttgttcatggtgattaaaatggctttgaaaagaatgagcaaacattgattcccaccctcggcccttagtaattctgcatactacatatttggagaaagaagaggaatattcaccacactattcttgtgatttcaagtaataaaaatcagaccctttcttaatccagtcttctaataggttgtctcaacattcatggccagaggaattgaaaggcaccgtgtcatccttgaatagaacagctatgttatactgctttaaaaaggaggtttaaagtggaaaaactgaacagcctttttaccctgtgattcagtggcatgtctcaaattctgaggcatttagcaggaccccaaagtgagaaccaggtagtaagaccattggaacataatattttttactcaactattacaactttggtaccttgattagaaaagtcttctaagaaggaagttctctgtcactcttaacagcagttacttgtgctagcttatttcatcacctcacctattttttcagacagtctcattctgttgcccaggctggaatgcagtggtacagtcatagctcactgcagcctcctccaaatcttgggctcaagcaatcctcccgctttagcctctccggtagctgggaactacaggcacatgccaccatacccaattaatttttttaatattttgtagaaacagagtctcactgtctgctgcccatactgccaaaacagagtaaggaggtctcaaactcctagccttgagcaatctacccacctcagcctccgcctcccagagagttgggatcacaggcatgagccaccatacccagcaccttttttttttttaatctccaaattggcgggatgaatgtgtcacagaaataaaagccaagataacactgtaggcttttggcaaaatcaaggtattaaaagaaagaaacaaacagatctagaacagaaaaatcatgtccaaagtcttgggcatgcttgtcacagccaacatcctgacatggaaagtttatgtttctgtccctgggcctccttctacctcccactaaatcatagacattgccagattgcagaccctgtcttcatagaagtgtgaaatgtaaaagtgtgtgaaagtagtgtctcaaccaggtgcagtggctcacacctgtaatcccagcactttggggaggccaaggtgagtgaattgcttgagctcagaagttcaggaccagcctgggcagcataatgagatacctgtctctataaaaaatacagaaattagccaggcatggtggcagccacctgtaataccaggtactcaggtggctgaagcacgagaatcgcttgaacccaggaggcagaggttgcagtgagctgagattgcgccactgccctctagcctaggcgacagagcaagattcagtctcgagaaaaaaaaaaaagaccgtagagtctctcctcctcttttttaatgggtttatctaggcacgtttggaaaactcagcaagttatactagatttttacttctcttcatcctcagtatattctgttcatcatgttagaagccttacttaaagacagactttaccttagctatagttttatttgctcttatttggcttcctaaaactagcaaacctcagctctaaatcttttcttttttaatctaaccttgtaatctgtgtgcttatttggttttcaagtacccaaaatagaatgatgattgatattatttaatactggagtgcctctccagtattaaataaaatgtgctaagcattatctagagcaaagatttagcccatcctcccgaagagcccatgctcaacaaaaaacacagacctcagccgggcgcggtggcttatgcctgtaatcccagcactatcggaggccagggcgggcggatcacctgcattcaggagttcaagaccagcatgaccaacatggagaaaccccgtctctactaaaagtacaaaattagccaggcctggtggcgcatgcctgtaatcccagctgcttaggaggctgaggcaggagaatcgcttgaacctgggaggcggatgttgtggtgagccgagatcatgccattgcactccagcctgggcaataagagtaaaactccatctcaaaaaaaaaaaaaaatacagatctcaggaatgcttttgggaaaaaatgaaatagtaatgaggtttcagatacttagaagtgtgaaagccatacagttctggtgaagttattcccgtcagttgcctagaatataaaatgatcctcagtgatgtagaaatattcttgcaaaaacatctctaggcagtttgacacttattaatcatttgattctataatcaagtgttccagccggcttctgggaattcatagtggacatgctgtaaaaaggcaggtcatccaatggtttcagtccatgttctgcacccgtattgatgacctgtcatgttccacacactttaagtattgtacattcttttaatgctcacaacattctcccctatctccgcaccccctgccctgctcctttttctttttttctttttttttgagacagaatttcactcttgttgctcaggctggagtgccgtggcgcgatctcagctcattacaacctccacctcccgggttcaagcaattctcctgcctcagcctccggagtacctgggaccacaggcgtgtaccaccacacccagctaattttgtatttttattagagacggggttttgccatattggccaggcaggtctcgaactcctgacctcaggtgatccacccaccttggcctcccaaagtgctgggaatacaggcttgagccactgtgcccagaccaccctacctgccccccaccaccaatttttttttttttttaacagatgaggaaattaacaagtcaggcaattttttttgtttttgttttttttttttggagctggagtctcgctctgttgtgcagtggtgcaatatcagctcgctgtaacctccacctcctgggttcaagcaattctcctgcctcagcctcccaagtagctaggattacaggcgcccgccaccatgcctggctaatatttgtgattttagtagagacagggttttgccatgttggccagactgctctcaaaactcctgacctcaggtgatctgcccaccttggcctcccaaaatgctgggattacaggtgtgagccaccacacccagcagtttttttaaggtcacaaaatgacaagactaggatttggacccagttctgttcgactcaaaatagagtgccctacacttatgtgtcatgctgcatttggcaagtcacgtcacttctttgaatctccttttccctctgcaaaacagtaaccttatctagcctgcagacttcaaaggtggttatggagatcaaatgaagtaaaatgttttaaaaattgtacaatatataccaataaaagctattggggaggtatatgtatgaacaggtagttggtttttctaccctgccacctcataaagagtttgcagtggcacgtagaagggtttatcttattatcacaaagctacccatttgctggccatactgatacttggcacattaaactatcagagaaatatatgtggctcctttacaactgtgtctagaagggtacatttccaatcagagttcccaggttctgactttctcccattacatatttgtaattagtcatctttgatactgattcaaatttttgattaacattaattatatatatttacaagaatcttataaaaattaagattttatttcacctcattttgccctgtgagatagatggaaatagactatattctacccaggttaaaagtacagataatgagacaaaatgtcaatagaacctgaaaaaagatttttttagttgcctctagtctctgtttacttggtatagatagtatgctgctttttttttttttttttttttttaaatgtaactgctgggttgttttttgtttcttgttttttctttccctccaggatacaatgtctctttgctatatgaccttgaaaatcttccggcatccaaggattccattgtgcatcaagctggcatgttgaagcgaaattgttttgcctctgtctttgaaaaatacttccaattccaagaagagggcaaggaaggagagaacagggcagttatccattatagggatgatgagaccatgtgagtatagaatttggtcctgaagcctggatatggctgctacaccaccatggcacttactgaaagaaatatggcttggtcaaactttcagctgtattgcgtgaaaatgtttttcctcataaaatgtcttaagccaggaagtagatgatagggcagaaatcagccactcctcctactctccagatactgagagctgacagatggtggaaagagaatccagtgctttcctttaaggcaccactgttctgagtcatgtttaagagtatagcctggataatcagcaggcagggtgaccataggtccatgttatatttacaagtcaataaaatctacttctgataatttccatctgctgcctctcttagggcattcattttgtgcactgactttgttgaccataaatatcatctcatttggcacacctttatattatgatttaagagatttatgactttagccttctgatgtacttgtagatcaagttattgacaaaaccccattctgattctgtacttatcctcatggattttgttcctctcaggtatgttgagtctaaaaaggacagagtcacagtagtcttcagcacagtgtttaaggatgacgacgatgtggtcattggaaaggtgttcatgcaggtatggagcagacatcttgggggaaacccatgcatggcgacttatacctttgcacccaaacataccatgagcgtaggaaagagatctagcaactctactgatgttagaattttttttttttttttcgagacggagtttctctcttgttgcccaggctggagtgcaatggagtgatctcggctcactgcaacctccgcctcccaggttcaagcaattctcctgcctcaacctcctgagtagctgggattgtaggcatgcaccaccacacccagctaattttgtatttttagtagagacggggtttctccatgttggtcaggctggtctcaaactgccgacctcaggtgatgcccatctcggcctcccaaagtgctggtattacaggcatgagccaccatgcccagccttgacgttagaatttgttgaagatttaatagacaactcccacaaaactcagtgaatattttttgttgctgctgctgttgttttgaggtggagtcttgctctgtcgccaggctggagtgtagtggcacgaactcagctcactgcaacctccgcttcctgggttcaagcaattttcctgcctcagcctcccaagtagctgggattacaggcacgcgccaccacgcccagctaatttttgtacttttagtagagatggggtttcaccgtgttggccaggatggtctcaatctcctgacctcatgatccgcccgcctcagcctcccaaagtgctgggattgcaggcatgagccaccgcgcccagcctgatattttttttctcagtggtttagttttgcaggacagaactaaagggtaagttgagaattaaacatactaactatgaatgaatgttatgcatccttcctactgtggggtctttgacctaaaactttgtcaggtttcctaaccctaacctcttgtgtttcctcagatttctagtaaggtggctgctcttggtttggtcctaaggtcttttcagaatggactgtatagccaattatttggtagtagataacgcatgaacaggtagagttgttgaactgacagactgagcctgagtttggatgggtcaccatagagtacttccctcacaagaagctcatcttaagaagagtcatgagaggccaggcgcggtggctgacgcctgtaatcccagcactgtgggaggccgaggtgggcggatcacgaggtcaagaggtcaagaccatcctggccaacatggtgaaaccccgtctctactaaaaaaatacaaaaaattagccgggtgtggtggcaggcacctgtaatcccagccacttgggaggctgaggcaggagaatctcttgaacctgggaggcagaggttgcagtgagccaagattgcaccattgcactccagcctgggcaaaaagagcgaaactccgactcaaaaaaaaagagagtcctgagagttagcagggcattttgtaattggatttttggtgtagttgcattcaggtcattgtgtaccagtctgctggccagttagttgctgcctctaggatggacatgagagttcattggtcaagtgacattcaggctggtttcttctgagatggctcagcattcaaaatctagtacaatggtaaaattttttgaaaacgttactaccttcattctgttccttggcagggtggtaaagatttttaaattctgaagcagaatctcttttgccaaatagagttgaaagacagctgtgcttaacagtaaagatactttgcatagccttctaagtggctaggaaaatcttcaaaagtgatattctcaactgctccatccctagtggcttttgtattttggctaattaatcagaaactagtttgggagtcactatacagaaaaattggaatattgacacttcagcatttgctagtgctgaacttgatgaaggaatatataaatatacatgtatctcttgggtcctaaaagtaagcctctagagaggcatttcatgtgtttttatgcagaattgacaggggaattaaatgcagtagctcagaaattgggctaaatccagagtaacaaaactaattttaaaagctctgaagtatatatttagatttggctggttttttaccaatcttattccattttattccaggaaacaacttatttttatactttaaacagatcttatcttggagagtgtaccggagatttgttccttaggagaattttgtgtattcttttttggcatatgatttaaatgcctccttcagggtacctgtggtagggcacttacctaaaaggaaagacaaagcctcttttgcattttggcactaacaggatctctggatagtaactggcctggtgcagtgctagctagactcaggaagtcatctgccctgccaccctttccaaattcagaggcttaggtaatttgttggaaatgacaatcggaaactggacttttgctggattttcccaaaaaataaatagaactttttcctaggcctggaattgtaaatttctcggaaaaagaatgagggacacctggcacagaaagttgtaccctgagaacactatttgaagttcctcatggtcactagtctacttgttgccagcctttgtggcctttcccttccagcatgcacatccagcctgatcagaattcaagtcttgcttttgtcatttggcaagcaggctctgagggatgctttctacctctcagaaaaagacaggaagtgtattcctccacactagtggtatgggcatatcagctgagtactggagaatgtctgatagaagccatcatttcaatgcttattccatgaaaagcaataggaccagtaattatgcttttggagattagcttatggtgaactagaattcttttcatattctaagattttaaagtcaagttagtaactaaataaccaggaaaagttaagtggaaaccactggtttttatatgttcagggacaaagacacaagcacctgcctcttaggcagttgtaaagatgtattttgagggccctttctgcctgtttgcatgtgtgggtatgtctgtaggatattttcctgaactgggaacactgagtccaagtcagtaattttggtagacattgccaaactcttctccatcagggtagtggcattttatcatctaccagtgatggagaggagtgcctgttttcccagagtatgttgtaaacttgtggatttctcctgatctgataggttaaaggtggtatctgtgtctgcttatgatgacataaaaagatgttctgaggtcagaacatcttttcttaatgttatagaccatttgattttcttatgaagtgtctctttatgtcctttacccattattctgtagggtcattgagcttctcaatttctttacatactagggagagtagcctttcatctgtgattaagagttgaaatattttctccagtttgtcattggaccgtgttttgtggggttttttccaccatgtggaagtttgtttttacataatcaaattaatcaatcttgccttttatggcttctagattttgagttataggtagaaagcccttccctactcgaaggttataaagaaatttacctgttattttctgagtatttttacagttacatattttatacatgattttttcttatttgttgagagctcctcttgttgtatggtatgaaagaatgatctttttttcctaaatggctatccagtggtcccagtggcaattatttccttttttacacccctgatttaagatgctacttttatcatatgctaaatgccttgtatatatttggatttattccgaacttcctatgataaatagtactttggaagagagaaataatctgatgctcaaaagacatcctagccagaaggagagtaaaaaggcaatattgcttgattacgtataacaaagatgccaatgaagatggagggctgtttgggtgtgtttgtttgtttaagctttatttaggagagagaactgaggagaagcaaagacatcagagaatctaaagaatagtcccagtcaggcacagtggctcacgcctgtaatcccagcactttgcggggcctaggcaggtggatcactagaggccagtttgagaccagcctggccaacatggtgaaaccctgtttctactttaaaggccaaaaattagccgggaatgatggcacacgcctgtaatctcagctactcgtgaggctgacacatgaaaatcacttgaacctaggaggtggaggttgcagtgagccaagatcacgccactgcactccagcctgggtgacagagtgagaccctgtctcaaaaaagaaagaaagaataggcccaagccagaaacgtatcgttgaccgagccttaaatatgttattttccatatacaaaactaatgagtgctaataagtcaccactggtttataaataccccatctcattgtgaataccacatgtacctgtgaattagagccttggagacacttaacagacacaagaaaatgccaacagttacgtatctgttctgtttaattccttaataccgaaaagtaaaaccagtaaaagttaaaaagcttcttaacccctttgtagaataaaaaatgttttctagagaagggcgattttagaagctttgctctagaaatttccatttgggataatcttgactccttcccttcctttttggatatttttccttcggggaacaaaatctgttcaaaaggggactaatctaacccagttgatggtcatttcttttcctacttaaagcttggtagtgttagcatgagaggcagtttgtgaaataggtgaggtcccaggctgggcattggggctcctcagccatcatctttcttttgccactaattgtcgagagggcttgctaatcagtgtttattcttcctgcctgcaactggaaacagcccttgcctattcctgtacagtgtgatgatactaaaccagctagggtagaagcacttgctttctctcagcaaggcatgtgctgcatagcctctttgaaagacagaagaataaattacaaagataaattaagcaggatctttgatttgaactcataacctggtaggggagccagatacattaatgaatggtaaaatatcatagtagaggtttgtagaaaagacatggcagctccagcaagagagcagtacctgcctgggtttgttggagatggtattaggaggcggtatttgagcagcagtagaagggcacgcaggccacatggctgtgtaaccatgccttcagaactcctaaaacaagagaccttggagagtccttggcagcatcctcctgctgtctatcatcttggaaggcccacttgatgaatttggattatccagttttactggcattgctagaaaatctacttctgttcttgcagatctggctgagagagagaagccttgtattacttgtctatttacataggaatgtatggactgtagaagcttcaggtttggagattggaacatagaaggaagggcttcctttatgagcaccaagacaactcagcttctttcattccattgtcttctgtccgcaagaagagcttaagtttgctctaaagattttattgatgaattctaaatagcaacaggatcctcagtgaaaaaagactcatgcaaagtcccagagcccagagaaagtatggtagtttatcacctatgttagtgcaaaggaaaaggattatcactacttttcatcacattttgaagatctgacttattaagtactttgcagtctctcccgtttgaatctgaagtgtagtggtagcagctagcacttgtcatatttcaggtttggtgtagtttatttttaacctcctgctggtctggagggctacaaaggtcacaccacatagaacaaaccctatagcttgagttgccactcatcttacacccacttctcttctggttgcttttgctttgtcttggcaggagttcaaagaaggacgcagagccagccacacagccccacaggtcctctttagccacagggaacctcctctggagctgaaagacacagacgccgctgtgggtgacaacattggctacattacctttggtgagcagggtgcacttgctgcttttgtgccgctttaatgagttcacacagcagaatacctaaatctgcacagaaccttggttaacattttaaggtaggcaaacgcaggcataccaacttgttcctgttgccattgcagtgactaaaggagggatgtcacagggtattaattacagagcaggccatatgctatttttgtacagtaatcctttcctttttttccccatttttcttaaatcttaaaaataagactgaattctgatatcaagagttaaggtcccttcagtagttcagctggtagagcagaggactatagctacttcctcagtaggagacgtccttaggttgctggttcgattccagcttgaaggagacaagtacagttttggctgggcacggtggttcatggctgtaatcacagcactttgggaggttaaggcaggtggatcacgaggtcaggagatcaagatcatcctggccaatgtggtgaaactctgtctctactaaaatacaaaaaaaaattagctgggcatggtggcgcacgtctgtagtcccaggtactccagaggctgaggcaggagaattgcttgaacccgggaggtggaggttgtaatgagctgagatcgtgccactggactccagcctgggcaacagaacaagactcttgtctccaaaaaaaaaaaaaaagagttgaggctgggtgcggtgtctcacgcctgtaatcctagcactgtgggaggccaacatgggcagatcacctgaggtcaggagttcgagaccagcctgaccaacatggtgaaacactccgtctctaccaaaaaaataacaaagaaattagctgggcgtggtggtgtgcgcctgtaatcccagctactcgggaggctgaggcacaagaatcccttgaacccaggaggcggaggttgcagtgagctgagatcacaccattgcactccagcctggatgacagagtgagaccttgtctcaaaaagaaaaaagaaaagagtaaaggataggcggggcacagtggctcatacctgtaatcccagcactttgggagtccgaggttggtgggtcacttgggtccaggagtttgggaccagcctggataacatggtgcaggctcatctctacaaaaagcaaggggccaggcacagtggctcacacctgtaatcccagcactttaagaggccaaggcgagcagatcacttgaggtcagaagttcgagaccaacctggccaacatggtgaaaccacacctctactaaaaatacaaaaattagttggacatggtgacatgtgcctatagtctatagtcccagctactcgggcaagcgaggcatggcaattgcttaaacccagaaagtggaggttgcagcaagccgagatcatcctgctgcgctccagcctgggagactgtctcaaaaaaaaagataactaggcatggtggtgcatgactgtagtcatagctacttgagaggctgaggtgagaggatcacttgaacccaggaggtcgaggctgcagtgagctgtgatggcaccactacactccagcctgggtggcagagtgagaccctatctcaccaaaaaaaggagttaagaagagaaccacctaagcagctagatgggggttctctgtcatttggcaattcttggttttttgcttattaagcccaagctccagccgtgatccacttactccactttttcgcggaataaattcaggtcttccttcagttgctccagcctcatgcactggctgattatgatagcttacagtttggaattaataagcttgttcacactgcacccaatgccactggaatgtctcctttgtgaaatgtaatttaattcacctcagtggtaaaggtgaacctgtttattggtgatgaatctgttgatttaccaaatttcattaaatctaaactatacacttttttcttttttctttctctctgtcacccaggctggagtgcagtggtgtgatctcggctcactgcaacctctgcttcccaggctcaaacaattctcgtgcctcagcttcccaagtagctgggaccacaggcgtgtgccaccacacccggctaatttttgtatttttagtagaaacagggtttccagctgggcacggtggctcacgcctgtaatcccagcactttgggaggccgaggcaagtggatcacgatgtcaggagatcgagaccatcctggctaacacagtgaaaccccatctctacaaaaaatacaaaaacttagctgggcgtggtggtgggtgcctgtagtcccagctaccctgaaggctgaggcaggagaatggcgtgaacctgggaggcggagcttgcaataggccaagatcacgcgactgcactccagcctgggcgacagaacaagactccgtctcaaaaaaaattaaaaaaaaaaaaagaaacagggtttccatgttggccaggctgatctcaactcctggcctcaagcaatccactcacttcagcctcccaaagtgctgggattacaggcgtgtgccactgcgcccagccagctataccatttttttcaagtttttgtctttgaagctgggatgcatcttacaattcatagcatgtcacactttaattggcagcatgtttctcttgtggtacataaaattatggcagacttacagtcataagcaccttagattctttgaagtatagttgtcttctgttgtggtgttcatttactttcaggccagggcacattgacacagaaattccacacttccttaggaggcattccttttcatttcaacgaaaacttcagacaactgacggggttttgcagatagtgagtagaggaggtgcagcaggtaaaaacgattccagaaaaccagggcaagaggggcatgcaggcctgctgtagtgcaaaggactttgtgatgagcacacaggtctttttttgagatggagtcttgctctgtcactcaggctggagtgcagtggcaccgtcttggctcactgcaacctccaccccccgggtttaagtgattctcctgcctcagcctcctaagtagctgagattacaggcacacgccatcacatgtggctaatttttatatttttagtagagatggggtttcaccatgttggccaggctggtctcaaaactcctgatctcagatgatcagcctgcgtcagcctcccaaagtgctgggattacaggcgtgagccatcgcgcccagcctcacacaggtctttaggtggctggtgtcacagggtggacttcagtcaggcccagtcagagcagctcctcctgcctggcctatcatgagggttcaggtccttacaccttattgtctgttttcacagtgagaatatgggaaattctctggcatctgttttctgggaaggtttactctatttcagcaccaaggacctaagacaggcagctgcatttcctaatcctgattccttaaagtaaactgttacagccagttagtgtgatcctggagtgtgtccagctgcagaggcaagagctagtacctgtgtggcagaccggaaatagatttcaaaatgcacagctgcagaattcaggagtagaatgaaggcctagggtcaagccctgtttttcatcgtgggctcctccattcacgctcgttgacacctttcctggccatgctgtttaacttccatgtcaagaaaaaaccctgacaaagcctggtaatactgacacaagtggagtgtacttaagcagagagggagtgatgttcactaggctgttgttcttccccaccctttggcatttgtgtcgtgtcctgacgccttgtttgtgtcttccgccttcagtgctgttccctcgtcacaccaatgccagtgctcgagacaacaccatcaacctgatccacacgttccgggactacctgcactaccacatcaagtgctctaaggtgaggggggtgccagcatctcagcctctatgctctgggtcttttcctccaccagaactcctgacagaaagtcattccattagtctacgctgtggatattgactcttaggtaaataattctagaggcttcaagaaaccatggtctttcttcatcaagccactgtcccccatccctccctatagcagagatgaatatttgtttccagaattgctcaccttcctgcttccctgcagggcctgggtcaatcccagggtgtatgttcccaaccgcccttgatgacctctctgatgaaagacagcaaagctgtctttctagaccatgactgtgctttagtacctgttatgtttgttcccaggcctatattcacacacgtatgcgggcgaaaacgtctgacttcctcaaggtgctgaaccgcgcacgcccagatgccgagaaaaaagaaatgaaaacaatcacgtaagttaggcagcaccccagcgaccaccttcctctcctgagtcaccgagaaggaagcagtgggcgctggtggcctggtcctccatgtatctgggcactggctacatatgaggtcagcagggctaagtagataaaccaaaggtgggattccatgttctcactgccatataggccaggatgggtttccttgtttccgtatctttgtgagctatgagaatggcagctaggaaataaacaaagtttaccaagagactgttctttttgggcctgagttatgaggtcagtcttgtgcttttggtggtctttctggagagatggagtaagttgcttagggacctttaattgggtaaataggcctgaaaccaccccactaagtgttctttttcctggtccactctcagcaggaagtttgcatgcagaggaaggttctctttatcagggatagaattgaggagagccgtgacgggcgctgtggctcacgcctgtaatcccagcactttgggaggctgagatgggtggatcacagggtcaggagttcaggaccagcctggccaagacggtgaaaccccatctttactaaaaatacaaaaaaaattagccggtcgtggtggcaggtgcctgtagtcccggctactcgggaggctgaggcagagaattgcttgagcccaggaggcagaggtcgcagtgagccaagattgtgccactgcactccagcctgagcgacagagtaagacttagtctcaaaaaaaaaaaaaaaaatttgaggagagccctaaataggggtgtggctctgcatgcaggaaaggcgagcatggcctagagcctagagagttccatctttgtgaaaggtgccagaccttggttcttctgatgaaattcaggcagtcctgtccttaagataaggtaatagtgttcatttgctggtttttgtttgtttgtttgttttttggtgggggtgttgggggagacagagtctcactctgtcgcccaggctggagtgcagtggcgcgatctcagctcactgcagcctctgcctcccaactagctgggactgcaggtgcacaccaccacgcccggctaattttttgtattttagtagagatggggtttcaccatgttgcccaggctggtctagaactcgtgagctcaggcaatccacccacctcggcctcccatctgctgtcttttgtaccagttgaactaaaagtcttgaggtcataagcctccctcacagccagtgttatttgccagcaccccagtactgttgttgttttgttttgttgttttgtttttgttttttgttttttgatacagagtttcgctcttgaagcacaggctggagtgcagaggcacaatcttagttcactacgacctctgcctcctgggttcaagcaattctcttgcctcagcctcccaagtagctgggactacaggcgtgcgccactaagccccactaatttatttgtatttttaatagagacagggtttcaccatattggccaggctggtcttgaactgctgacctcgtgatccacctacctcagcttcccaaagtgttgggattaaggagtgagccaccgcggcccagcccagtactctgtgatccccagccaggctcaacctcctgggctcaagcaatcctcccatctcagccccccaagtagctgggaccacaggcatgcaccatcacagctggctaatttttgtatttttgtagagacgggatttcaccatgttgtccaggctggtctcgaactcctggactcaagtgatcctcccacctcagcctcccaaagtgttgggataacagacatgagccaccacacctggcccagcactcagtactcttgaggcaaagttttagtgggtgtggtacgcctagggctttacactctctctcttgcatttgagggctcttctaccaagttagtttctgctgtcatttgaaaggatgagaaagagatcaaggacttgagcagtaggtgagggttttcagacattgtcaaaaagcagtttaaggccaggtgcggtggctcacgcttgtaatcccagcactttgggaggccgaggcaggcggatcacctgaggtcaggagttggagacctccagcctgaccaacatggagaaaccccatctctactaaaaatacagaattagctaggcatggtagtgcatgcctgtaatcccagctactctggaggctgaggcaggagaatcagttgaacccgggaggcagaggttgcggtgagctaagatcgcaccattgcactccagcctgagcaacaagagcgaaactccatctcaaaaaaaaaagcactttttaagtcacctcgacttctttaggcaaaggcctgtctctgtagcagctcagagaggagtgtccaaatgccatgcaatgaaatggcagcatcgtttcttttctgcagcttcttgggcagatctttaaatgggcaaagtgaccaacaaggtgggtgggcaggtgagaggatgtgcttgctgcctctccagaacctggtctccatcctggtgtctacattttcccctttccctgcttgctctacacaggagtacttttctcaccgggtacttgtttggtgacctggagtgtgaggcagtgaatttcatgctgctttcagggcccagtagacaggcagttcagtagaggccaagaggtaaactggcagccaggtacagtgagagggaagcctgacctggcagcctgtgataaccggactggaaggctgggcatcataatagtctcagggctgccagcatcacctttggcactggtagctgcttgtgcatccaggaggaaggcctgttaggcagctgctgcccgattccacagccagcaggcagtcgtgggagtccctgcccagtgagtgcagttgtgtagcgggcagggatagctccctgtcctggtgagagacccaggaagggatgaatccttaaaatgaacagactgttcataagcctcctctctgggacttagaaagagcaactttgccttcttctgtgctgcagcttctctttggcagagttgggccccagaaaggagaagcaggagacaaacagctgcatccaccctgaaaaccagattatgttactaatggtgggtaggagttaagtgactcagctgtgggcagaagccaggaaccctcgatgggccgcccagaattgaacactcaggagcttttcatttggagagaaggataataaggtgtagcttcattttggaataagcgatacatccaagacagggaaaatctagagcccatgtttttgccctgatttcccatagttctcagctctagcttccaggctgctttcccagatactgttaggtaccagttagaggctctgtccttgagaaccacctagcccatctggagaaatactgggtggaacaggacaccacaattcaggagcctcgaaccaggcaggtgttgtataagccagaggaggagtcaccacgtgatagcagaaatacctttagccttggaagttctgaggattgctctgaaccagccacctgccttcatggtgagagataaaggaactgctatctgggagccctgagaggtatacactgtgtaggaggagctgacaaatgaggtagtactaagaagacggtttgagcctagtcggaaattcaggtacgtctaggccatccagaaattgtgaacaagtgattcttctatctaacttggtacgttgaatgtccttgtgggcttaacactgatattcccgggcatccaaagtatccaataggaaggaagagctcgtgaaaccattctgtgaaagccagattttagccgatgtcctgtggttccagtgcctctgcttaaggaatctagccctttccacctctcatttggtgtttctttgggatcccatctagtctaggagtgtggggtgggaggaaagggcagccagaaactgaccttcgcacttatctctccttttgaagggggaagacgttttcatcccgctaatcttgggaataagaggaggaagcggctggcaactgaaggctggaacacttgctactggataatcgtagcttttaatgttgcgcctcttcaggttcttaagggattctccgttttggttccattttgtacacgtttggaaaataatctgcagaaacgagctgtgcttgcaaagacttcatagttcccaagaattaaaaaaaaaaaaaaaagaattccacttgatcaacttaattccttttctttatcttccctccctcacttcccttttctcccaccctcttttccaagctgtttcgctttgcaatatattactggtaatgagttgcaggataatgcagtcataacttgttttctcctaagtatttgagttcaaaactcctgtatctaaagaaatacggttggggtcattaataaagaaaatctttctatcttacatgagaatttgctgggtttctggactgcgagtccaaagtgagaagagaaggaagaaggatagacctatactacccttgaacctgcaaacctaagctgggaagccctagtttcaggagcccatcaggtttagatcctcaccttccctagaggagagaatggctggccagtgagctatatttaaactttttttttttccccctgagagacagggtcattacctcctgggctcgggtgatcatcccacctcagcctcccaaatagctgggattacaggcgcataccactatgcctggctaattttttttatttttagtagagatgaggtttcgccatcttgcccaggctggtctcaaactcctggactcaggcagtttgcttgcttcagcctctcaaagtgctgggattataggcatgagctatggaacccagcgagctattaatacaaacttacatgcttccttataaagcttggtccctgagactctgtggctgctcctgaagctccctggtcaatgacagagaaattaaagggttttctggtttatctttttattgtgaataatgtgtggaatttcccaaaatgtgttccttagtgtgtggtcctgcaggacattgatgagtattcaggtgtgggtctgatgcagactaattggccacagtttgtctttctcacatggcagcccaaaagactgctctcagggagagcagttgtcaaaaacagtacagagcctagtagagcagctgtcccccagcaggactctggtccctgaaatgaaattgcttcagaaagtttgcttggtgtaaggaattaagaggagaattttaggggcacctgcaacggtctgatggtcattctaatggtttctgccttccatctatggcagtgtttcatactggcttgggacccattaattgtggtgtgactatatcacaacaagcatttttgttttctaaacttttgattttgagataactgtagatttaaatacggttgtaagaaacaatacagagagatcctgtataccttccacttggttcccccaccatgctaacatcttgtataattgttgtataacatcacagccaagaaaaaatcattagtatagtccacacaccttcagatttggccggatttacgtgcactgtatgagatgtacatctgtgcatttttatcatatgtgtagctttgtgtgacgccagcatttttaagcaattgaatagtatcagagtgcattacatctgttaagggtaagtgttgatgtggaaacgtattttagttacatatgcacatcatgactggattgtagaaatgtctcttgactgtgagtcacagtggagaattttgaaaaccacaggtcgttcagtcatcagacttgattttatttcactaaaatgggctgctagagagctcaaggtactctgatttctaattggctgctcagggtgcccctgaccacttacttctggtacttggaaaacctagattaattggatatattgacagcaacatgtgcattctctaccccatgagttatttaaggggttttcaagtgtaattttgactagaagcagtttttgctctttttttgttttaattttagtttttagagacagggtctcactgtgttgccgaggctgtactcaagctcctgacctccggagtagctggaactacaggcacctgccactatgtccagctgagtttttgctttcttccttagtagaacataactaatgttggagctcactgtactcttttgccagtagtaggaatccgatttctggtaagtactgtaggtgacagaaccaaggttgcttagaagatatggagttaggagaaaaatgaaaaggcataaatattttctacagcagtaaatcctaaggaagtaactagttccaagacactgtcaacattaaaaatccatagtgcaggctgagcacagtggctcacacctgtaatcgtagcactttgtgaggatgaggaaggaggattgcttgatcccgggagtttgagaccagcctgggtaacggtgagactccttctccatctctataaaaataaatctggctgggcacggtggctcacgcctgtaatcccagcactttgggaggccaatgcgggtggatcacctgaggtcaggagtttgagaccagcctggccaacatggtgaaaccccatctctactaaaaaaaaattagctgggcatggtggcgggtgcctgtaatcccagctactcgggaggcggaggcaggagaatcacttgaacccaggaggcggaggttgcagtgagccaagatacgccattgcactccagcctggacaacaagagcgaaactctgtctcaaaaataaataaatgtgtagtgcagcctggacaacatggcaagaccctgcctctacaaaaaataaaaatcggctggatgtggtggtgcatgcctgtggtcccagctgctcaagaggctgaggcaggaggattgcttgagccctgaaggtcaaggctgcaatgagctgtgtcgtgccactccactccagcctgggcaacagagtgagaccctgtcccagaaaaaagaaaaatccatactggtgtaaacccgtatccagattgactcttctcttaacaaggacacacttggcgttagtatggatctagcctcaaagaccctcgtcacagatgaagcagcccatcgtgaccagtcgaggccttaggaccgcaggaggaatgtctcaggatgagggtcaagcacactgagggtgtgggctggaaaaaagggatctagttgtttcttcctagtctcaggaagccagtgccccaagggttcacacctggtaagtgtaggcgtccttggatatgggctgtagaggaacagtttgaatccaggtgccgccatctaatagctatgtgacagcaaatttcttaatctgagccctggtagcctcatttaaattggacataatgccacctacctgaggatttgtaaaaggaaaagagaataaatgtctgttacatcataaacattatgatgcctgtaattataatgtcaatgaatcttagttccctttatacactcaaggggatcagaagtgacaggctgttgccccagcaaagtcccacagaagccaacccttattcggtgcttggggtttcccaggctttccccaaggtagttggtattttggtattttcccctgcttaaatggcccttactgccgaggccaggcaggtaagaatctccatgtctggaaaaagtggaacctggggcaaactgcaagctaaggataaggagcttggcaggaaagacgctaagactctaacaggaagtggaagggtggacttggagggggaattgaaaccaagaaaaggaaatagccctagctgctgcctcagccttcttgaggggagctgatacttggagttggttgccgttaggttaccctcatttggagtagtactgatgagtgctcgaccgaaacctgggtctactctggtggcgattttgagttcaagcagtgctgccccctactgggggttgctaaaagcactgccatttcagtgggcggggggtgttggttctttttggtttttggttggttggttggttggttggttggttggttggttggttggttggttttgagacagagtctcactcttcgcccaggctggagtgcagtggtgcgatcttggctcactgcaacctccgcttcccgggttcaagcaattctcctgcctcagcctccggagtacctgggaccacaggcctgcaccgccacacccagctaattttgtatttttagtagaggcggggtttttccatattggccaggctggtctcgaactcctgacaggtgatccacccaccttggcctcccaaagtgctgggaaaacaggcgtgagccactgtgcccagcccaccctaaccttttttttttttttttttaacagatgagcgaattaaaaggttaggcgattttttttttttattattggagacttgctctgttgtgcagtggcgcaatctcggctcactgcaacctccccctcctggattcaagcgattctcctgcctcagcctcctgagcagctaggattacaggtgctcaccaccacacctggctaatttttgtatttttagtagagatggggtttcaccatgttggccagactgctctcaaactcctgacttcaggtgatctgtccacctcggcctcccaaagtgctgggattacaaggatgaaccaccgcgcctggctctgattttttttaatcatctttattttgaggcagggtctcactctgtcgcccaggctgcagtgcagtggcgccatgaaggctcacggcagcctcaacctcctggactcgagcaatcttcacacctcagcctcctgagtagctggaaccacacaacatgtaccactgtgcccagctaatctttattttttgtagagacggagtctcaccacgttgcccaggcctcagcctcttaaagtgctaggattacaggcattgagtgtgaagtgttgaacagcggctcagggaggccaaccagggtccagcaaaccccgtccctgctgcctccattggtccagagctggtacccgcagccagcatgacactcacccagtcccagacattgtgggtcaacagagagaaattcagatagctaagagaatggaagcggacaaaggaggcacaggaggattccgtgccagagtctgaattggtcacccccattcaggctctgcctgaggaaaggagaatggggtccgggcacagtcagctggatggagcgtctgaagacggcttgcaccagagccctccgtggctgaagggagaagctagggggtgagtcagccccagggcttgatggaacagacaggaactagatgatctaggaagggagaaatgaggctgagcaggagacagcccaggctccctggctgccactacctaatctgtcccccttcacacacatcccacacacagtgtttagacagagcagcagagaagaaacagacatcctggatcccacagggagcaggctggggctgggaacaggaggtctgtttattcctggaagtcacatatcagaagggtcccacacccacttctgtccaggccccaggctgaactctcccagagcctgtgacttctgcccgaccagatcccgtggttctgaggaccggccctggaaccctgcgtccttccgacccaccagctccctcgaggatggacttgaggctggatgctttcctcttcccactttttgtcccaacagaagtccctgatctccaggatccctgactggctgtgcagagctggcacagccacactccacgggcttccagcccttcaggcccagctctcccggagagcaccagagtccctttgctccatttacttgcgctcttcagccagcaagtgtttcctaatgtctcacccccagtcccagctttcctgctgcaatttccgcctgttccctcccatttcaggccttaagggagtgtggctgggcttctctcctccccctcactccaaagccgcacttgatacaaggtggaaatcaaagcaccacttctggcttcccagccttgaacttgcccttccctctcaatgtatctggtttcctcagcttccctgtgcagcaagagtgtcactcccctcttgcttttcccaagctccccatgcgcccctctcagcagatctgtcttagaggggccaggtgcagagaaaggcagaaatcctaataatgttcccagcgatcgctgcctgtcgcggagtgctgaagggccaagtgttgatctgagtcctcatcacacgggacttcatttagtctcacgataggtgagtacaactatgggccccatttgacagatgaggaaactaaggcaagggaactttagtcatttgcccaagttcactggcttttttaaaaaaggatccagacagctctgattccagcgccagctcatgcctcttcatcatgggggaggaaagagagggagccatttgttggggcaaacccccacccatcaagggccatgcactggggtatatgccgccatatgtgttatcctgtgatattccccaccacgaccttaattagaggtggtttttcttgttcccattttaacacaggcaaaaaccgaggcccagtagtaccttacccatggtcacatccccagagccatttgtccctcatagttcagaacttgactcagaaagcagttgagaaaagtgtggaatgaccccagattcaggaaggcaagtctggccttagaaactgaaaggcccatcaggtgatgggatgggggagtgaagatcctcaggccccaaacacctgccactgccaccatcacacacggaagtgtggagggagcctggtgtgctgtcagctggctggccagtccaggggcttaaatgtaaatgcatcagctgaggcgggaagtcgggaggggtaagtcaatcattattattcattaactggaatgcatttctcagattactccgagctggagtagggaaactgccacctaggtggcagggggagaggggaactgggtgggagggggaggcaggcctcccccagttgctgcagtttggaatatgtcaggtcccaccctcccagaggcggggccagggctgagtcctgccagcctcatttctctatccctctgagaacccagacgggcagagcctgggtaggagagcctggccccgctgtccccactgggtggagacaccatgcacttggtccacttgtgctcttcagccaggacaccagacatggtccaaaccgctgcagggctggctgcagcaactccctgacactcaggaaggcccaggctgggcaggcaatacctgctcccaacagccatgtgagtagctactcccccaaacccccaaaccccagatcctggagaggctactacacccagcccaagccaccagaccctcgggggtgtgcaggtggtacagcctgcaccctgctgggaaatcacccctgggggctgctccctgcctttgtcgctgttctagtggaggtgggttggggggaatcattccgattagggctgggagctccagctcaggccaggtttggggtaatggaccctgagtctcacgggacttaagagagttgatgatgccctgggaaagggaacagaaactgcaaggcctctagagaggaaaagacatcctgggtggagggcactggaagagattgagaaagagaaaacatgcttaggggaggggaaagggggcataaggccttggaggcccaggctcagggtgctgggggaacctgggaaggaaggggagcatcttccttcctctcagctcagggcagccatggggccctgatcccctgtcctggaggaggggagaggtatgaatcctttccttattgacttggatcctagcaacagcagctgctcccctgttgacagaagcaggagttcccacaggacccaggacccctccccctgtccccaggatgtggcagcagagccatgacactggaggactgagaccagggaatgacgggaaggacagggacagatgagagccacagagaagccagactctgcccagactcctcttccctctcctctgggctcagcctcaggcctgggggtgtgggggagtccctctccttgctgctggcatctccatgttcactgccacacgtgccctccagctgcttctctcctccctccagctcccaggaaggaccctgttgctagtgtggagcaaagacgagtcaagtttatgggctggaagtcctacccggaggctgctcactgagctgtgatggctacaaggacagatggggggaagggtgcagggtgcccgagacctggcccgctggagcctgtcacctaatggctggctggaagaccactacacaccagccagccctggtccattctctcatttagaggcctccccggtggaggcagggatacacaaaatgctttggggctggatgggcccgcctttcagtctaaacaagagacctcaacacagctgcccagaaaaggcagataccagaaatggataaagctggctgggtggggactgtccgaagggcagccagcagtgagctccggctggttgctaccacacaggacatatgtgttgccagacctgaattttcaatagaaaccaaagatagttttttatataaatgtttaattggcaattaattgaaaaattctgtgtatcagcgaacatgatacagcccacagcctgcgggtctgcgcccctggattaacatgctgccctgccaggaggacacgacctgcagccccatcctaactctggccaccccatcctgcaggcatgccggctgccgctccaggactcccctgtccccaggaccaagatgacgcccaacagcactggcgaggtgcccagccccattcccaagggggctttggggctctccctggccctggcaagcctcatcatcaccgcgaacctgctcctagccctgggcatcgcctgggaccgccgcctgcgcagcccacctgctggctgcttcttcctgagcctactgctggctgggctgctcacgggtctggcattgcccacattgccagggctgtggaaccagagtcgccggggttactggtcctgcctcctcgtctacttggctcccaacttctccttcctctccctgcttgccaacctcttgctggtgcacggggagcgctacatggcagtcctgaggccactccagccccctgggagcattcggctggccctgctcctcacctgggctggtcccctgctctttgccagtctgcccgctctggggtggaaccactggacccctggtgccaactgcagctcccaggctatcttcccagccccctacctgtacctcgaagtctatgggctcctgctgcccgccgtgggtgctgctgccttcctctctgtccgcgtgctggccactgcccaccgccagctgcaggacatctgccggctggagcgggcagtgtgccgcgatgagccctccgccctggcccgggcccttacctggaggcaggcaagggcacaggctggagccatgctgctcttcgggctgtgctgggggccctacgtggccacactgctcctctcagtcctggcctatgagcagcgcccgccactggggcctgggacactgttgtccctcctctccctaggaagtgccagtgcagcggcagtgcccgtagccatggggctgggcgatcagcgctacacagccccctggagggcagccgcccaaaggtgcctgcaggggctgtggggaagagcctcccgggacagtcccggccccagcattgcctaccacccaagcagccaaagcagtgtcgacctggacttgaactaaaggaagggcctctgctgactcctaccagagcatccgtccagctcagccatccagcctgtctctactgggccccacttctctggatcagagaccctgcctctgtttgaccccgcactgactgaataaagctcctctggccgtttatgattatctcattccatatctcagggcgaggcaggaggaaatggctcaacacaccaacaatagaaagaacctacagacatacgcgtggattaaggcagagtccgactccaggcaggcaagaagtgtcgtgcgcacagaccacccctggagatggggagctggcacatctcaacatccagccgattctgcgggacagccttgccctgacggggccctcgctagctcctcctagggtccagccatcacaaaatccacacagactctgtctctgggaagtatattttatttacatttttaaaatctttaactagtatctcttcctcctttccacccccagagacttgggaagggaaagaacgggaacctcaaacacctactccccacatacaaatacacaccccatggctcacaccagcaaatgaaagtgaaagagaaacaggtccacccctccctctgaagggcccaccaggtctgggcaag

SEQ ID NO: 595 - DNA, 1422 bp, Homo sapiens
gcagggccgctccctccgtccttgcctcccttacccaccctcaccggcccttgtttctccttcccctgggggcagccgccgccatgatcctgctggaggtgaacaaccgcatcatcgaggagacgctcgcgctcaagttcgagaacgcggccgccggaaacaaaccggaagcagtagaagtaacatttgcagatttcgatggggtcctctatcatatttcaaatcctaatggagacaaaacaaaagtgatggtcagtatttctttgaaattctacaaggaacttcaggcacatggtgctgatgagttattaaagagggtgtacgggagtttcttggtaaatccagaatcaggatacaatgtctctttgctatatgaccttgaaaatcttccggcatccaaggattccattgtgcatcaagctggcatgttgaagcgaaattgttttgcctctgtctttgaaaaatacttccaattccaagaagagggcaaggaaggagagaacagggcagttatccattatagggatgatgagaccatgtatgttgagtctaaaaaggacagagtcacagtagtcttcagcacagtgtttaaggatgacgacgatgtggtcattggaaaggtgttcatgcaggagttcaaagaaggacgcagagccagccacacagccccacaggtcctctttagccacagggaacctcctctggagctgaaagacacagacgccgctgtgggtgacaacattggctacattacctttgtgctgttccctcgtcacaccaatgccagtgctcgagacaacaccatcaacctgatccacacgttccgggactacctgcactaccacatcaagtgctctaaggcctatattcacacacgtatgcgggcgaaaacgtctgacttcctcaaggtgctgaaccgcgcacgcccagatgccgagaaaaaagaaatgaaaacaatcacggggaagacgttttcatcccgctaatcttgggaataagaggaggaagcggctggcaactgaaggctggaacacttgctactggataatcgtagcttttaatgttgcgcctcttcaggttcttaagggattctccgttttggttccattttgtacacgtttggaaaataatctgcagaaacgagctgtgcttgcaaagacttcatagttcccaagaattaaaaaaaaaaaaaaaagaattccacttgatcaacttaattccttttctttatcttccctccctcacttcccttttctcccaccctcttttccaagctgtttcgctttgcaatatattactggtaatgagttgcaggataatgcagtcataacttgttttctcctaagtatttgagttcaaaactcctgtatctaaagaaatacggttggggtcattaataaagaaaatctttctatcttacat

SEQ ID NO: 596 - protein, 298 aa, Homo sapiens
MILLEVNNRIIEETLALKFENAAAGNKPEAVEVTFADFDGVLYHNPNGDKTKVMVSISLKFYKELQAHGADELLKRVYGSFLVNPESGYNVSLLYDLENLPASKDSIVHQAGMLKRNCFASVFEKYFQFQEEGKEGENRAVIHYRDDETMYVESKKDRVTVVFSTVFKDDDDVVIGKVFMQEFKEGRRASHTAPQVLFSHREPPLELKDTDAAVGDNIGYITFVLFPRHTNASARDNTINLIHTFRDYLHYHIKCSKAYIHTRMRAKTSDFLKVLNRARPDAEKKEMKTITGKTFSSR

SEQ ID NO: 597 - DNA, 34603 bp, Mus musculus
  misc_feature (1)...(34603): n = A,T,C or G
gtgactgtatatgggatgaatccccaggtgggacagtctctgggtggcctttcctacagtctctactctacactttgtctccatatttgctcccgtgagtattttgttcccctttctaagaaggactgaagtacccacactttggtcttccttcttcttgagcttcatgtggtctgtgaattgtatcttgggtattcgaagctataaaaatagctcttgtttgtacctttcttaaccagaactataaaatacattctcttgtgactacctaagacgttgagaataatgttttccgttttttatatgcatatagtaaaatatgcatccataatatgcaaagtaacagaacttatgtacgcttagaggtttgagcttctacttttggtgtagaacctttcgggctcaaaaaaagaaaaatagagtgagaaaaggcaggggatatataataatacataataaagtgtaataaatgactatctttctccagtgccaaataatcactgtctttataactcaataattcccttaattcccttacacttgtggggttttgggggggagagggagttaagaaagggtttctctgtgtagccctcactgccctgaaacttgctccatagaccaaggtggcctcaaactcagtgaggtctgcctgcctctgcctcaaaggcacataccaccaccaccctgttccctgcgattcttatgattgcctagacaatgtggataaggcattggtcaaagagccagcactctgggtaagcactggatgaacttagtccagtgctctcctcaacagcctgtagtccgcacgttcctcttacccatgtataaagtttattctaggatcatgaaaagttgtgtagagatggatccaacattttaagcaatttcatatggaactatggaaaatgctgatttttccgcatgttccaacccattgctgcatttcagtggtttaaaaaaaaaaagacttaaaataaatatagcctaacaacttgagttcaaagactgtttacttagaagtgtgttgaaagtatattccttatgaaaaatgtggctgtttttgcttgcaggctattttatatatactgtagttacatttgttccctgtgtggctctatccatctatgtacagggtttagcagcttgaaagctgaagggaagtgtcacaggccggtttttacacccaaactgcttccttttgcctctctctgagttcagccaatatcaagcaagtggaagtagactaggaattcaacttttcatccctagcagactgggaggttcgagggcagtgtggttttaaaccttcctaatgctgtgaccctttactatagatcctcatgttgtggcgattcccccaaccatacaattattctcattgctactttgtaactgtactttggatgctgttacaaatcataatgtaaatatttttggagatagcactttgtctacagggtctccaaccacagattaagaaccactgttatacagcgaagagcagggagggaggcaaagagaaggaagacctgcccaccgtttgttatactttctagtcatctctgtagtcatcatcacttgtcatgtcaccagaaggcatggcaccgggagcatacagatgggatcataatgaaattagagacaggtaatcattccacctaagtgaacggaggtcctgtacccaaagataggcaagataggtgtgggtaggaattcagcgaggtcaccagacgctaccggggattgaattctccgtcagccacgtaggttaaagttttgcaaactgtcctagaccagaactcaggtttcactgagtttgccagcgaaatcgccaaagactaagaagaacgcttacttaaagaaacctgcaacagattctaggtgggctgtggcattttgcacatgctggggcgggggggggggggggttgttcaccatgcttgttgtcttgtgttacatggatgtaactgactccatggtgtttccgagatacttttgtgaagcttactcatggagatgtcaagctaacgacactggcactgctgggtatggtctgttattcttgcgattaactgaaactgaagttaaagcaaaacaaaacgaaacaaaaaaaataaaattaaagaaaaacagaaacagtgaaccaggaagatgagttccaggccagccttaactactaacgggattcaacaaattaaaaatcaacattttactaaacctactgctttagacaactagattcttctcacatgccctctggaaacagtctctgttagctttgataatgtgtctgttacacaagacacaggttctacctctctggccagactcagcaagagggttttgtttctcaggtgggttgagatgtgactgagcagaggctggggttgctggggcagctagctgccttctccaccccactgttggaggccttccctgctcagaccgcagcattaaaccatactgtctctcatctcaaaggcgtttctttctagcttcagaatgaatgctgggaagacttttgtcacaggcctggggactccggctcttgttttcaaagtggggcagacctatagagaccagaaacaatacaaaacaaactcaatgttatagcaatctcgctctggcctgcaatcatcccctacccttgtgatctctgtcaaatgaacttagaagaaatacagggcttcatgtagaagacagacagggattattacagaataatgagagtggctactgaggaaaactctcacaggtgactggctaatgagaccattacaatgacactatgtgacactatatagcttaagaggctatatactgtatcttctagtgtctggaagagttttcctgaggcatgttttccggtttatatgatcaactgacccttttgaattaactcttgctgtgtgttgggggtgggagggaatgttgtctctgtcctttgagagttctctactagaaagtaactttcggacacttagggcagtgcagagagtcatgtctccacccagtgccagagatgactcggattctatttttttatccagaaatcaaataacaggacagagggaaaaaagcaagaaaaggttttaaagctattaaaacagctgggcttttatcaggtggaaatgggtttccctctgtgggccctatgcatgcaccagaacttcctccctttcataaagcacttgaaagcttactagtatttccttccctcctttttacctatcagtctttcccacacgaatgtgcattgttagatacaggtgggcctggaagctggtgaagaagcaggggtcctgatgagagcaggctgtgtccttctgtaataagcctattttgggtaaaagtttcaaagactgtatccagtcctgagagactccattattttaaaagatgccttccatgggcacatgcatgtagtactcaaggaggccagaagagggtgtcagacaccctggaattggaattacagagggtcgtgagtcacttcatgaatgctgggaaccaaaatgggtcctgtacaatagtaatcacacataaatgcagagccccctctccgtgtcctgcaggggaaatctgtactgtacagatttcgactgcattttgaggatggagtataactgtacacctgtgtgaacataaatggcaccatctgtctggcactaccatgcacacagagtaagacagcttattcctgcaaacagagaagtcaccagtatgtaatctattgggagtgaattaagacactagggacatattgggataccagacctgaggacctcctgaacactctagaggcaggagagccaatctgggacgctacgtgggtgggttatgagcagctcctctcctcataatacacttggtagtctagtctagctccgttacctagatgtactaacccctacacccctctttgtacaatgcacccacgcacactttttaggaactcagctactccttttcttgaccccttagtggaaaaccacaataatcgtgacgactgagtgtcttccttcgtgtggtctgctgctccctgcgggctcgtttgatcttttctaccgttttacgtaaaattcccttgcaactttgcaatcagggctggcttttacttcagtactgaacaaaacactgagaacctggggacagccagtgcagacatcaccctggactactggtccacacaccagagaaaaatggccagccagcaggatttacagccttttatagaggcagccagcccacggtgcctaggcgagaattggagtgggtgaacaaaaaccctgatctcggcctattactcttctggggctcaaagtggcccaaatcaacttcaagcccaaaagacctcacctggacagtaggaagaggcagacactttttgctacagtggtccccatacctagcatctaattaccaaatataggcagaggactcccaactgtcgctggggctcagctgaatatctgataatgatgtagcctgaactgccacctgcacttgcttagctgtcctgtcccttcaggtagacctggcctacccttgccctgtacctttgccctcagacctgtagcactcccagccacagccacctctccagcctctcttgcaccaataaagaaaggaaagacatctcaaagaatagctttttattcatattacaacgaacttcacatatggcatgtatttgactacacttcaaagctggagggaataaaatacatctagctgtacaaattatacacagtaataaaccagtgtgtaagagaaacagaaaaaaaaagtgaaacaaatccctgtcacctgatgtcacctgaaaagcacttgtctagttgtagggcccaggaagagcactgagacactgctcccatattctgcgctcttcccctctggccctgtctcactgctttgctcagtagtgatgatgtcaccccttgctgcctagctggcaacgctggtttgctctgctctctttgggctctctttgggcttggagtagtcccagggccgcctgttctctgtgaatccgtacagcttcctgagggccacgcgcgcagcttcttcctctgcaacgagtacagtttccccaggtccctctgcaatcagctttctgtcactaggaagaaaacagacagggatctgaacgccgggaagacagcacatgagacagttatgccttccatcccatcccatccaaatacaacaacctacgaggcccagtttctccaaggcaaagcataaggtggcacaaggatcagaagttcacaaggattagagctgggtagtgtggcacactcctttgatgccagcatttgggaggcagatacaggcagatctctgagtttgaaacagttaggtctacatggcaagtccctcagattagaaaatcttcacacaaagattggaaaaatatttgcacaaaatttaatctacttatccaagatactcaatgtccacatctactgctttaattgatttctttctctctctctctctctttctctctctctctccctgtctctctgtctctccctccctctctgtctctctgtctctccctccctctctgtctctctgtctcaggaaagcattccaccactgagctacacctctaccccactttaatcttaaaacctgaaatccatttcagacaggtttatctctaacaaaactacaaggctctaaatgtgctgacactttggtagacagcaaagctcctgtcttccactctgaggctcggttgaagctgctgccaagaacagatgtattttttttatatatatagaaaatataaggtgagcttatatcccataaaactctatagcaaacagctgtccaaaagtgacttagcaggagctggagagaaggctcactgctcagagcactggctgtgcttgtaaggaacccaggtcggatttcccggatgaacctaacagctaataaacatctgtaactctagttccagaaccgacaccttcttctggcctccacatgtatgtgatgcagacatacatgcaggccaacactcacacacataaaattttcaaaagttactactagcaaaacacagataacttgtcttctattaacagcagaaagagaaaaccaaaaaacccaccaccatcaccaataacaaaaaccagataatgaccctatccaccctgccccactagggtctcacggtgtagttctgggaggcctctctatagacagtctggcctcaaactcacagagatctgcttgcctccacctcctgaacactagcctaagattaaagacatgtacctccccccgccccccacccagctcagagatacaattttaatactgttagaagtaacacttaaaaactggaagtctatcttctaggcttccaatcaaagttaaaaagtgaacaatgaatttttactaaccagtataagccaacaaaatataaaggcagagcagttgtgcttccagactgcctggtgagtcgagactcaggagctgagatgtttctcttcttcagctcctctacgagtagtcccatgggatttacgacggtccacatctcaaagagctctttccccgtcatttgtgtaattaaaaagtcctgtgcataaaataacatttaaattagaacaaagaatattatggccagaattcaaaatccatttttaccataagaactgataggcaatgaatggcaaatgtacatattaagcacatacagcctgaaaatccaaaatgctcggaatctgaaacttttcgcactaaagtgttgcttgcaaacgttgagattatagagtatgttcggtttctggctttggaattccagcttgagcttctccctcatgggctcacacgtgcaaggacagcacactctaccagagttatacctggatgtcctcataggctgttgttgtttgtacttttaataaaaatcatagaactttaaatgtttcaatttcaaacctaaagaaaatgatgtcaagcaacataacctatgaaaattattcagaagactgactcctgcctcagaattcaagactcaaatcattgaaattcaaagtagaagcatgtgtctgtctacttactaaggacatacccacaaggacacaccttccctccatggcagactgcatctttttaaagcctgagctagggctggagagatgactcggcagtttaagagcactgactgctcttctgaaggtcctgagttcaaatcccagcaactacatggtggctcacgccctctactgttgtgtctgaagacagcttcagtatacttagaaataataaataaatctttagcccggcctgagcaaggccgactggagtgagcagaggttctgaattcaaattcccagcagccaacgtgatggcccacagccatcagtacagctacagggtactcatgtacgttaaataaataagtaaataaataaatctttaagccctgagctaaaataaacatttttttccttaaaaattaatcaaaccaaaacaaaaaattttaaaaagctaagaataacgtaaacctccagcactcacaacccagcatttattatttgctttccagggtattggcaaaagaaaactgaaataaccaccacaaagttaccataaaaatagtttgggtttttctaagttttgggggtaggaacagtcagttgtaccaagatctagcaaaggaatgcatgagaaaaagaaacgtccccctctgcccacatgaagcctgtctgaacaagtgcatctaaccattacccaccctgatgaacagtgcagccctttcagggccactgctctgcagcagggctccaatgactgcgaagaaagtctgacgtaagacaggcagggggacaggaaattctgcactgagggtcaactgctccacagccaagttcctggccacgtgacagacaactgcctcaccagtgagaaagctaactagactctcagtgccttcggcgggcaagtctgggaattcgtcttcgagaaactgtgtgaggcaccgatgtgaaaaagacagcccttgttcaaacagttcctgattgtccttaagattcagaagagcagcttctttctctatgccaaggctctgacgtttcgcctcttcgcttttgatgtagcagctattgataaatgcagttttgagaaggtccaacgaaaaggtttcttgtaagcgagatccaaaggcttgtacctccgcatggtaatcccagtttggcttctctgagctgaggaggcagacagtaagagacggtaaggaggagggcatggtaccacgtaaggtgtgctctaactttactacataacggaatgaaatgaagtttgtttcttttattgtcggattctaacagtctaaatacaaaaagtaatacagataaccactggcagtccgtcattactgtctatatataagatgtgggggtttccctttggcttaactgccatattaaacagattgttcacatcacattaggctgctctgctagtttttaagttctctctttctgctctaacagtgacattatgctttctacctgagtatgaacaaattataactatatacattcaggctataaactgaaagtaattatgtttagtttatattatatttatttaaagctcagaaatgtccacttgaatttccagttacataagttaatatcagtcttatgagtgtgtcaaaatttcataaccacaggcgagggttgaggctgttctaattcagtggtagtggtaattgacacaatggcctggtgtgtgcaggtacactgtacagacacacaattccaagaattaaatgccttttcctagagaaaattaaatgtcttttcctagagaaaaataatgccacaataaaatcctttaaagttaaaagagagaagaaaaatagatctaagtttaaaatcataaatctaaatttgttttctatagttttttccaattttaactcattaatcttaaaatacccacctgtctattgggcaagggaatgtaaattaagacatgattctgagtcttgcttattaaaccacaataattgtgcaatagaaggtgtattctcactggtgttagtgtaaaggggattaatattctcctggagggcnnnnnnnnnnnnnnnnnnnntaaaggggattaatattctcctggagggcaatattaaaatagtaatcaaagtctcagctcaggaataactagctaactagcagacagttcctgcttctttggtgttctaacaatctaacggaagtcaaatgccaaagaaactgtaagaatgaagttgatcttcgtgtacttttgcccactaagacagagtatacagaaagtgcatgatgcaggatcgtatataagcatgatgcactttagaaaaatctgtggggtttttgttgaggttgttgttgttgttggctgttttgatttgtccgacaacccccccccccgcccccaggcaagaagattaattagataaaaaacctaaacttttatcctcactccaggcagtggacatgaaattctgttacacacagaattaaatgtttctaccctggtacgcaatatggtagaattgatgaccctattcctctttaaaatacccaattggcctgagattaggaagtgacaaaattgggtcaatcccaatcccaagcagttaccctctggtcgaccccatttgcttatattcagctagtgagattctgcaggggacagcccagcccctgtcgcccagttcctctgccccatgctgcctgcaggaacgtgcccaccgcagttgcctgcagcctggtgtcctcgccgccaccttagcctctccaccctcccgagacgcctaccgtcgcactggcggcggcgggcagcgtagcaggcgccatcgctccagctctttctggaagcggaaggcggcacggaatcccttcttcactccccgaaccggaggagccagcgtggggacggccggagccaataggcggcgagggccctgctgcagcaaccggaatacagcagaagccatggcaagaacaaggcaataggaggcggaaggaagacagccggagcggtgtagcccgaacgcggttccccggaaactggtgcagcagcagagagaggcctgaacgctggaggacaccgaagagggagcatggctagtgtactgcgcgtgcgcaagtgcttctttctgcccattctgtaagtatgggtgcagaaattgttgagaaacagttgcttgaccctatcagtctcgcttgtgtttatttctcattaaagcagaacaaaaactagtttttaaagttctaaataaaacacttaaattttcacaagaaaaacatttcttgtttacattcagtcttaaaagttgcagaccatcattccagccactactgaggaaatgttttcaaagtttaaggcttcacccaaccgtttccaaaaagtctcgcttacaaaagcacgttcagaagtgtgtttaacttaaccaaaattaaagtttgtattttaaaacaactactttcctcccaccctacccccctcccacaggggaagactcgggaccaggaggggtacataaaaatattaacagtgaaattacaagttttttttttaaaaatctgtatcaacgtttgaagctttcctaacaaaatatgagtaaaagacctgaagtcagaaatggaagtgtctctgcttcttttcccatagtttttatggtgaacatcttttccttgagaggcacctgtatggttcttatacaagggaaacaattcccctgcactcacccagttagactccagggtctttgtgcctgctttcacaaacagcttgttcattttttttctctttttttattattattatgtattttcttcaattacatttacaatgctatcccaaaagtccccccactccctccccccccccactcccctacccacccattcccattttttggccctggcgttcccctgtactggggcatataacgtttgcctgaccaatgggcctcgctttccagtgatggccgactaggtcatcttttgatgcatatgcagctagagtcaagagctctggggtactggttagttcataatgttgttcctccgatagggttgcagatctctttagctccttggatactttctctagctcctccattgggggccctgtgatccatccaatagttgactgtgagcatccacttctgtgtttgctaggccccggcctagtctcacaagggacagttatatcagggtcctttcagtaaacgcttgctagtgtatgcaatggtgtcatcgtttggaggctaattatgggatggatccctggatatggcagtctctagatggtccatccttttgtctcagctccaaactttgtctctgtaactccttccatgggtgattgtttccaattctaagaaggcgcaaagtgtccacactttggtcttcgttcttcttcagtttcatgtgttttaccaacttcttatgctcgttttctgcttctgtaactctgcctatttgcctgtcaaatcctccatttggaaaccccctactcttggacgacaaaaaaaccttatcttccctagatctaatgaggatctcctgaaccccacctgtattgagagacagccaatgtacacaaattttaaaggtttgttttaatcaattgctttctttaattaatttggccatcatgatttgagctaggggtctttttcctcacatctgtgggattaacagtaatctcaagcttaataaagttagtgaaagagatccacacacattgggagttccccttcatacctcagattaggaacaaaccacacccaaacacctgctttcacagagagatcctttattaagtgggggaggaaagttaaggtggctgctttctcactctggcagaaaaacagtagagaaagaggggggtcatgttaggatggatgatacattttgattgggtattttaattagatgagccaaagggggctaatgattgctggccttcaatacttacatagctggactctggcagtcagccttaggaggaggaagtgaccaagtaaaggaatagaccttggtggctagctttaggaatgtagtctaatggtttttagcaaggcagagggaatggaaaagaaggacaaggcctaccagagccaggctgccagagtcccttcagttaaagtgatgtctctatgtgctgaggctctcagaaacaacaactataagaataacctgtaatgtctcaagtagtttctcccacttttgacccacatgaagctcagaattaacatctgcattcagcttgctgtcattccactgatgtaatcacttaaaactagtatattcttggttgtcaacttgactacatatggtattaactaaaactcaaatgaccagacacattttcgagggtttttttttttttcttaattaaattacttgaaatgagaattttcgctgctaacccagagttttgaggtggggagatatactgttactctgtgcctcactttccgctggcagcctatataaaggacatggaggaaggaagcttgcttttcttgtctgcatgctctggctagtgctggcaagtcaatcttttcactagcattagagcccacttctctgggatttcagcatatactgaagaccagctgagacatccagccttgtggactgaacacctttggattcttggaccttctgtttgtaggcagcaattgttggattagctggaccacagcctaatggtccacaaggccattctaataaaccccccttctctattattgagagattcattctaagttttgttaagtttttttgttttgtttttgtttttcttgggagtttagctcatgataaggtacaacaattacttttgaacccatggtaaggcagtaactcaacatggcagaatgtataatggtacaaagcttgttcatttcatgcctaagacataagagagagttcatgaagagaaaagatcagaggccccaaaatctccttcaaaggcccatccccagtaattgacaatctcccactaggcctcaactaatgaaggtcccactatttttttagtagtgcaatggactactgaacaaatttttattacatatgctttagggggatattacaaatctcaacatagaaaacttgcatttttaaaattgtgtttcaattaacatagtaagaagacaaatacttgggcccatgatccagttccaaaaacttgaagagacaataatttttgttgtattttttctattaagaacttcactaagaacaatgatatgttgttcctaatttttaaaagatttatttatttatgtacttagtgtatttgggcgtttgtatgcacatttgcacaccagaacagggcatcggttcccaggagactacagttatagatgtttctgagtcatcatgtgtgtgctgggaattgaactcaggacctctggaatagcagccagtgctcttaaatgtggaaccatcccaatttgatcaaagctttataagggtcaacattctgatttctagttggtcactatcaggtgaacagtgggcagagtcagattgaggaagaagagagagtgaggtattgagagttcgctttaaccattgatgaatactttactctttgaagccgttatatcggggaccttgcttactcaatccttcagtgatggcgtgagcaattggtacacagtgcacaaaaagataaaaaatagcaaaggtggtgatatctgtagtaggcttgcctgcacactagcaattgtaaccatgtgaagtcggtccatctcttgtattagctaagaaatcagatccaaaatgttctttaaattctctcctgaaaaaaaaaaaactgcagatagatataattgccataaaataaaatgactagagttaaaactggttaaacgccagaataactaagtcttgataaggaattaaatctattctactgaagtcatatttgtaaagtctagttttagaaaagttgactctagatacaatagccaaagtgaaaaaccagtaaagctcactagtggctcccaacgatctggaactccatctctaggggatccaatgccctcttctggcctctacaggcacagatgtagtacacaatacacataaaatgataaaataaatacatctttagaaatctataaatgtcaatagaaatctgatgtcagcatcgttatactgcaaaagtcttgatgcggtagtagttatggagaccttctacatgaagtagctgtgttgagggaacccttatagaaatggggtgaccagtgccaggcaataccttgactaaaacctcaggagcagattctccgctcttacatcctaggcttttgaagggtatattttaagtcaccaagttttagagtaattttttttcacttggggtcatatcaactgggtgaaatggcaacataaatattccatgggtaagcatcagctggctataccccatgacgagtgccagctgcagtatacatgtcaggtccagctgtggttctgaatcctcagcttcctccccactcagggtgttcagatgtggctgcacactggcctagaaggataaagtggaatctggaacaggtgggggctgcaaaatccctatccagttgggagtgagtgcctaagtgctgggagcaggggacacaaggggacaggggactcaactgggggatggagtttctcctaggatcttagtgttacagctcttttagacaaaggccttctccaatggccttcaacaaaactgctctcttagacaatcttagcttttgtgcatacctttattcggagtgggcttgtattcatacactttatttggggtgaaccagagctatctatgacccttggagggcgagaagtatttttcttctgaataagtttcattggctagagtttaaagtactgagactatctcctttgcatagagaggcaatccaggaacccctgccgggcaggttcttatggggactaggggaggatgttgaatttgtaaatctgccaaggtctactggaccttccccagtgggtagtctctttatagtaagggaatttgttgatgacttacagtctgtagtccaactccccaacaatggtcagcagcagctgtgaatgaaagtccaagaatctagcagtttctcagtcccacaaggaaagcaggcaaagaagaggaaatcttccttcttccaatgtccttatgtaggtcttcagcagaaggtgtggcccagattaaaggtgtgtaccattcgcctggatctgggacttgctttgtcccagatgaccttgaactcagagacctccttgcctcctgggatacatagccactatgcctcaagatctccatgccaagatccagatcagaagcttgtatctcccagccccaagatcagggtcacaggtgagccctctgattctggattgtagttcatttcagatatagtcaagttgacaaccaagaatagccactacacccaggtagagtgggtgggggatgaaactcccaaacaaggtcaaagaagaggaagccatgttggtaaagggagtccatcatttgtgctgagctcagaggagctatctggtcctggtagatttcaaccttaattagcatggtttcctcacaattctgtatttcagaaatatattgaaaggtgcgttctagatggatacggatttgctaaatgtggaggaaaggagaaaataaacaaatattctatagtttgtacaaagtcacaagaacttttaagacttggcagagctgaaaggagggttccctagagtaaactaatagtggacattcaacagttgagagggcaagcaaatttattatgttcatagaagcaaatcagaaagcataatttctcactagctcagcatgattcagactgcaagtaccctcccactgggaatacacacaactttagggacctgtaggtgtggtataggggaattccctgggcttagagaaacataatggcactgggtaaagtttcttgagtaggaaatgaagacaatagagcaagtggctctgtttggaataatgagtgttgcctttgaagacgagatatgcctgtgcaggtgtgttatcagacttcagcctttccccagagataggcatttagtgaaaggccaaaggtaattatttatttcgttggaggttcaggctttaggcagacaaggaagtatcagagcagtttctcccaccacatattgctgtcctctcttgttttcttggtagggtagagtgtagtttgaaatgacagtccttggattattagtaaatttccctccacctggggaaatgagtcctgcctttcaagcccccatagttgcagattctaaatcctattattaggagcattcagggaacaaatttttacaatacagaaataggggatgctggttacagtttctccatctccactttcttttttctttctttcttttttttgatttatatacttattaatatgtaagtacactgtagctaacttcagacactccagaaaagggcgtcagatctcgttatggatggttgtgagccaccatatggttgctgggatttgaactcatgaccttttggaagagcagtcagtgctcttacctgttgagtcatctcaccagcccccatctccactttcttaatacttctttaaatggagcaggagttgcacttgagtaggaggagtgaccatggttggaacagaaatattaacaataaaccaaaccaagtgggtggggagataaaggtgaagatggcagacagtgttggctataatctcaaagctccctgctctatttgtaccgctttccattctgtgtaaataaacatgtagaagtgatttgagctttaggcccaaaacaggttatgaacaggcaaaatgggtagatggaatcaagtctcctttcctctctggggcagaccatgatactacggctttgggtgaggctaagacgagttagcccagggacaggatgacattaagcttctttttttcagttaatgccacagatttaacatgctcgaaacagataaaaaatgtattggtgtatatacaaatttcagggggctggagagatggctcagtggttaagagcactgactgctgttccagaggtcctgagtccagttcccagcaaccacatggtggctcacaaccataatgatatctgatgccctcttctggtgtgtctgaagatagagtactcacacacataaaataaatacatttaaaaaaatacaaattcagggagatgctgataatattaaacatttcctcttagctaaccagattacagccactaaaattataaacaaccccagtgctttatgcaaaggagctttcctttagatgctcatcatttatgtgaattgtattgtttatacatactttaatatttattgtattataattaaaacatatgctgtcatagttcagtggctttaacatatgtcttcatatgctattggtaattcactaatatcacagtcttggttttgtttcgtcttattttcatttatttactgtgtgtgtgtgtgtgtgtgtgtgtggtgttgttgttgttgttgttttttgagacagggtcttactctgtaattccagttggtctcaaaagctcatggtttccttctacatcagcttcccagtgctgttagtactgggtgagctaaaattcttatactatcacagtaataaacaagacccatatcagatggcttcatggaggaagttaataaaaggaactagtttcctttaattttgtttggggttcaaaagatgttagaagaaccgaaatgtctgtaggcaatcaaggggaaactaaaggtcaactacaatggggttggaaagagaggggagagaaatcatcacagcacaccaggaagcccagaatcttagccaagactgccttcccagagctagggcataagagggagctctattcagtgggaaggaaagactctgctccgtgagcagagaaagcaggtgaaatattttcgtttcccctttcttcccatcttctagtcttctgcagctgcttgccactgtacaaacataccaggcagcaaagtcacagagtctaggaagactgcagaactactccttctatggagaaagagtggacagcaaacaggagaataactcttagggaattataatcaagaagcaaagattcaaaggtaaaatgccaaggccaaaggaacatgctgacctactaggctaacccacttttaattcacccaaatgagcatgctgacctactaggctaacacacttttaattcattcatatgttaaatgtagaaaccctttaaaacaagcagtcactgatcattgcacacccatttgtaccactaccattataataaaactatcaagacattcccctcaagaaatctagtgtaagatgcaaagatttagacttagaaaaggtgatgataaaatgggtaattcaaggtgaagtccaagtttaggaacccgggttaaccatcatggtttctgttacataatctctgcttccaacatcagcagtacaagttaatactattttcactgtagaaatgcaatctctcaaaaggctatctagcctgccaaagatgtctctgtcacttaacagcagatctgattctaaagattgggctctttttgtctctgggataaagtgacagccgagagttcatggctggccatcaatggtagaacattattaagaggctatgctaactcaacagggcaactcaaaaatcaattccccttgtatatccggagtccatcagtttcaagacactgttaattatcgcctgctgccaccacttaaacccaattttttcaagtcttgcctctacatttccagaggcttccagccaacttacttcactaatctacatcatttgccacagctgatcgttcacttctaaaacaaaattatcttcctccatgggttccaaacaaaaccacactttgcctagttttctcctaattcactgagcctgctcctctgtcctctttctgggacccctatttcttgatcacctctaaatgatgatgtatacaacagtcttctttagttacaccaatggttctcagatcttcctaatgttacaaccctttcatacacttccttatgttttggtgaaccccaaccaaaaaatgattttgttgctacatcataactgtaatttttttactgttatgtattgtaatgtaaatgtctcagaagtaggatatattttatatgacccctatgaaagggttgtttgaccctcaaaaggatgggaaatcacaggttgacaaccattttatacgtatgtaaaatataattttttctggaattaattatattctcatagctgtaggaataagatatatacttcaaatttcatgcggatttgaacactgatttcatgaaatatggtataaaggggaggtaaaattaaaacttattttgtttacataaattgctttcaaggtgtagttaaaatgctttaagtgcacataaagagtatatctgagcaaatagaaaataataaatcagaaagctttgaacccatcatggtttgagtccaaccaaagaatcataaatgcgaaagaatcataaaaaaatggtaagacacagctcctaagtggccttgtttgatctgtccctctgggaagattctagttgtataattatgatcttgttggctccttctgattggctgagcttaagttttgttttcctgtgctacaggcatgagtcacatactacaagaagtgggtcaagttaagtttcatgcttacaaatcaagaagggttaaggtctctgaagaggtttaactggctttgtgacctccaatagtcttcaggcccaagtaaacactggtctcatgtaccccaacagagttcagactcactatgtcgctaaggatcattttgaacttctaatcctctacactgggattgcaagtgtgtgtgctaccatagccattttgtgaggttctgggcctcatacacactactcacaaactctcctacctcaacttcgtccaatgagcagaatctctgaacacctccttagagactaactgcctttcttacttattttgaaccaccacatcgtcctcagaacaggaataaactcggttcctcttgtttgttgccaaccactgagcacctctggccctgccggtgtctacaaggtgcatgccatctgtatgccttgaccttctgaggtgtcatctgtagggcaggaaatagtgccactcctccataccgtgtaaacagcctgcactcgcctacttctcgccttcgcctggagacccagtagacatcctcagacattttcctgctgaaaactgaagttcataccagtttcttcctcatcttctcatcttggaaagtggtaacaccagttttctagttacgtggccctagtttttaatcttgctttcatagtctgagtctgtcctattttgctgcctgttgctgtgataaacagcatgaacaaaacaacttgcagaagaaaggatttatctttcactttcacatcactgtctgtcattgagggaaatcatcaaaacaggaaagaccccagaggcacaaaccgaagcagaggccatggagaaatgctgcttactggattatcccacctggctagctcagctatatttcttgtaccatataggaccatggccaaggggtggcaccatccacattgggctgggtcctcctccatcaatcattattcacacacatacaccccaaaaccagagttgtctacagaccaatctgatagagacaattcctcaattgccattccctcttctcagatgactctggcttacatcaggttgacaaaatgctagccatcacagtgtctaagagatctcactagcttcaccttctagatatgtctatcatctgatgtctaatcatctttggactccttagaggctaccatcatttcccagttaacctatttcattaccttcccgggggacaaccttgctactcttctttcttttaaatttttgaagaagccgggcttggtagtggaggcctctaatccatcttttgagtcaggaggatcagtaagttgaaggctttcttgcagaatggagttggttccaggacaacctgggcaatgaatggagcatcagtctccaaacagaaagtaaaatggaagaagcagggggggataagtgtgagtgggagtgcacatgactgacatgtgtgaagccctggttccacatgtacacatgttgtccctcagtacaacataaaaccaatcatcaatcaattgctcaaattagaagtagctgtacatgattgcacacacctataattccagcactagggaatctgaggcaggaggactgtgagttcaaaaccatcttggctatatagcaagattttatcaaacccaaaatctttacaagttctctgggctgagcattatctattctgtctgtcttatctttctcactcacaccctgccctaccgtagcataacaggttgctgtcttcttaccacagatctctgctcacctctgggcaaaaacatattctatttccttgtctaggagagcattctgcccactttccatagggcttactgttagggtccaagaattgctgaaggaagacaccagactcagatagtatgcataggcaaagagtgtttattctacatgcaagggtcaaccgttcatcaaaatggcaaccactagaggggcttgtaagcccctttttatgtaaggctaggggaaatttccagaaggattaagtaacctctaatattatcagtagtggcaaagcagtgacattggtacaattctgattggttgctaagtttgtttcattataattggtgagaccatgaagaattttggaagccagctcagttccggccttgttatctcctccagctaagtgtcctaggaggtgactcagatccagacttatcctctgtaggtcggagtcatcactgactaaagatccattgtcagtggctccctctgaagagaacagtatgttactgggggaattgaaaatttttatttccaagagtatcaagttccttgaccttttcacattatttcttattgacttaaacatctttgcaaggaggcctggtcacctgcctcagattgtattcgctccaagcagagactgagctagaagttgccacccaggatattagagcctaatacctgtgtaggaaagggtgctagcaagattaggcaggaataattgttagtagtagagggctggtcaagccccactcaggccaagctctggagacagtgttgactagcaatgtgtcctgagggtcagtcggatctttgtgtttctgtcttgattagttgtaaaacacaaggtgccctacaaaagacatggctggcacctggggcctatcagcagctgaagcagaactggaagcacccaaaggctagagactgtggtcatatttcttcactgaaggtggctctctctggtcatctatgcgttctccataccagtagctcgaattctaactctgtctgagctacctctcgttcctctgttttcttcactacacccgaaattatctagtgtaggatatgatctaatttatttcacttattatttgttttcttcagtggaatgtcagccctttctctgtcctgtctgattctgttattactgtagctagaattctgtgttctgtgacacatgaacaaatgtctaagtaccccagatagggaatcaacaacactctagagatgccactaaaatccagtttggtgaaccagtgagttttatcagggttacttacaagagcatataggtaaggggttattttcaggagcagaaacgacccagaagacagttatatcaccccagagttcacttgagcacaggtgacagctcatgaaagctggaaatccggagcacaatgcacagcctgcaaacagcttcacaggttggagagtgtcatccttaggcagttgccatgtgctcttctaggacacacagccagcctctgcttcttctaggcaccaccttgcacggccttgcctgatctcgatttcttccaggcagccaaataagtctgggctcctcccacgcagctggaagctcagcttatctgtcagtctctcagtcatttttatacttctacatgcttagggaggggcctagactatccggtcagtttcaggaacttcctcaagctattttgagttgttcactttcggagcaccagaagcttccccgaggcagcaaagtttcaccttctcttcgaacaccctgtgagcaccctctgtcttactgagcttccctctcagatgaactcttttaacctcagagaaaactgctacccaacactcagaatcttgtactttctaagtaagaattttcccgctggattagttacctttttcactgctgtgaagcaaactaccagactaaaggcaactgaaggaaggaaggaagaggttattttagttcagagtttgtgggtcaagaacccgtggattgtgtgtactgcagtttgggtaatagtagtaacagcgtgtgtgggatgaagggctgaaaagggagctgtgtgaaattctgactgggtttctcgattatggcccttaaaacatactatcagtgtcgtccagccaaaacccatcaggaattcacctgcagttggacaagtgaggttggctgtgtgttagcagagggtgcctcgtggagagggagccatttggcatctgggtaacacagcaactgaaggataagggttggtgctgggtgatttggagaaggtttaaggaaaaagagcttttcttcggacaggaagttggcaggaaatggtggtgttgaggggcgggctgaggtaaatacaaaattgtatattctaactggaggagaaagctgtaactgggggtgggggtggggagatagtcacaatctcctgaacagaaaagtgtcccattgtggtagtttgcacaatgttaacaatcatagagtagaattatgcacaggctatgagcgtttggatgatggtaccagtcgcagctcccagggggagctgcttgtgagttattttttttttttccaccttttaacaagcctgaaattggggtgtgtctttcaaacaatggcttcttagggtggatgcggtgcgatactgtttgaggggcaggtgcttgtgttctgctactgctcagctcaatccgtttccgggagaattatttggctttttaaccttcaccaagatcctgttttttgttgttgtttttgtttttgtttttttagggttccttccggggtcacagaattataactgtgcggcttcaccaagtactacgggaatctgcggcagtgctcgcgagcttacggcggcgtggagcacacgcggctgggttgccctaagcaaccggcgcgtccccgcccggcggtcagctgatgggccgcccgcgggggaggccgcggctcgaacatggcggcggagatccactccaggcctcagagcagccgcccggtgctgctgagcaagatagagggccaccaggacgccgtcaccgccgcgctgctcatccccaaggaggacggcgtgatcaccgctagcgaggacaggtagagtctgggagcacgcgggggccggggcgtgaggtggtgacgaccacgaggcatggggatcgtggggtccgcgattctgcctcccttcttgttgtcaccccggacggagcggccaccctctctcccacgtccccgtagtccaccgagatcctggtgccgtcaggcggatctgtcttactcccctagtctgggacctatccccctccgcgcgcctttagtcttgggaaccccaacagccccagaccgtcccactgcgccctttcagtccggaatcaggttctccagcgccccctttatcacgggaccccgacccagacccacagactcttctgtccctggacccggtcctacagcgccataaaccactgaccaaccctccagatcccctccagtctcgggaccctgttccacaattcatctccagtctgagaccctgatccacagggctcatcccactcaggaccctgcctatagcacccacccattctgggaccctggacctcacacgacctctctagtccaaagtctttcttcaaaggtctttagttccggaccttcgccacacccttctaacctgggacctagtccctccatctccctatcctgacaaaacccctgttcccaccgctggcttgcagtccagggttcccagtgcacacccctgcgagtcggtactccagtcctagcttctagctagcctcttgcccccgttgccgtcctgtcccgtggtgctgctccaacctttgcctcctgtgtcttcctggctggggcttacctggtgctccagagttcctgtgttctcctgggaccgttccaagtcccagaggactagtagctaattaccttgggacctggtgcggctgtttattccttacatggaaccccacgggcattcacctcttccttctaatttgtttgggggctgaggttaggttgtatactttcctgtgcttctcctggcttcagggtcagttgtttgtttgtttgtttgaaccatagctgctagaactatctgaactcttactgaccaaagagttttcgatttttgtacaaaaagtgattagttaattctttaaaagtccagatgcacttattttaaaaggaaaatttatttacaaataagtaattttatttacaagtaatttagccccacaagtaggaaacagaaggtcatttaccacaagactaaaacaagccgttatcaatgttcctatgtagttctgccggtggtcacttgccacacttcagaaaagattcataagccgggcatggtggcgcacgcctttaatcccagcactcgggaggcagaggcaggtggatttctgagttcaaggccagcctggtctacagagtgagttccaggtcagctaggactacacagagaaaccctgtctcaaaaaaaaaaaaaaaaaaaaaaaaaaagaaaagattcatttggtccagtgacttcattttactcaagagggaaccggaaccacgaagtgttactagtttctctgcgtagtccaggagtactgaggaaacatggaacccaggacttgtcatttgccctctgactctcaaggcaatataaagtgattggagaaatagcccatgttttaaaattgtagcaagtttgaaaccttaaagggttaaaaaggaggttgagggaaacagtttacttgtcttaagcagtgataggcccaaactggaagagctttggccagcacatctacctttctctctaagcaggaggcagaggccagccttttgtgtgggtgaaaaggagggctgccctgtatgggaaagggaaacttgaagcccccagctcggggctgggcctttgtgtttggcttttgaaggagcttagttggggccttgttttcaggtagtgagcttgttttgttcctccggtttacctgtaactgagctggaggtggtgtgggactgctagtatccttgtctggctgtgtgaaacagaagtggtcaggggagagtgggaacctgagactggagagaagggaatgcaagccaggcaaatagcagaatagtggtatttgtgtgatgcaaacagaatttagacaacagcttattagagtcagccagctttatttggtaaaatatttgatttgtgactcatgcacgttgggtacattgccgaatatctgagatttcctgggtaggaacagtgctaataaagattttatggaaaatgattactaagctgcttcttgacacagatgttcaggggagtcttggaccagcccagtttttactcctgctcaactatcctgcaggatcccgtcagatgatagggccaccaaggaattgctactgaaggcttttgatgtgtattttgtaggtaccacaattcatggaatttaattcaagtgtgggctgtgagttttgttcttgatggtctctttctctaaactgtcctatttatcatacttgtatcattcattcattcattcattcaagaacaccatttctattgggtgtgaggtcctggggataaaagagcgatcaaaagccacagtgcctgtgctcatataacttctgatttattgctccttatagcccttgacctaaggaagcctgtatatatgcctgaggacttagaacactggtctccctcattcagccgaggctatgtcagacatgccctctcatttgtctccaccataactataaaggcagctggcattaaaacagctctttgtaagtgctgagcagtttaccagggacgtggctctgtgtgctcagctccccagatgctgggaagacagagaaagaagaaactgcctgggctggattcaagagctatctgcaggggtgcaggggccaggggtcctcatgcttgagggagtggcttatagaagggaaggtgcttgtaccacttccaggcagagggaaagaatggaagggaatatgaagtggtcaagaactctatatgttttaaagtgagcagagcggaaggtggtctgggaggccatgacagtaaagggctgaggcctgagaaagggcagtatctagttttggaaaagatttttggtatggctcctacttaggaactagattttgtttgcagtcagggacaaacttctaaaagcacaagcaaatgatatgatcagaatttatgttttagaaatggcattagttaacccttagaaagcccttctctaccagtgcaaaattggtctgtgtgtgtgtgtgtgtgtgtgtgtgtgtgtgtgtgtgtgtgtgtatgtgtatgtgttactatatccaaggtcatatcccgctcatgagaacagtgcggtccatttccctgatcgacagttccaaaactcaatacattttcaaagtaagaagtgcctgggtatggacattttctcgaagctcttttggtactaaaacttgcaactgtttatagtctttatttatcctgtgnnnnnnnnnnnnnnnnnnnnnnnnnnnnnnnnnnnnnnnnnnnnnnnnnnnnnnnnnnnnnnnnnnnnnnnnnnnnnnnnnnnnnnnnnnnnnnnnnnnnnnnnnnnnnnnnntagtaggatgagggtttgaacccagttctgccacttcaggcccaagttcatttagtcatagacctctgtgcattagaagaggccagtcgaggctgtatcagtcagcaggtgactgccagcagcaaatacaaagtgacaggactcactgttcgccgccatcagtgagccttccttcttactaatttcaggattaaaataaatggcttccacctttttaatgaaacttggcaacttgtgctttgatacttacaaaagaaccttttgtgtacctttatttgtgtgtgcaaataagctatgtatgagtgtggatgcctgcattggactgtgtgcctggggcaggcaggctgagcttcctcatcagctctttctttagtttgctttttactcaggatttcctgtagcccagtctggccttgaatatactgtgcagctacgggagatcttcaactcctaactcccctgcctctgtcccctaatgttaggactctgggcctgtgccaccacatttttatttatttatttatttaaaaaaattttttttttgaaacacggtctcactctgtagcccaggctaggccagaactgatgatcattctgcctcggcctcctgagtgctgggactgcagctatgcactaccacaaatctgcctaggaaaagtgactgagtatttacagcaggatccagctaatgttaatttattacagaagagctacagggaacgaggatgtcctgaaaggaaaagctaaagaatcaaggggcttcctgaagtcgaggcccacttttccagagtctctgccagcggctccaccgtcagcggtggtccctggggaacatttgaaattatgtgcagtcacttcggcagggcaaaagagactgctgccctgtgggcccatgccaggcccacagctcagcatccttcaatgtcagggcgactgctcaacatcctgtggtacacagaccccagtccctagtctctctgctctttaaaatgtggttcccaggcttgggtgtttattttatcagagatacttggagctcttggctcttggactccactcctggaggtgctgattttaaaagttcagttgggggcggggctgagagctggcatcactgtcacgttctgagggatgcttataaagctgcccgtgctttaagcaccagtgggcaagaaagggatgttgtacaccagtcactgcaggagagtcctctttatacctcttctttataataagtttatttttaaattgtgtgtgcactgtgagtgcaggtgcccttggagttcaggagaagatgctggacccatgggggccgagctcctatcctcagtatgtgctcttaattgcagtgccatctcccccttgacccctcccccccccctttttcagcattttggatatatttccctagagctattttccagatacctacaccctaacaagaactctgcctgtcactgtgacagaatgcctgaggtaggcaacttgaaagaagcaaaggctaatttggctcctggttgaggtcactcagccttgttggctgtggacctttggcagggcagtgtgccattgcagggaaagcatagcgtgacacaggaaaccgagaactctagtgcagactggaaggtaaagaagaagtcgcagggataggtctttctatgttcttcaagggtacatccccacctccgatggcttcctccaaccacatctgtgctaaggcttccagcaccccctagtagcatcgctagttagggactaaaccatttagggggacatttacgatataaaccatggagctggggaggtggcttagttggtaggagtattttctcagcaaacatgagggctagttcaaatctctagctgaacataaagaactggacatgattgtgtgtgcctgtaacccctggttgggggacacagacaggtaggtcttgcacactcacatgtatataacacacacacaaacacacacacacacacacacagcacaacacccaacctcctatcccatgaactcagactacactgagcagctgagtataatctaccctcggaagagtattaatctaccttccgaagagtattgtcaatgtggataataaggcttaattggggtccaaaactttcaaactaagaactatttcagctgtgagtcagtaaaacagtgctgtcttcctattgaggaaatgaaaggaagaccaccatcaaagcaagttcactggtaaatttaagaattggagtcaccggctggtgagatggctcagtgggtaagaacaccgactgctcttccgcaggtccggagttcaaatctcagcaaccacatggtggcccacaaccatctgtaacaagatctgatgccctcttctggagtgtctgaagacagctacagtgtacttacatataataaataaataaatcttaaaaaaaaaaaaaaaaagaattggagtcacagcaattacagtctggcctggctgagggctggaggtggggtggagtgacagaagccgagattgcctgcaggtcaaagctgagttgtctgtgaggcaggaggggcagattccccagacacagggctgtttttggactctgctagggctgcacaaaagtgcagacagtcagctggtgaaatgatagacgttttcaaagatgcatgctcttgctctaaagctttctggctgagtcacagctacagacctgctgtcttcattttgacaaggttagagatgagccttctttgtttactactgccatgggagcctgcaagaccagccttggtttctgcaattacagatctgtgttttcaggtgtaaaagaaaaaaggaaaaaaagaaaaagaaaaagtaaacaaaacaaaaaaacagaaccaactttaaaatattcttgtagcatttttctttctcaacttaccaactctcttaatgtatttgttgcctcttaaacactttaacttgttttttgagacagtctcatgtaacccaggctggcagttagctggagacctacgatcctctggcctctgcctgagttctggggttacgggcatatgccagcaagccaggtttctgcagggctgtggatcaaacccaggcatttgctcttgtctggcaagtacactattaactgagcaatgtctccaaaccgtttttgaacacttataaacatattaagatggttgataggaaattttctgtatttcctaatagtttatggggactgactctaaacccaggtttttaggtaaaatgcttagaagggaaatctgttgtaggtggaaggagaatccttatccagaggggttgtcattcaggactgaaaagtggatcccttagtctgttatttgacacgccgaagagtgaggcagcctgcagagacgctccggtgctggagctacgctcactggtagtcgttttcattttatagtgtaattaagaatggaggctccagcctttaatcccagcacttgggaggcagaggcaggcgaatttctgagtttgaggccagtctggtctacagagtgagttccaggacagccagggctatacagagaaaccctgtctcgaaacaaaacaaaacaaaacaaaacagaatggaggctccagtgatagactgccagagttggaatccaagtcatgtgaccatggacgtattactttagcccctttgcatcatggtctcctcagctgcaaagtgcagatgtggtgtctaccacttcgggtcttatgaagggctgacaggttgataacatgaggggaaagcacttctgagtctttcacaagggccagcagctggcagctcattcccatttaatttaatttcctttgtcatcagaagctaaaaacattcccgcctgtgtgtgtgtgtgtgtgtgtgtgtgtgtgtgtgtgtgtgtgtgtgtgtgtgtatggagggggatgcattccctgtgtgtatgaataaagtgaaatttttttcttgccctaaataaggcactagcatttgggagtcaattacactcttatagctgactttgagtcataccttgtctttatttccttatttggtcaaacacaagccttttcggtcatcttcatgtccctcgtagatctctcctactgtgtcagagaaccccaagatcaggactcactccttaccctcagccatggcacgttgtcacagcatatgtgtaatgcatgcagggaagacaggaagacaccagaccaagtttctgagagtcctctctggagtgacacaagatgtgctaaatgcctccactgttggattatgtggccccttatattcaatactgtttatcaggagttcagtagagacggtgtgccaagcatgcctagggctagttagatgcacaccctctccatatcatgtactacaattctggaatctggaaaatacaaacaagtgtccggcataaaccatatattttgtacaaacactaaacaagataagccactcttttgagcaagggaatgttgggaaccttctaaaattcaaggtcagagagagacaccatctgagggccagccttgagggcagggcagctgtctcaggcctgactctgccatgcgggcccgtccatcttcatctcaggcttgtcctcatctcttagccactgtttaaccttgatgactacagcagccgccatgagcagttccattgctctgagccctgggattccatccttgaatctgtcttgccaaactggtgtcctcaaaatggctttttacagtatcatttccctgcatatgatctttcattaacaatgtgagggaggcatcatgtctaaaataggacacagggaaccttataactattctgtacccaactttctttccgtgcctatttctcacttctcagtggttcttgccagtgtgttctctgtcccatccaggtctgacacctttcctcacctaatgctgtggctcatgtgcaccctcctcaagccactctccttccctgcttctcttttggttatggaataattcttccatctaccatttcagcctcctcctaactaacaggtactagctgctgctgtttgggttcgttcatctgatcctcccatgtggccagtacctccatgggtcatagcatcattgggttggttgacagagactcgcatcactgttttgtaggcccttccccctctgggtgactttccctgcaagctctcccgtaggagcaaagttgaattgttacaaatggtagtagtttctagaactcagctgtttctctttccttccctctgtaaaatgcacttagcaaattgttttgaaagtcaagagagcatgaatgtgtacttactcacttgatggagtgtttttttatacttcatgatgaaatattctctttctgttttttgagacagaagttctctcatgtatactaggctggcctcagactcacgatttaccccaagaatggtcttgagcttttagtttccttggctcagccactttggtattgggattacatgtgtgagccatcacaccccacatatatgttgcttcagctggaattcagggcttgctgcatgccaggtaagcatcctaccaattgatctcaaaaccatctttctgattactcatttttttcataaaccacacacagctttattcagaacagttccctttaagatcaaagtgaacttgcagctgacttttcttgtatagaccttggcccaaaggtcacctctcagggcaacttcctcttcttatctcatttttttttctttgtttgcctgcctgcaggatcgtcagtcacctgaaaaggcttctggggaaaccagggtgtctctnnnnnnnnnnnnnnnnnnnnnnnnnnnnnnnnnnnnnnnnnnnnnnnnnnnnnnnnnnnnnnnnnnnnnnnnnnnnnnnnnnnnnnnnnnnnnnnnnnnnnnnnnnnnnnnnnnnnnnnnnnnnnnnnnnnnnnnnnnnnnnnnnnnnnnnnnnnnnnnnnnnnnnnnnnnnnnnnnnnnnnnnnnnnnnnnnnnnnnnnnnnnnnnnnnnnnnnnnnnnnnnnnnnnnnnnnnnnnnnnnnnnnnnnnnnnnnnnnnnnnnnnnnnnnnnnnnnnnnnnncccatctttcgctgttcccacagatctggccccatgacatccttccctgttaacacgcttgtctttactcaccgagggctggcctcttccagtgcttaaacagtgtgaagcttaagcagtgtgtgcagtgctggtttgatcgaatcactaaacaaaccaataaaggaccagagagcagaacttaccactaactgtgcttacttgggttagtttattaatcataggtgtccagacagccctgccaggcagtgggagagctcaagttttttgttgtttgtttgtttgtttgtttttaaccctaagaaagagtattctgtggacccatgctgatcccagcctgtctagattatccctgacatctggagtttgaaattttccttagcacaggagtcacacaa

SEQ ID NO: 598 - DNA, 506 bp, Mus musculus
agcagaagccatggcaagaacaaggcaataggaggcggaaggaagacagccggagcggtgtagcccgaacgcggttccccggaaactggtgcagcagcagagagaggcctgaacgctggaggacaccgaagagggagcatggctagtgtactgcgcgtgcgcaagtgcttctttctgcccattctggttccttccggggtcacagaattataactgtgcggcttcaccaagtactacgggaatctgcggcagtgctcgcgagcttacggcggcgtggagcacacgcggctgggttgccctaagcaaccggcgcgtccccgcccggcggtcagctgatgggccgcccgcgggggaggccgcggctcgaacatggcggcggagatccactccaggcctcagagcagccgcccggtgctgctgagcaagatagagggccaccaggacgccgtcaccgccgcgctgctcatccccaaggaggacggcgtgatcaccgctagcgaggacag

SEQ ID NO: 599 - protein, 98 aa, Mus musculus
TLEDTEEGAWLVYCACASASFCPFWFLPGSQNYNCADSTTGICGSARELTAAWSTRGWVSNRRVPARRSADGPPAGEAAARTWRRRSTPGLRAAARCC

SEQ ID NO: 600 - DNA, 86764 bp, Homo sapiens
agaatgaaaattactatagttaaaactgttcaaaatacaaaattggagttactgataaatatcgatatagaatcagtcttcaccaaagttacatctgttcaacctagctttggaaaatttgacttgatggaaaatttgacttgatagatctaaaagctgcaacagaaaactcatgatagtaaaactgattagcaaaaagccttagtaaacctgagcaacaaataacatcttaggaaataaatgtggaaaaaaattcatgaaaatacattaagcaatagaaacatgaaaatacaattagaaataggatacttgtgctgtatagaaaattgatcaagaaatttaattggtttcatggagcttattccagaaaacattttctcaaaaaaaatgcatcaatgttagtataattctgttataaacactttaattcataattatggaagcaaaacttttttggtgtgttagcggccagcaagatggctctcaacaagccccacctcctggtacttacacccttgtacattcccctctcacattgtgctgggattagtctgtgtaaccaatagaccatggatgtttttatcaattctggggttaggtaataaaatacatcatagcttccattttggtcagataccttgtatttcttggattagtctcctgtcaggaagtcagctgctatgttatgatgttgcctaagaaactatgtggaaaggcttatgtgatgagtagctgaggcctcccgctaacagccatgtgaatgaatgagctgtcttagaattggatcctccactcccagtcagactttcagatgactgcctactggccagcgctttgactgcatcctcatgagagaccctcagccagaatcacccagctaaactgctcccaaactcctggccctcaggaaatgtatgagaaaataaacgtttgttgctttatgccactaagttctggagtaatttgttacatagcaacagataattaatacacatagggtcaaatcaattggatgaaaatggcaaaataaaaaatgctctatattcatgagacttaggggatggcctcagagtgctggttctagatggaagcgtggattttgctagatgcggaagagatggaaaggaggatcaacattccataacatgcacaaagtcgtcaggaatgatgatgacttagtaaattccgctccaaaaagtgaaagctgcctgaccctttaacccctgtaggtatagatcccctttcctgtcattaaggatacttttgagaaacaagttcaggaaatatcagagaagatgtcaagcacagggtttccactttacgtgttccttgatgtttctgctaaactgagcaatgtttggatctgagagagggatacctattacaggaaaaggaatattttaaagggttataaaaataagtaaaaacttgtaatgagagggaaagtagagatattagaccactatgactataatattgaaacttcacacttttgttttgctttttaaataaagcattgtaaaagtggtttgagatttttgcagtgtgattattatgctggcctgcagtgtaaaactggggtaaaatccagagaatgggttaaaagaactcctggcaaaactactgaacaaaattaccaagtcttctttcctctctgggatgaaactgtgtctccagatcttttggcaaggcccaaggagacgaagcatgtccaaaagcaataaatcactgtagacttctttttcagtctgtcccacagatttaacatgtactgaacagataaacattgattaggtatacattataacaactgctgaaagacactgaaaagttttataagtatttcctcttgattagagttaaccagattatagccattaaaagttataaatttaaaaatctgggctggcacggtggctcatgcctgtaatcccagcactttgggaggccgaggcaggcggatcatgaggtcaggagttcaagaccagcctggccaacatggtgaaacctcatctctactaaaaatacaaaaattatctggacatggtggtgtgtgcctgtagtcccagctactcgagaggctgagacaggagaattgcttgaatctgggagttagaggttgcagtgagccaagatagcaccactgcactcgagcctgggtgacagagccagactctgtctcggaaaaaaaaaaaaaaaagaatctggataatctggatactgcatacgaataagttattctttatgagactatcatttctatcattatatggtttatatctatttttgaaaatactcaattactgaaatattgccttataatttacatatgtaacgtcatattctcagtaagttatgtcctacaatcctcatgatggctttaaaagacaaaccttagacaaattaaatttaagagtttaactgatcaaacaatgatgaatcaggcagcccccagaaccagaacacgttcagaaagactccaggactgccacatggtcagataacatttatggacagtaaaaggaaaaagtatgtacagaaaatgcaaatgagggacagaaacagctggtgtctgctttatttgaatagggctgcctgtggttggatgagactcggctacttttacaagagcaggtgacagtcttttacacatcaagttaggttacatatcaagttaggttcactgtgtactgaaaaacctttaggccaaaattaaaatatgtacaacggaggctttagtccaaacttaatttaacagtactacaagttaagtatcagtattgccataattgtatcagtcagggtcttaccaagagaacaaaggcacaccagatggttccaagaaagaaaccgaatacaaagaactagttacaaaggtgttagaactgaaaggcctaagagattagggacagcaaaactggagagacaaagggaacagatggtaccagagcacaagagttaggtgagccgaatgggaccaagaacccacagagactgcctgttgagggctgcgacaaaagagggaagctatagccagtggggactggagccacagagaaggcatactccctaagcagaaagagtggaggagaaataccctggtttcttctttccttctaccttccaatgtcccaccactgcctccaccatacaaacttatcaggaagcaagtcggttagggagtctgggacatgtagtttgcagaagtcaaccccctgcaatacagaccaagcaaggtacacataaagtggatctgatagcaataggcaaacggctagcctgtgattacacttagagtatctgaaatgtgaagagtagaaagtcaaggccacattagaatgctgacccattaagctaacataccttacttcatccaaatgttaaaggtaagaacttattacaataaataatattggcatttatgattatcatcattatcattcttacagtacaactataaaatactccctcaaggaagtctagcatgacacaggtatttagagtcagaggaggtgatggcgggatagacatttagagatcaaggtccaaggtaaggggccagacacagtggctcaagcctgtaatcccagcactttgggaagctgaggtgggtggatcacttgaggtcaggagttcgagaccagcctggccaacatggtgaaaacccatctctactaaaaatacaaaaattagcctggcgttctggcatgtacctgtaatcccagcttttctggaggctgaggcaggagaatcatttgaaccagggaggcagacgtttcagtgagccgagaacgtgccactgcactccagcctggccacagagcgagactctgtctgaaaaaaaaaaaaaaaaaaactccaaggtaagaagcatgagttaacaataaatactacacattatctctgcttcctacatcaccattaaaaggtaacattattattctcactttagaaatgcaagaaatcaccacaaaatttcttatccatgtagccaaacaccacctgttcctcaaaagccattgatataaaaaaataaataatttctctttgtgtacctagagtctagcagttccaagaggctgtgctaaggctcttctatcaccacttgaactcacttcaatcaggttttacccctggcattcatggaaacttgcagtcatttcatttgcttgatctgcagcatttgacacagtcgatcacttcctcctccttagaacaccttcttcctttgtcttcaggacaatacacacaatatccattttcctcctacctcatagagtcagggggaaggggagcagggggaggttggctcctctccagtctttttttctggttcctccctttcttccagacctgttgatgtttccaaggcttctgtccttgtacctcttcgttatttacacacatacttcctcttggacttcatgtactcttatggctgtaaatgctatatgcatactctataaaatcattttgtgtttaagcactgattttacaaaatgtataaaggtgagttaaatttagagcttaatttgtttatgtaaattgccttcaaaatgtgttacagctgagatgttttccatgtgttttggaagaaatcacacagagtagctgcttttgcaataaactggatcaatgttacatctttgggtcagttcattgtcattgtgcaaggtgagagttatgtgggccttaccttattgttcacattgaaccattctgggtgatgattcatcttatttgtaagacaactcaatacgtaaggcctgttacaaaggtaaaccaggccaggcacagtggctctcacctgtaccagcattttgggaggctgagacagttggatcacttgagctcaggagttcaacaccagcctgggcaatagtagagaaccatgtctctactaaaaatacaaaaattagccaggcatggtggtgcttgcctactcccagctactgcagtggctgaggcaggagaattgcttgaacccaggaggcagaggctgcagtgagctgagattgtgccactgcccccaacctgggtgacagagtgagatcctgactgaaaaaaaaaaaaaaaaagagggctgggcacagtggttcacgcctgtaatcctcacaatttgggatgctgaagctgatggatcacttaaggccaggagttcgagaccagcctggccaacatggtaaaaccccacatctgctaaaaatacaaaaattaccagggcatgatcggcacacacctgtagttctagctactcaggaggctgaggcacaagagttgcttgaaccggggaggcagaggttgcagtgagctgagatcccagcagtacactgaagtctgggtgacagagtagtaacactctgtctcaagaaaaaaaaaaaaaaggtaaaccaaggcacaataatattttaaagggcttatttgtgtaaacagcaattcatgaatcggacagctctaaaccggaagtgtttccagggctctgttggagaagcataagggtcaaacttggaagagtgaatgcagaaataatgcaaagaaaataattgattacagttataaagtggctttatttggtctatcctgtgggaaaatccctagttatttaattgtaagtctgttgactgcttctgaatggttgagcttaagttttgtttttctttaatacaggcatttacaagaaatagttcaagttaagtttcacttatgtttgcaaatcaagcaaggttaagatcacttaggaggactgactggctttgtctcttcggggagtcttcagccctggtttccattttaatttagtttaacaggcgaatccctgattaaaatttttgaacaagtatttgtagagggcctttctctcacttaattttgaccatcctgctgccttaagatcaagcataaacttggctcctgaactctaccaccacccagtgagcatctgctgaccctgcagagggtggcacagcaggttccatcactgtgcatttaactcccagagtaatggctgcagtccagacctctctactattcagtagcatatacaaaactcctatattcaggctggtcatggtggctcacacctgtaatcccagcaccttgggaggctgaggcaggtggatcacctgaggtcaggagttcgaaaccagcctggccaacatggcaaaaccccgtctctactaaaaatacaaaaattagtcgggcatagtggcacacgcctgtaatcccggctgctggggaggctgagacaggataattgcttcaaccaaggaggtggaggttgcagtgagccaagatcgcaccactgcactccagcctgggcaacagagcaagactccatctcaaaaaaaaaacaaaaaaaacaaaaacaaacaaacaaacaaacaaaaacctcctgtattcaactgcctactcagccccttcacttggagacctaatactcgtctcaagcttcctatgtccaaaactgaattctccttcttcccttccaaacctgctcctcctacattttccacagatcagtaactggcagctccacttttccagttgctcagcccacaaatcttggtatcattcttaactatctcatattcaatattcaacaaatttcactggtactaccttctacataagtctagaatctgatgtcctctcaccaccagcacccttagaaagccacatcatttctcaattaccctgttaatttctcaaataacttcctgactgacaccttgcttctattcttgccttttaaaattgaaggcagattagcccaggcgcagtggctcatgcctataataatcccagcactttgggaggccaaagtgggtggatcacctggggttgggagttcgaaaccagcttggccaacatggtgacaccctctctactaaaagtacaaaaattagctgggtgtggtggcacgtgcctgtagtcccagctacttgagaagctgaggcacgagaatcacttgaacccaggaggtggaggttgcagtgagccaggatcgcaccactgcactccagcctggacgacagagtgagacttcgtctcgaaaaataaatgaatacaaatttaaaaacttgaaggcagattaaaccagccttctgttcgaaactctccaatggcttcctatctcatttgaagtaaaaaccaaagcccttatcaatggtctctgggctcaacatggtctgtctggtgacctgtctgtgctgtttttctctgagcactccctcactcactctgctccagcctcacggggtgcctggctgtctctacaaaacccctggcatgtgctcacctcaatgccttaacacgtgctcttttcttttccagaaaagtatttggcccacatttccacatggcttactccctcctctccttcttggctcaaaatgtaactttacaatgaggcttttacttgtctcaggttgcattctccagcagcagatacggtgatagaggttggctcagagggtgtttattaggaatcaatgcctgtgaagggagggggaggtaccaggattaggcaggagaagtcagctgcagtacacgccttacaaagccttgtccaatctaggagagagttctagagcaagtgttgctcatcggtctgtcttgatggtcaggcctttatcctcctatcttgttcagttactgaatgtgggcttccctgtgaagggaacaactgagacccagtggttctcagcagctggggcagtccctgaaggagctgaaggctagaggctctctgctgaccactgttcttccctgaaagcagatctgtgcagtgtattcctgaatctatcacaccatctatttaaaatcgcaacatcccctagagtccctatcacccttccctgctttattttctccatagcatttaatagcattgaacatcttctaatatattatataatttagtttactatctgtttccttcactgggatgtaagttctaacagcagagggatttttgtctctcttgagcactgctgcatttagaatggcacctggctcacagcaggcacttgggagatgttggttgattaaacaaagttgttcagtagcgtgtctagtcattacactgtacagcctcacaagaaccatgtcttattaatctcatcagcaacagcatatagtaagtgtgcgatatatgtctgttgaatataggaataaataaattcatgaatgtttgttaataacttcatcatgagaaagtattagtacaatggtggctcctgcccgtaatcccagcattttgggaggctgaggtgggcagatgatttgagggcagaagtttgagaccagcctggtcaacatggtgaaaccccgtctctagtaaaaatacaaaattagccaggcatggtggtaggtgcttgtaatcccagctactcgggaagctgagacaggtgaatccctttaacctgggaggcggaggttgctgtaaaccgagatcgcaccactgcactccagcctgggtgacggagtgagttcgtctcaaaaaactaaaacaaaacaaaacaaaaacaaaaagaaagttctagtaaatcactgtacatagaagtaccatgtgattcacatccataatttaaagtttttattagctaccttaaaaaaataagcaggtcatattaattttaatagtatctaactcaatatatccaaaatagtatcatttcaacatgtaatcattgtaacaattattgatgaactatattacatcttttttgttttgtgctaagtctataaaatcttgtagtattttgcacttgtactacatctcagtttggacaagccacatttcaagtgctctatagtcatgtggatagtacggttctaatgcaattctgcaattcaggtgtcagaataatatagtggggcagaagtttggagtcattgacttcctgagtccaaattttggctcttgaacttactggttgtcaatgacctctagccaaaaaccaccaggaacaaatggggttgattgcttgttggagggagaagacacaccattgggaatggtgaggtgtctgggtaaagggatgttcggacagttttattataggatttgtgtttgtgttaggtgacctgggagagcttaaggaagagaggctctcctgtggactggatgttgtcaggaaatgcgtataattctaaggttgcatatcttaataaatcttatctaaatggaggaagactagatagcggttaacattataattaataaagaaataagagtcactcatattagccaggatagggggatgtttggtaatttctgtggcttgtacatcgctcatattttggccgtgtttagatgtgattatggagtggcctcgtctgatgtttatgttccacaggaagcaaacacttcctagcaacaccaaagctcagctgatagtaccaggcagctcctggagatcaagggctgcttttctccctctcatagctgtgcaaccttaaggtagtgatcaaacttctctggttgttttctcatctctaaaatgggaatacaagagcatctatttcatctcttaaaattatcagtattaaatgagatgcaaagacactgagttaatgcctggtatatggtcaccactcagtgctatctattgtagttcaaagattctaagatgcactatattttttcacattttaacatttctgaaagtgtgtgcctttcaaacaatggcttcttcaaatggatgaaatgtagtattgtaatttctgaaatctctggtttgggggacaattccttgtcccctccaggtgctcaatttattcctgggtgaatggctttacttttaaaccttccttactttccccatttctccgcaggcgccccgtggcatcctctcccagccacagactttcagcttgcgcggcatccccaggcaatacgggcggtgcggcggcagcactcgggggcttacggcggcgcggcgcccaagaggccccagcagccgaagggaaaccggcgcgtcccccgcccgcccaggcgtcagctgatgggctgcctgccgaggaggccgcagcagtcgccgcgcgaacatggcggccgaaatccactccaggccgcagagcagccgcccggtgctgctgagcaagatcgaggggcaccaggacgccgtcacggccgcgctgctcatccccaaggaggacggcgtgatcacggccagcgaggacaggtagggcccgggcgcagccggggcggcccgaactccgcgacgacggggtgtgggggcggtggggtccgcggccccggtccttcctgcgtgagggggctcccccggcagcacggccccacccccactctgcgccccttagctccgccgggttcccggttccctcccgccggtcctccagcctcgacttgcacctttccagcctgggaccccggtctcgccgcgcccctccagcccggatcccctgtcccaccgcgcccctccagcccgggaactccgtctcaccgcgccgcccaagcccgggacccttgttccaacgtgtctttccagcccaggacccctgttccagtgcgccctaccgcgcccctcccagcccacctcgcccctcctgctcaggacccctgttccaatgctccccaacgcgcccctccagtccgggacccttgtcccactgcgcccgtccatcccgggagctccgtcccaccgcgcccctctagcccggatcttctgtcccactgcgcccctccagcccgggaactctgtcccaccgcgccactcaagcccgggaccccggttccagtgcgccccaacgcacctctccagcccaggacctctgtctcaccgcgcccctccagcgcgggaactctgtctcaccgcgctgctcaagccggggacccctgttccagtgcgcaccaacgcgcccctcccagcccaccgcgctcctccaaccagggaaccccgacctgcggtgtcgcactagcctgggaccttcgtcccggtctctctccctggcggggtttagcctggtactcggaaggtgtttcttggccctcccgggtcagttccaaatcgtctcctctggaagcgtggaggaccggcggctggtcactgcggaccctggtgcccggggcttgcttctttgcgaggaactccagccgccttcgctctcttcctccccctgtactcagggatttcacgccacgccaggcctctagatcagttatttttgccacggctgctagaatcacctgaactcttatttactaaataggtttttgtgaaagtgactcatttttaaaaatatttggatgcatttattttaaaaggaaatcttatttattaggaaaactaacattactcaccagacagagtaaactaataactaaaacatgttaattggcatgcacacagagtcctctcttgcactgtgacatcttgcattggacgcccaccatgcttttgggaaacactgattgggtccagttttctcatttctcctaagaggaagccgaggctggtggaggtgtagcttgctgctaagttacagagatactggtgaagccggaaatgcaatccagaactcccaccagctctgggcctgagtgattggattggaacagtatttatgattcgactttaaactttagcgtctttcaaatcctaaaggtttacaatgtcagtagctttccggtgggaatttgaaggaaatgactgatgtttattgaatgaaactgtgtttccttgatgcaatgagccgtcttaaatagggatagtccacaagtccaaaagctttctggaggatggaaggtactgctattctcttaaagctgaaggcgtggtctctagccttttgtaattataccttttgaagtgacattgaccctatcctgaatgggaagaaaaagcctgaagcccccaactcctgttggtcctttggattttgcttttgagtgagcttgtgcctttttcctcaattagataatgagctgattgtgagcaggcagtggcctctccctgctggttcacctgtagctgacttccaacaaggaggggagtgattggcaggacctggctgtgggtctgtaaagcagaaaggagtgagagagatcgagtgcatgagacctggggagaaggtggggacctgaaaaaggcaaggacagaataatgactttttttttttttttttaagatggaggcttgctctgtcacccaggctggatggagtgcagtggcatcatcttggctcactgcaacctccgcctcccaggttcaagcgattctcctgcctcaacctcctgagtagctgggactataggcgcctgccaccacgcccagctaatttttctatttttagtagagacagggtttcaccatgttggtcaggatggtctcgatctcctgacctcgtgatccacccgccttggcctcccgaagtgttgggattacaagcatgatccactggtgtccggccagaataatgactcttgcatgatgtgaacgtagatgcagacaacactctttaaaagttagcctttgggccgggcgcggtggctcacgcctgtaatcccagcactttgggaggccgaggcgggtggatcatgaggtcaggagatcgagaccatcctggctaacaaggtgaaaccccgtctctactaaaaatacaaaaaattagccgggcgcggtggcgggcgcctgtagtcccagctactggggaggctgaggcaggagaatggcgtgaacccgggaagcggagcttgcagtgagccgagattgcgccactgcagtccgcagtccggcctgggcgacagagcgagactccgtctcaaaaaaaaaaaaaaaaaaaaaaagcctttggccaggcgcagtggctcatgcctgtaatcccagcactttgggaggccgaggcgggtggataacaaggtcaggaggtcgagaccatcctggctaacacggcgaaacccagtctctactaaaaattcaaaaattagccaggtgtggtggcaggcgcctgtagtcccagctactcgggaagctgaggcaggagaatggcgtgaacctgggaggcagagcttgcagtgagccaagattgtgccactgcactccagcctgggcgatagagccagactccgtatcaaaaaaaaaaaaaagttagcagcctttattcggtcaaatattttattcatgaatcatgcgttttgggtaagttgctaaatatttgagattgctggtcaggagcagtgctgataaatgtttctggaaagtgattactaagctgctctgggactgaaacgttctgggggagcttgcatctgctcactttttcactcgtgcaccactgttattgcagagcccaggtagatgactggaccaggatggggttggcgtttgaggtttctgttgtgttcaggctcttgcaacttccttgaagggagaacaacctttttagtaggtgctacacttcatgagatgtaatgaaagcacatgggcgtgggttttttcttggtgttagccatggtggtttgttttcacattgtcataaatatgtgtcacgttcttcactcatttactcattcatttagaaaaagcttttttattgagtgtcaggccctgaggacacaacaggggtcaaaagccacactaccttggccaggcaaggtggctcacgcctgtaatcccagcacgtgtgtggggcccatgctagacctgtgggggagagacagctgacagctaagttgctctttcccaagggctgaacagtctagtgaagagatggcccctatgtattcagcatccagtgctgggaagacacaggaagaggaggctctttgggctggggccggggtttggggacagcctcctagagaaggtcgttgagctggtcttcatggatagaggagtggcatctagaaaggaaggagggatgcaccctcatcccaggcagaggaaggaggaaaggacaggagggaattgtaagagggaaagaaccatagctatttctaagtgaccagagcaaaaggtgggcagtgacaatagcaacagagaagactgagagctagaaggacccagtgtccggttttgttttgttttttaaattaaaaaaaaaaagtttttgggggccaagtgcggtggctcacgactgtaatcccagcactttgggaggccaaggcaggcagatcacctgaggttaggagttcaagaacagcctggccaacatggtgaaaccccatctctactataaatacaaaaattggctgggtgcagtggctcacacttgtaattccagcactttgggaggccgaggcgggtggatcacctgaggtcaggagtttgagaccagcctgaccaacatggagaaaccccatctctactaaaaatacaaaattagctgggcgtggtggcacatgcctgtaatcccagctacttgggaggctgaggcaggagaatcacttgaacccaggaagcagaggttgaagtgagccgagatcatgccattgccctccagcctgtgcaacaagagtgaaactctgtctcaaaaaacaaaaacaaaaaaacccacaaaaattagctgggcatggtggcacacacctgtggtcccagctacttgggaggctgagacaggagaatcacttgaacctgggaggcggaggttgcagtgagctgagatcacgccactgcactccagcctgggcaacaagaacaaaactttgtctcaaaaaaaaaaaaaagaaagaaataaggaatttggaccttattttgcaggcagtgtagaaccatcaaagagttcaaaacaagcaaatgatatgatcggaatttgtaatttagaaataacaatagctaacctgttgaaagtcccttttctctacgagtacagaattggaccttatgtgttattggatccaatcctcacacttcctccctataaggtaggtacagtcaccttctcttatcagcagttccaaaatttagtgcattctaaacgtcagaagtgtgtatgtgtgtgtgtaaattggacctgaaaactcgtttggtgctaaaatttggcctgaacaaatgagactgtttgtaatctttatttactgcatgcatcacagtggcatgatcttggctcactgcaacctctgcctcccaggttcaagcgattctcctgcttcagcctcccgagtagctgggattacaggcacccgccaccacacccagctaacttttgtatttttagtagagacagggtttcaccgtcttggccaggctggtcttgaactccaaacctcgtgatccacccgcctcggcctcccaaagtactgggattacaggcatgagccagtagctttttacatttaaagtagggtccagctgaagtgaattcattttacaaacgctaaaagcagtgagaactagctgagagcattttgagaagaaaagtgaaaggtatgaaggttttcctgaagttagtatccacttttgtaaaatctaggccagtggttctgggccaggggtggttttcccacccagggaacatttggtaatatctggagacatttttggttgtcatgatgtgggggaggtgatatggtttggctgtgtccccacccaaatcttatcttgaattgtagctcccataattcccatgtgttgtgggagggacccagtgggaaataattgaatcatgagggcagtttcccccatactgttctcgtggcagtgagtaagtctcaggagatctgatggttttacaagggaaaacccctttggcttggttcctatttctctcttgtctgctaccatgtaagacatgtcttctgccttccaccatgattgtgaggcttccctagccacatggaactgtgagtccattgaatctcattttgtttataattacctagtttctggcatgtgtttatcagcagtgtgaaaacggactaatactgtatgtaactaatactggcatctaggtagagggtagggatgcatctcagtatcctgttatgccccacaccaaaggattattgagccccaaatgtcaatagtgctgatattgagaaaccccagtccaggcttcatgtacttatctggcctctctagaacactggttccttaacttgaatgtgcatcagaatcacctgggggtcttgttgaaattcgggttgctggaccccacccccagagtttctgatttggaaagtcaggtggggcctgagagttggcatttctgccaagtttccaggtgacgttgatgctgatgctgctagtccagggaccacacttagaaccacggctctacaagaaaggagggttatttgtcactgtgcttgcctatgtacaaccaccaagaaagaatactgaatacagaaattagccaggcatggtagtgtgcacctgtaatcctagctacttgggagactgagacgggaggatcacttgagcccggtaggcggaggttgaggtgagctgagatcgtgccactgcactccagcctgggtgacagaccaaaaccctgtctcaaaaaaaaaaaaaaaaatactgcttacattttatcctctttttttttgtcaccttctgggatatatttacctggggtcattcacagatagccacctagttcactgtaatcaaactgcatatgacaaagctagatacggtcagcactccaaagagtattaagccaatgtggaatatcaaagcttaatgccattacacctgggagtcacaggtcattagtggtttgggtggtcagcttagggttctgcttagaaacctttatggattaatgtctcgtgaatggttaatagaaaatggtactacttcttgtatgaagtcattagtattttgctgaagtaataattaccttaagctctttaatttaaatttaagtttaagaatttgaactacagtggtgactttcctggtaggggaaacagaaaataagactctgctttcagagcggaactaaaatggtgagacagtaggaaccagtatgtttgctttttggacttttttgctgtggactgcaccaaaaatgtagacagtcagttgattgaatgatacaatttttaaaaggtaaaagctttataaagccttataaataagttaaggctataggcctactgtcttcacttttgagaaatagagtttgtggatggacgtacttatactgttgcattaggggctcgtaggccaagattggtttctgcaggaaactcaattttgtttgtcccaagttaaagataaatctcatgtgatttaaaatgttttgagatgttgcacttaggctgggaaagagtaaagattacagaaaaccaacttttagatgttttttagcattttccttttttaaaaattataccaaatatgtaatatatttgcttccacttagatatatctaagtttattaagatggtttggggaaaaatttgtgtatttaccaattgttcacatagaaacaatcttaaataaataacttgatttttaagtgttatgcctgggaggaaggctggcatagctggaattcattagttaatacagaaaaccaggatgttaactgctgtattttcattgtcatgcagagcctaaaagtagactttaatttgtgttataaaataaactgaagacttgagaaggcaggaagcctgggtggccaccccacacatttactcctgtattgttagggtgatccttcattgttacaatcattttctttttatagcatagttaagaacaaaggcttgggagccagaatgcctcagtttgaatcccagccctgtgatcttagacaagttatttaacctcactgtatcacagttttctcatgtgcaaaatggacatgagtccattttgtacctgctttacagagttttgtgaggattaggtgaattaaaccacgtggaacagtgcctagcacagagaaaacattatgcaagtgttagttgttattgttttcattcccatttattttccatttaattgctttaatcttaaagactgggacagagaaagcactatacaagtgttagctattattattttcatttccacttattttgcattttgttactttaatcttacgaaagagtaatatgtttctactttgtatgcatgtttgtgtgtgcacgtgaataagtgaaaataaaaaaatttttcctgtttgaataggacaataccatttgaggggttatttacaatcctaaattcttagaactgcctttgagtcatgccttttctttatttccatatttggttacttgcaggtcatgtcagtgattagtttcacttagacatctttcccctgctatatttgagatcctcaagatcgggttcattgattcactagaaagattgacacattatagtcatacgcatggctgtgatttatcatagccaaaagacgcaaaacaaaatcagcacatggggtgaaatccagaggaaaccagacacaaggcttccaagagtcctcttcctgtggagtcacaggacaggctaattcagattgaattaagacaacatgtgtgaaatattgtttatcagggaagctccttagagactttattcagtgttagaggctggtcatgtaggtgcccttggctaatgttccaaaattccaaactctcagaaggaaggtaggtggtcaacataaaccacatattttatacaggcatgaagcacagtgagccattcttaggagttagggaatggtgaggtcccctctggataaacaaggtcccagacacctgccaagggccaaccttgcaagcaagactttctaaggacagcagcagcaggcctgctgtgggaactcttttctgcccacctgcccataattaccctagtgtttgtcctcatcatcttttaaacctcatttttcaaagcctattaactggcttccctgagttccagcatactgtacttggatctgtcccactaatctcctatctttaactaggcttttattgtgtctttttcctgctcatgacctttcattagctccttatttaatcatgtctgtaaaaggactttgggggccgggcgcagtggctcatgcctgtaatcacagaacatggggaagctgaggcaggcagattgcttgaggccaggagttagagaccagcctggccaacatagtcaaactctgtctctactaaaaatacaaaaattagccaggtgtaggggctcatgcctgtaatcctcccaagaagctgggctgaggcacgagaattgcttgaacccaaggggcataggttgcagtgagccaagatcatgctgctgccctccagcttgggcaataaagcaagactctgtcccaaaaaaaaaaaaaaaaaaaaggactttgggaaccccataactgctccctgctaagctttatttccaccttctatctctcatttattatggttcttttgtgtccagtgaagtcagtgtgtgttctgtcccactcacacctggtacatttcccacctgggtgcctttgcctccctcaccaggaacctcacttgccctctctcctgtattcagaccctccttcatctcctagatccacttcaagttccacctcctccattgaataattcttcccagcccatcattctctgtcctttctgagcttccttcaacactcctagtatattactgatgatgcctagttaattacaatcaggtattagttcctgttgctttgtgtttattcatcttatcttcccacatagtctgtactccaccaggtactgcataactagctactggttgaatgatacagacttaaccatttctgcacagtagacatttcctctgctgtgtttagctttaataatctgctagttctttcctaagaagcagatggtaatataatgaatgatacttgtttctagaatttaggtattcatcttccctctctacaaagtatgctcagcaaatctttctgagagttgttaagacattattagcacatatatactgatttcatgatgtatttttgtcatacttcatggtgaaataatctctttattcatttttctttgtcaaccacatactactttgctcaaaacacttcccttcaaggtcaaggtgaatctacagcagatcaccgtcaaagaaattttaagtaaaaagtcgcctgtgtggattttttttctctttctcctcgtctttatacttgatttagacacttagcgtcagtagagtccagttgcaaaggttaatggggagatgagggtgcttatagtgcaaccagtattgatgggggcatttttggtttctaggttatggtttatagaaaatacagcctagtatggaattcctgggatacctgcagtgtcccatagaggcttcgtcctgctgtgctgttccctcgccgaaaccctcttctcagtttcatttgcttgattaactccttctcatccattaggacttcttgtgcgatgtttgccaaatcccccaacccactataccaccattcccactccctaacattaatctaccctttttctgtcctcatagctcttaccacattatattgttactgttactcatttacatatttgtctttactaattaaactttttctggctgggcgcaatggctcatgcctgtaaccccagcactttgggaggccgaggtaggtggatcacctgaggtcaggagttggagaccagcctggccaacatggtgaaaccccatctctactaaaaatacaaagattagccaggcatggtggcagatgcctgtaatcccagctactggggaggtcgaggcaggagaatcacttgaacccgggaggtggaggttgcactgggctgagatagtaccattgcactccagcttgggtgacaagagtgagactctgtctcaaaaattaaaaaaataaaataaaatttttctaacatgaaaaacagtgtaaagcttatagtaatgtctcaagtgttagtttgattgaatcagtcaacaaatctgttagggaaaaagaagcatggaacgtaatctaaaaataggccactgtctgggtgtggtggctcacgcctgtaatcccagcactttgcggggccgaggtgggtgaatcacttaaggtcaggagtttgacaccagcctggccaatgtggtgagacaccccatctctactaaaaatacaaaaattagctgggtgaggtgttgtgcgcctgtagtcccagctactcggtaggctaaggcaggagaattgcttgaacttgggaagcggaggttgcagtgagctgagattgtgccactttactccagcctgggtgacagagtgagattctctttctcaaaaaaaaaaaaaaaaaaaaaaagaaaagaaaaaggctgctattccttattagaaactgtgcttctttgtgattcctttaatttgtgttttaagacttctaggccatggatagggttcgagacttttttttttttttttttttgaggcagggtctcactctgtctcccaggctggtgtgcagtggcacaatcagagctcactgtagcctccacctcctgggctcaaacgatccttccacctcagcctcctgagtttgagaccacagacatgtaccaccactccttgctaatttttgatttttttttgtagagatgggggggggtctcactatgttgcccaggctggtcttgaactcgtgggctcaagtgatcctccagcctcagtctgccaagtagctgggataacagacgtgtgccaccatgcccagctaatttatttttattttttgtagagacagggtattggtatgttgccaggctggtctcaagcccctaggctcaagtgatcctcccacctcagcctcccagagtactgggattacaggtctgagccactgtgcctggccagactttgtaatgtaagaaagtgttgcctagatcctccatggactccagcctgtctagattattcctgctcttcagtgattagagtggtttctaggcttcttgatggcacaaggatcacaaaaaattatttttatgctaacagtgaaaagattacagcaagaatggtttggagtaaaaaaaaaaaaaaaaaatctgcaggttttcagccaatctggcttctggaagggtgatatttgtttaaagggggtgcaaatgctggggccacccagtggcttcttccctggataaaatctgcctgtggtgacatcagcagtctaattcttggtcacagacccttgaagctgtcctgtgggaggggatggaaatttctgtttttctcagccaatctaattctctacaaaatgaggctggtttctctgccttttaatttagagaataaattcaataacaatctaacattttctctccctgttaccaaaggagaaagacttctttttgcagcaagaatgaacagggcagaattccagagactcgttggaaggaaattgctatttattcgataaaaacagatggcaatgatagctatgttgttcgttccccctttcaggcaaacgtcttaatgttatagaaaccatctagcatgccagaagtacactttttttttttcctgtatcccctggaggtactgtcagactaggaaaaaatatcctttgctataggtgacagaaatgttcacagatttaccaagatttgaaatagtatcagcatccctaagaatgaccagaaaatcagattttctcagaattactgtttgcccagagtttaaaagaaatcaggaccttggacttaatttgtaacatatagtatgcccttttaaaatgattaattgaatgatctctttttatcagtttagaatttaaggatggttaaattgctttaatttagctgtttttggagtgattagggtgtgtttttgagaaagtttaaaaaagatattcagtttcagagatattgctgtttcaggccaggtagaacttggtgtgattttgtagaaataattatgtgctagttgagtctgcttattaaagtctggacatcaatttcaaggtaatcgacccggcgccatggctcatgcctgtaatcccagcactttgggaggccgaggtgggcgaatcacaatgtcaggagatcgagaccatcctggctaacacggtgaaaccctgtctctactaaaaatacaaaaaattagccaggcgtggtggcaggcacctgtagtcccagctgctcgggaggctgaggcaggagaatggcgtgaacccaggaggtggagcttgcagtgagccgagattgcaccactgcactccagcctgggtgacagagcgagacttcgtctcaaaaaaaaaaaaaaaaaaaaaaaggtactcatactggtaatacatactagaaaatatgtattgaacccaaatgtatacccttatggaattacaggtttaaaaatatttccagtgccctttctggtatggggaaaaaaaaaaaattagaccaattaggccaggtgcagtggctcacgcctgtaatcccagcactttgggaggccgaggtaggtggaccacttgaggccaggagttcaagaccagcctggccaacatggcgaaaccctgtctgtactaaaaatacaaaaattagctgggtgtggtagtgcatgcctgtagtcccagctacttgggaagctgaggcaagagaattgcttgaacccgggaggcagaggctgcagtgagctgagatcacgccactgcctccaacctgtgcaacagagcaagactctgtctcaaaaaaaaaaaaaaaaaagaaagaaaaatattaatgactcctgcaagatgcctcctggtttgtgagccagtgcttttcagaggaaaaaattgtaccttgaatctatctttgctcctactgtattgtggcttaaatagatgaggctttcaagacttagtgattcccttaagtgtattttaaccttatttttaattggctctttgatagagtttaacagtagaaataaaaaggaatccttctacttattatgatcatcaggcatatctttcagcagatcaaagattaatctccctggaataaacactttattcttaatcataactgtggttataactccacttttcatatatctactataggaaggtaaagcatacagaagttttatccttggtagacaggataacaaacattactatatgatatttaagagtaataactttattttgtacttcagtgactgcttccatttttaaggattcaaattagcacttttgcaaaatgggaatcctgtatttcaattaagagttgaaatggagttattcgtactatctactttaaaatccttggcattcaataaatgccaaatgctttttatttttaattttaacctcagattcctatggttcttaaaggtatattatttatttggaacagaaagcatggtgtcagttagctcgtgctacataacaaactacctcaaaactcagtggcttaaaacagcagggatttgtcattgttcatgagcctacaggtcacctaggcagtgcttctggcctcagccaggctcactcatgcttgtggccagccgtgggccagctctgctgagcttagctggactctttctcatgcctgggagtgagcttgctacaggcgggccgaggatggcttcagctaggacagttgagctctctcccatgtcgtcatttgtcctctggtaggctggcccctgtggttcatgtgacgtggcagtcttccaagacacagagtgagagcaaaccaggcctcaggacccagtactagcaccccattcagccacatttttttaaacatagcgtcactagccaacccatattcaaggctcagagaaataggcaaggcacggcagttcatgcctgggaggccaaggagggcggatcacgtgaggtcaggaattcgagaccagtatggtcaacatggtgaaaccccgtctctactaaaaatacacaaacttagcctggcgtggtggcgcatgcctgtaatcccagctactcaggaggctgaggcaagagaatcgcctgaacccggtaggcggaggttgcagtgagccgagatcaagccattgcactccagcctgggtgacagaaccggactccgtctcaaaacaaaaacaaggctcagagaaatgtattccatctcttgatggaaagagctgcaaaatggctgattgtaaggagcatggatgcagggaggagtaaagaattgagcacattgttttttaaattgtttcaccacaggcacttacatacaatatcgcacgctgtagctagattgggctaaatctagagctggaggtagtgagagactttgttggaatcaccactcctatttagcacagaggtcagtatttctttgaaccaagtgagctttgaagttagacctgaacttttccatactctgatttatttggggggaaaaagtaatttaatgcttcttgtttccttattgtttaggaattactgctttggaggataaagtgtggatttctaaaaagcctttaaaaaagttttacttacttaccacataaggctgctttgctttgaattgtttactttgataatgttttaaagatgaactttcaccatcttgataagagagaaagttggtcaaacaactaaatgaagtcagtctgatgcagtgctgctgttggtttgtgtgattttcagatcgtatctctccttgcttctgcttccttaagtgtaaaatgaaggcagaagcgcctgtcatccctgccatcaggatgtggcacctcgttctcaacagaccacaagcttttcatgaatctttatttttttaaattttttttagagaaggtggtagagggaagttcagggaggtgcagggaggtgggaaatcacagagttgcttttcacgaatcttgatgtgtgtctagaatgcaggaacattcttgtgtgtgccacaacagttcagtgttgtgagcttgcaggaagttaagcaggaggctgggcacggtggctcatgcctgtaatcccagcactttgggagatcgaggtgggcagatcacctgaggtcaggagttcaagaccagcctgaccaacatggtgaaaccccatctctactaaaaatacaaaaattagctgggcatggtggtgggtgcctgtaatcccagctactagcggggctgaggcaggagaatcgcttgaacccgggaggcggaggttgcagtgagaagagatctcaccatcacactccagcctgggcataaagagcaaaactctgtctcaaaaaaaaaaaaaaacaaaaaacagaaagaaaaaaaaaaagaagttagacagggacacatgctgatggagaggcacagtttattgccttataactttcaggcccaagagctaggtgccttttgggagcatcttctccttcactgtccttctgcatctgatgtcttggccagctctgctggctctgccttctgctcactgctcctttgggaacgatgctatcaaggcccctggctacccaggcacctctagtctggtgtccaggtccatgtctcctttttggtcctggggctctctcaccccccctgcaataacatctgcagacacgttgaatccactaatagactcactgggggcagatggtgctccagaatcccaagcctgacccaaggcacaagttcatttgaaggccagcataggccagggtgagtgtactcagcgatggacaactgaagcctctggcatctgccttatggaaaaaaggaaagttgtgccactatatttgaaattgcttcggattccaatgacttctgtttttgcttttggtggggacagcaatttaaaggatagactcttagggagtggaacattttaacttgtagaattttaggtagccactcttgaaaaccacataaaataagtccctaagtgcctcaaggctcattgcgcaaaatgtttaattgtggctcactggggaggtcggtcagcaggtatcctgctgttctgccagaactcagcctccgtatcttttctctggggttctcacaaggagcccaggacattgtctgccttggaggtgggttctcttctcctccccttctcctgtcctttatcagcctccctacctgccctgcccagcctgatgtagtgtggttgcataatttagttatatgatttgatacaagcataccttgttttattgtgcttctcagatactgcattttgtacacattgaaggtttatggcaaccatgcaccaggcaagtctatctgtgccatttttccaatacattgtgctcactttgtgtctctgtgtcacattttggtaattcttgcaatattccaaactttattattatatctgttgtggtggtctgtgttcagtgatctttgatattactattgtaattgttttggggagccacaaactgtgcccacataagatggcaaacttaaatgatagtgtgtgtgatctgaatactccatcaacgggctgttaccctatgtctgtctgtctctctctctctccctccctctttccctgcctccctcctttccccctttccccccaggcctccttattccctgagacacaacaatattgaaattaggccagtgaataaccctacaatagcctctgagtgttcaagtgaaaggaagagtcacatatctctaactttaaatcaaacgttagaaatgattaagcttagtgaggaaggcacatcaaaagctgagacaggccgaaagctaggccttttgcaccaaacagccaagttatggatgcaaatgaaaagttcttgaaggaaattaaaagtgctaatctagtgaaaacatgaataagaaagcaaaacagccttattgatgatatggagaaaggtttagtgatctgaatagaagatcagaccagccacaacattctcttaagccaaagcctcatccagagcaaggccttaatcctcttcgattttatgaagcctgagaggggtgaggaagctacagaagaaaagtttgaagctagcagaattggcacattaggtttaaggaaagaagcagtctacataacataaaagtgcaaagtgaagcatcaagtgctaatgtagaagctgcagcaagttatccagaagatctagtgaagataattggcaaaagcaattacattaaacaatagattttcaatgcagaccaaacaattcttttggaagaagatgccatctaggactttcatagctagtagagaagtcagtgcctggcttcaaagctccaaaagataggttgactttcttctgtggctaatgcagctggtaactttaagttgaagtcattgctcattaaccattccaaaaatcctaagaccattaagaattatgttaagtctactttgccatgtgctctataaatggaacaacaaagcctggatgacaacatgtgtgttgacagcatggtttactgaatattttaggcccattgttgagacctactgctcagaaaaaaagattcctttcaaaatattattgcttgttggccggaaacggtggctcacacctgtaataccagcactttgggaggccgaagcagacagatcacttgaggtcaggagttcgacaccagcctggccaacatggcaaaatcccggctctactaaaaatacaaaaattagccaggcacagttttgcacatctgtaagtccagctgctcaggaggctgaagcatgagaatcgcttgagcctaggaggcagaggtttcagtgagctgagattgtgccactgcactccagcctgggtgatggagtgagactctgtttcaaaaatacacatacacacacacacacacacacacacacacacatatttgtatatatatgaaatacacacacatatatatgtaaatgtatgtatatttgcttattgaaaatgcacctagtcacccaagaactctgaggatggagacataccatgagattaatgttgtttttcatgcctgctaatacaacactcattctgtagctcatggatcaaggagtaatttcaactttcaagttttgtgatttaaaaaatacacttttgctgggcatactggctcatgcttgtagtctcagcactttgggaggctgaggtggcaggatcacttgagtgaccagcctgggcagtagaatgagactttataaaagccttaaaaaagttagccaggtgtcgtggtgtgtgcctgtagtcccagttactggggaacctgaggtgggaggatccctggagcctgggaagcataggttgcagtgagccttgattgtgctactgcactccagcctgagtaaccgagggagaccctgtctcaaaagaaaatttttttataaggctataactgccgtagatagtgcctctgatagatctgggcaaagtaagttgaaaaccttctggaaaggattcaccattctagatgtcattgagaacattcatgattcttgagagaaggttaaactgtcagtattaataggaatttggaagaagttgattccagccctcatggataactttgaggggttcaagccttcagtaactgcagatgtggaaatagcaagagaattagaattagaagtggaacatatagatgtgactgaattgttgtaatctcatgataaaagctgaatgtttaaagagtttcatatggatgagcaaagaaagtggtttcttgagatggaatcaacatctaatgaagatgcggtgaacattgttgaaatggcagcaaaagatttagaatattccataaacttagttgatggaggagcagcaggcattaagaagattgactccacttttgaaagaagttctattatgggtaaaatgctattaaattgcattgcatgctacagagaagtcttttgggaaaggaagagtcaatcgatgcaacaaacttcttggttgtcttattttaagaagttgccacagccacgccaaccttcatcaacaaccatcctgatggatcagcagcatcaacattgaggcaggaccctccaccagcaaaatgattacccctcgctgaaggttcagatgatcgttaacttttttttagcaataaagtattttaaaactaaggtatgtacattgatttttagatgtaatgctactgcacacttaacagactatagtgtaactacagcttgcatatgggaaaccaaaaatttgtgtgactcactttgttgcgacatttgctttattgtgataaacctgcaatatctctgagggttataataatctctgtgttatgctttttttttttttttttaggaacaaaaaagctgaccatttcataaacattttattggggctccaggacttcataactatttgtaatgattatataagctattgaattactctatcattaacccatttcattctttaacatattttccccatttttactccttggataaagcttatatgaagttttttaaatttgtagttccttttttattctattaaatgatttctatagaaccaatttccaagcctggaattccttaatcaaagtttatcattagtgttgttgtcattattattgggcaggtgtatttgtttctctctatattggagcaaaattcttgccaaatagttagttctaatttacaattctgacaaagaagtatgagagccctagaagtggcattttgttattgttttgagttgttcctttgctttccctgcacagcagtacattttaaaaacattttaatctgaaacatttagcataaaaaagaatcaattttggaattttatttacttggaaaataaatgaatcatctacagtgctgaacaatgataaacaaataaagtcatggggccaggtgcggtggctcacacctgtaatcccagcactttgggaggccgaggcgggcagatcacttgaggccaggagtccaagaccagcctggccaacatggtgaaaccctgtctgtactaaaaatacaaaaattagccaggcatggtgacacatgcctgtaatctcagctgctggggaggctgaggcatgagaatcgcttgaacccaggaggcagaggttacagtgagctgaactcgtgccataccgctccagcctgggtgatggagtgagactctgtttaataaataaataaagtgatggtagtggcgtgcataccctgtaagttatatatgtataacatagtcatatatggagataccttttctcatctgttcctggaagatattgcagctatatgcaagtccttgcttctctaaaagtgcagaggagatagatggtagaagccctccacaggaatggtagcatggagaagtttggaaaagatttattaggctctgaaagcaatgacacatttcctttctaaggatcttttggaaaaatatcagactattgttttaaaacaacttaaaaatagagcttggaaaagaatgaacacgtttctaaggttgtggttttaaggaaagatttcttttccccagattgatgtggtcctggaatataaaagaaaatccagccattagaaaaatgggcagaataagcagcaggaaaaacataagatgagtttatgtgggtgtaaaattgtcaaaatattaaaggaaaacataagctgttttatcttagtggagagagtggtttagacattcaatctagacagaaaatattgtgatttatacaaaaaataataccatctgatcttgacacttcagtgattagacggtttatttatttattttttttttttgagacggagtcttgctctgtcgcccaggctggagtgcagtggcgcgatctcggctcactgcaagctccgcctcccaggttcatgccattctcttgcctcagcctcccgagtagctgggactacaggtgcccaccaccacgcctggctaattttttgtatttttagtagagacagggtttcaccatgttagccaggatggtctcgatctcctgaccttgtgatccacccgcctcggcctcccaaagtgctgggattacagtttattaatattatcctagactttgaaatagtttgctcctgtaaatattactaaactattattatgttgctttcaacttactgaatagtagattttacttccaatttactggatagtaattttttagtctggaatttgttgtattttaaataagtggcccaacttaaaactatttttacaaccatttggtaaatattctggacataatacaaaatacattcgtatattactcatagaaatgagcatctctgtttaataggttcttggggtacaatagtgttaagggttaaactttggtttgatttagtcttggaagaggaagggtctggtttgaaaagagatggaagggaatgccagatgaaggtgtaaagacaaaggtagcgccaaccatccaggccagttgcctcatttggaacctgattcccagacaaggagggccttctctcagctgggatgtgaccgacagttttcaaacaaaaagcctaagagatcgtggaagtcttgacaatttcctagtttattagatgggtcccagcataggtccaatttgtgccaaccaaactatatgctgatgtttgtcttccaaaggaagtaatactgtgttcaaaatgctggaatctaagtaggttcgattttgactttgggctagtttaagtattctaaagctgtatgaaattaacattagacttttccaggttaaatacttggttggaagagacaacctttaagattttctcctcccagcagagttctctgatttctgaattgtgcccttctttccatgagcactgagcaagagcacatgccactagatcctttgagccacctacacattcatgacctaagattgctggaattgatttgaagagttttagaacatgtcagcattctgttcttcctttgacctaagaaacccgaacacacaggcagctggcaggtttactttgtgattgtacgaatgaagcctgtgagtgtgaagtgctgctgcatgaatccttgatctccaggtgccttggcctttgtcactgtgtgtttggaggtggaggagaatccttgaacagagttaatgcttagcaggaagttggcctcttgtttatttcaatggttttggcttcatcccctatgtcggaatgtatccataaacattctgatttaagtaatatggaatatagtcaactcactgcaataatatattggctgttcatgtttaaggatcatcattggatagaagcatccactgattcttttagatgaagaagttatgctgaaatggcatccatcctgtgatctgctcagaaaacactgtctggagagaagagttcttggtagggtggggaggaaggtggatttagggcataacctgagctggacgtattcagggaatgtgaggatgacagctcactgggatgcaggctctgggatggggagtcataggcgctaaggttgtcagttgaatctggatttgagataaccactggtgggttctgagcataggggcactgtgatccaggcggctccttgggagaggtagctgggggtcagcacactggaggtggagcagagggaggcaagagtccactactcctgtgagagcaggcctactgctgtgtgaaagatgggacctagactgtggtagtcacgctgaggatgacaaatgaggatggcaaacgtgatatatgggaattatcgtttaattcttaaaaaacaaacagcgacaccattaacacacccaaaggaatgagcaacagccaggtgtggtggtacacgtctgtagtcccagctgctcaggaggctgaggtgggaggatcgcttgagcccaggagttcgaggcttcagcgagctgtgatcacaccactgcactccaccctgggtgacggagcgaaaccctgtcaaaaaaaaaaaaatctttaaaatatcctcaaatatctatacatatcttttagtttgaattaggatttaagtaagtctacctattttaattgctggatagacctctaaaatctctttaatcataggtttgttcttcctctctatttttttttcccttgcaaattatttgtagaagaaagtgagtcatttctctatggagtttcctgcagtcttgactttgctgaatggtgctcagtatgttcccatgtcctctgtatttcctatcaattggttggtggatctaaaggattaatccagttgtgttagccctaaggcttgtttctatccagttcacatacagaatagcattaatctcactgtggtgctaggtcatcttatttgtttggataaataaagaccaactactagttttacttttaatcatatataatagtgtgtacagatcttgggtagagttggacaggttctaacaaatacatatatccatggttaccaacacccggagccttgatgttcccctagaaagttttctctcttctgattgcattcagtcctcctcttaccccagaagcaaccactattctgattgtccctctggtctctgatcagtttgacttgtattttttgtcgttgttttacatcagtgattttaataaagaaaaacagacttctgagggaaggtaaccaggcccactggtccgcagtcctgtaaacaaagcgatgtgatgcttagctgaaggcgaggatagccactgtcgagagtaccttgtcttccgtacggttcagccactctctgatttaagcaaagataagccttgcccatctttttcccttgaggagggatgcatccactgaggcaagggccaaactccatttttcacgagatggttttactttgagctccattttctcctcaggatcgtgcaccagccatgcctggtgagactttgttttattgcaaggtttcctgcaaggtttcccacagccggcgtgttcacacacaacagggcactcttactcctgaaaggagactgtggctctggaggttacatacagctgtgcaggttccaccctgttcttctcttgggcagcaacccatgtctctttcttggatatgttttcatgtgctgctgaaaatcatctttccatgtaaatatttcctggcatactgcacatgttattaatatttccttcttaggagtttctctcatgtttcagaagttctatgttttggccaccagggaacatccctttgctatatactgtgcagccctcatgggcctggccgcgtgggcccagcctgctgggtgcagtgggtgcttcctgatccccctgggcacacttgagcagcgggtcactggtgtgctggccctggtggatgtccagctgctgatgcttcttaaagatcttctgacagccttcaaatcgcatacctgttgtctttgtgcattttcaagtttgcattgaaaatatttcttcaagtttgattttgtgttgaatttgtgcttatagccaccagccgcacagctttcctccagtgtgaatgaggacgtggggactcaggtgggagtccctgacgaaggtcttatcatgcccttcattgccacaaacaaatggtttctgccttgtgcttgcatgggtctggcttgcaggccttgtggtaattggcactgtgtcgaggagagtggatgaacctcctgggaagtgctatggtcagggtgtgtgagggtctccctggtctcaagggtcagggaggacgctgcctccaggacacgctgcctatgcatcccaccacccagttttacttgtctaggcctcaaaactggaaacatatggtatcaatatttaggcttcatgtattttaggttaagggtgtaagcatttattcagctcctacttatgccagaatctacattgccgttagaaatacaaaaatgggtcacgtgtggtggctcatgcctctaataccagcaccttggggtcctgaggtgggaggattgcttgagtctgggaagtcaaggctgctatgagccgtgattgcaccactgcactccagcctgggccacagagcaagactgcatcttaaaaaataataaataagggccgagtgtgatgattcacgcctgtaatcccagcactttggaaggccaaggcaggcggatcacttgaggtcaggagttagtgaccagcctggccaacataatgaaaccccatctctactaaaaatacaaaaattagctgggtgtggtggcgtgcgcctgtaatcccagctacttgagaggctgaggcaggagaatcccttgaacccgggaggtggcggttgcagtgagccgagatcgtgccactgcgctccaacctgggtgacagagtgagacactgtcccataaataaataatgaatgagaaacataaaagtgattgtcaccgagttggcagtggggacagtaaggtggttatgagtaactacagaggcagagcagggcgatcacctgtggaatccccggtgtcctagggatgcaggagatggagaggcctggcgcccagaggccctgagagtgcaggagcaggaactgcaggactcccattgtttctctgaggtcataaacctgaatattaaactttggctattttggtcgtttgtcattttcctgcatgggcacaggatttcctcatcaccctgtgcatgttccgatgaaagagggccccagagatgtggtgtggaatgatttcctctggggagcagaaggcagaattgccatgcccaagcccgagcctgctgtgtgctcctggtgtgcgtggcgcccctctccatgccactcctccatgagcctcttcccactcacagccaccgccttcctctcggcccagacggtcaaccaccaagtgcacataatttgtttttaccaagaaaagcagttaacagttctgttttctttctatgtcattttgtaatgaacatttgtttttctttttttttttttgagacagagtctcactctgtagcccaggctggagtgcagtggcgcaatctcggctcactgtaagctctgcctcccgggttcatgccattcttctgcctcaggctcctgagtagctgggactacaggtgcccgccaccatgcccagctaaatgttttttgtatttttagtagacacggggtttcatcatgttagccaagatggtcttgatctcctgacctcgtgatccgcctgcctcggcctcccagtgtgctgggattataggcgtgagccaccgcgcctggccgaacattttcatattattgaaatgatttgaaatcctgactcctaggtactgcataacttaccttatatcatcatactttatgtgactatatatagtatgtatatgtatatggtgtgcatatacaatatgctatatatgtatctgtatataatatatatgttatatactatatatgtatgtgtacatgtatgtatatatttgtccagtttgtccagttagttttataaggtcagttaggaaatagtgttaaacaaattttaaaaattaagttctcatggaacacaaaagataaaattactaaaacctactctattttttcttttcttttctccacagaaccatccgggtatggctgaaaagagacagtggtcaatactggcccagcatttaccacacaatggcctgtaagtagctgaactgttccatttgagagaaatgtctctaatgtttttgatgatttaaatttcaaaatgtcggctgagcatggtggctcacacctgtaatcccagcactttgagaggccaaggcgggtagatcacctggggtcaggagtttgagaccagactgaccaacatggtgaaagcccgtctctactaaaaatacaaaattagctgggcgtggtggtgtgcgcctgtaatcccagctacttgggaggctgaggcaggagaatcacttaaatctggagttggaggttgcaatgggtcaaggttgctccaccgcactccagcctgggcgacagagcgagactccatctcaaaaaaaaaataaataagtttcaaaatgtctgattaaatattgctgctagatttcaaaatgagtttcttagttgcctaatacctctgacaggctgtaataaactgcaggaaaagtccttttcttttgcaaaggaagttgagtctctggcttaactgaagcagacttgagcaaaactgaaaaaaaaataggaaaatgaacatgttctcctcagtttttctttgtcttaatttggccaacttacattagtagtaactttgtcctttatggtagccgatatcaacactaaaaaaggactgtgccctccatagcgtcatgactacctttgcccaaccttttcaccaacctctggacctattgagagacatggtccaaggtacaacacattctaaatagagaattttctcagcagtcaggtatgttctataaataaatctggacgatgaatcttctgctttgagactttaaagcagccctggaggccgggcttggtggctcatgcccgtaatcccagcactttgcgaggccaaggcgggcggatcacctgaggttgggagttcgagaccagcctggccaacatgatgaaaccccatctctactaaaaatacaaaattagccgggcatggtggcacatgcctgtaatcccagctactcaagaggctgaggcaggagaatcgcttcaatccgggaagcagaggttgtggtgagctgaaatcacaccactgcactccagcctgggcaacaagagcgaaactccgtatcaaaaaaaaaaaaaaaagcagccctgggatataccaacataagatgacacataaactttagcccttcatgtgaatctaagcagcgtcaccatccttgtctcccacttcctttcttcaacctttcctgaaaagaaagccctgtagagaatgcctggatgtcatcaaagttcaaatggggagtcaactccgttatgccaagtagccagacaggaggcctctgtagctgctaatttccttgaggtttcgtccttaatcagtgattttcttcagttaagggttttaatacacagaggacaaccccctaagaaaagaaaaaaggctttagtgcatgcgtgatgatttgttactgaagaccattatcaagttttccaaagaagagctcttgacagtggttgcagatgctgctgatgctgtccactgctttcttaagaggtattccagggctgtggagtttgttataaagacagagcagccagttattcagcaaactgcatctcatcagcttgagtcatcctttcaggcacctctctcctctggtagcactttctcctttatacctatttcattgtgcatgcagcatttagattctgtaataattttcacaaaaagttagtagtttattaggattttttatttttctgccttctaccaacagcctgggcaggctggccagcttctttgtcttggtagtcattcagtgaaattgagagagaccttttggaaccctggtataaagataactattatgaaaggaagagtaaaggcttataatacataagacatttgaagacttcttgaaaacctgatcataatttattgtgccaagcagtggcatctcttctgttacccatgtctgcatgtactgtggatgcgtaaccttggttctcacactaaattctcaccttgagatatgaagtaaccaatgtcttagtgaaggtgcttatggagcctgtctgataaatttactttggaaattttggcagcagggcagagataggtgggacatcctgggtctctgagcccacctgttacccaacctgccccagtctcccaaaaagacttctgttaggctaactccttactttccagtggcccagagatagatctgagagttggaagtagcaacagcctgaggaacgcgtatcagtgctgggaaatgttttgtcatcattggggaaaattttgttaatactatggctcttatgcttcccactcttcccttcctccatcattagcattttggtcatagcttaatctccctgagtccttaaccttgaaattcatgctcattagaatagagacagagactagagggattttgtcccatatttggttcagttactccttgacttgcatttcccccaaatagtacaactttgtaattaatttctctcccaggacaccaaaacctagcagtagaaatgtgtgtgttctcttggctgttagatctcgggcaagtggcagtggatctctctgtcttcagccttttctaacttggcttaactgtcccctcctgaaggagcttctagctcaagaaggaggaacttgaaagaacagacacagcttcgccgtgggtggtcgacacctacatgtttgtatctgcacatgttcagtgtgttacttctagatgcttctttattgcttctatttggacctgtatctgctgataaaactgcagatacaccacaagaagaaaacagagtgaatgcattgtgagaaataactgcatgtctgttttagaatgactttttatttcaaaattaaatttaggatacaaaaagaaggatgccatgttagttctaaaagctatccgcagattatccaatttaggatgtcttagtggttatatccaccaatttaaactttttcctgtgacttgacagagtgatcaataagccaagccttagtatattgctatatgcagtccaattgtgttctataacattacctcacataaaaaaaaaactttcagaatctgctttagctgaagaaaaatggtaactcttggcttctatctttactgtgtacttcatgcctttttttggtaatataattttatgaaaccatcacaacagctatgcaaggcagataatatttttaccattttgtgaataagcaagctgaggttagaagggttgattgcttgtcattggaattccaatccatgctcatctatgactccaaacctatgcttctcaccacagtgatgggtaggtctacaaactttttatgcaaagggccagacagtaaacatttggactatgtgggccaatctctgtggcacttactcaattctgccttcctatcatgcaaggagtcataaacaagacataaatattgcatgtgagcaatcataagttatatataaatgtagcatgcaagcaatcataaatgaaagggtttatgttccaaaggaaaaaaaaactatttattaacaaaacatgcagtcagctgaatttggccttctggtgtgatccaaagttttaaacatttgattttggactgcagtgatggctttttaaaagttcattgacttggctgggcatggtggctcatgcctgtattcccagcactttgggaagccgaggcaggctgatcatttgaggtcaggagttcgagactggcctggccaacatggtgaaaccctgtctatactaaaaatacaagaattagcctggtgtggtggtggctgcctgtaatcctagctactcaggaggctgagacaggagaatcgcttgaacccaagtggcggaggttgcagtgagctgagattgcgccactgcactccagcctgggtgacagcaagacaccatctcaaaaaaaaaaaaaaaaaaaaaaagctaactgatttgaaagatgattcctattttgctttatatccaacccctccccttctacattaaatttatattgcttatctcagttagaaacctcctttctagggagagagccaggatattactatataatacaaaacaaactaaggaagccttttttttctttttgaaatgttatagttgtctagcttcataaaattacccagcactttgtaatttttacacaaaagagggattttacatatttatgttgtttgttatagggttgggcattaaaaaaattgaaaagaagcttaaaactaatgcatttagtgccagctagaaagcaagcaaaaatgatgacagtgaatctctgaacgcatcaaagcatgatttgatttgtcaaagataagtgtatgcatggtttattaaagaacattttgattgtataaagatatgtatatatatctttgtggtcataatacttgatcgttcttttaatctcaaacatcactgtgtcagataagggtatacaggctcatagtcaattctaattgttttgtgcacaatttcagtacgtacctttcagagccaactacatagttcttggatgcaactgaaacagtctctatggtctgatcatgcagttagctatgtttttgctttggggtacgatccagtattatagtttacttccttcctttggtgaggatatcaccctactagagagagagaactttatattcaaatggtgacttcatttaaaagacgttttttcttttatctttttttttttttttttttgagatggagtttcactgtgttgtccaggctgatctcaactcctggcctcaagcaatcctcctgccttggcctcccaaagtgctgagattacaggcatgagccaccctacccacccgtcttttatgagaagttttattccaaagtgaattcaaatttgtttgttttgttttgtttttccctagcatgcatttccttgttttggttcttccattgctaattaaaattccttaggctgaaacaaacccacattttttttccaaatgttccaatttataaatcactttaattctaatttttggtaaaagacaatttagaatttctcctttctgaaactcattctctagcctgtgatttctggaagagggtagggtagaacatggaaggaggacaaggaaacctgtctgcacttcacaactcacatatgccatatatctgcacctcacatatgctcacttatgccatagaatgggaattctggtgctgggaacccatctttgcacagctactctttgacatttgatgggaagggtggcaggggcgggatgacctcctgagcttttgggcagcaggtcacacactacaagcactggtccccaaggcttgccagactacaggtagtactttcagtcagatgaagcttcatgctggctcacttcacccagcattatagaaacaactgagaagatttgtgaaatcaaggttttaaactaagacaacagagagaactttaataacattttcaatttacgtaatttgtataaaacgtttttaccctctttctgtgaacctaaattatatagttcttatcatatagttcttaatcactttgaagaacaacttaaagtgcttagctttgctggtaatgtggtctttgtctttctggcagctccttgctctgctatggcttaccatcatgacagcagacggatatttgtgggccaggataatggagctgtaatggtaggtagcttttagaatgtatttattgtattctttatattatattctttatattgacctcccatgtcccatattggccagttaactttggattaacaatggatgctcgattgtttggcatgaaaaatgtttaatttaggccaagcacagtggctcacatctgtaatcccagcactttaggaggctgaggcgggcggatcgcttgagcccaggagtttgagaccagcctgggtaacatagtgagacctcatctcaacgaaaaatcaaaaaaattaattggtagtggtgcatgcctgtggtcccagctgcttaggagactgaggtgggaggatggcttgagcccaggaggtcaaggctgacagctagctgagattgcaccactgcactttcgcctgggcagcagagggaaaccatgtctcaaaaaaaaaaaaaaagtttaattcagtatagatattaggtcaaaaatggattaaattattgcttaattttaaactagttccttggagctcagaatgctgtcgtaattgatagctgggtgctcgggctgacccacagatcatagccttcatagagtgaatacgtcacctatagcagcccccatcccttagccgtgatggtggagagcctctgtcactctgtgtgtgtgtgtgtgtgtgtgtgtgtgtgtgtgtgtgtgtgtgtgtgtggtcattcagctagcaactcacagaactctttaaggcaatacttctcaaactatctttggcaaaggacctgatattcaagtttctagtctgttatagactggcatttttgtgcgtcaaattgtatgcatacatttgttttttcttaattgaaatataacttaaataacataattatatttaccattttaaagtatataattgtgtggtcttgtagcatattcataagattgtgcaaccattaccaccattctctaattccagaatattttcatcacccctccctgcaaaaaaatcccatacccattagcagtcactctccattgccccttcccccagctcctggaaatcactaatttactgaatccaaggatttgcctattttagacactttatataaatagactcatacaatatgtgtggccttttatgtctgtctttcacttaacataatgttttcaaggttcatgcctgtttgaattaattaattatttttgcagtggaatagcattctatactgcatttggttgatccgtttattagttgatagacatttgggttgttttcactttttggctattatcaataacgttgctatgaaaattcatgtacatgtttttgcatggacatatttttttctattctcttgggtatgtatacctaggagtggaattgctgggtcatatggtgactatattgaacttgtaagcaactatgaaactgttttccatagtggctgcaccatttacattctcaccagcaacacgcaaggtttccggctctccaaatccttgctaacacttgttattttctgcttgttttgttttgctttgtttttgttatggtcatcctggggggtgtgaaatggtaccagattgtggttttgattcgcgttttcctaatgactagtgatgttgaggatcttcttaggtacttgttggtcatttatatcttctttggagaaatatctattgaagtcctttgcccatttttaatagagtattttttaattgttgagttgtaagagtttttttctgtatgttagatactagacccttatcagatatatgatctgcaaatatcttctcctaagagctgcctttttactttttttttttttttaagtttggtgaagtccaatttatcttttttgtttttggctacttaagctttagataccatatctaagaaactattgcctaatccaaggtcatttatatctgtaaagataggtgtaaatcaagatttacacctgtattttcttctgagagttttatagtttagctttacatttagatctttgatttattgtaagttaattcctatagtggtatcagggaggggttccacatttattcttctgtatgtggacatccagttatcccagcaccaattgtttaaaagactattttttttcccccatttaagttttttggcatctttgtcacagagccagccaggcagagagccagggaagagtttccagaagtcaatgttatagtggcttgatggtgcagggctatatagggagggcaccctagggcgattggagaattgggcagaggccgggtcatgcaaggtcttgtaggtctgggtaaagctttaaattttattgtaattgcagtgagaagctgttaaagtgttttcagcagatgaatagcatgatgtaatttacatttttcgaagatcaccctagctactgggtagagaacagattgaggcacggccagagtggcggtgggagaatcagattgttttagcggcctgggtgaagggacagtggccatgaagaaggacaaatggatggacttgagttgagataagtcttggagacatctgagataagttggctgtgtagaggagaggaagagaagtcagatgacagccaggtttttggcttgagcagctgggtaggaagtagtattgttcgctgagaagggtaaggctgggtgggggaggcagttggagggagaggggacagtgagagccagcctagtttaagataccagtgagcttccaactggccatgtgaagttggcacaggataaacaaaacgagtcccggagaggtctgggcagagggcatcatcatcaggtcatttttcaagccacaagaatgactgtgagtagctggggagggaatgaaagaagtcagggcccagacctgctgcctaaataatgacactgttttggagtggggtcaaaggggaggccagccagggaggaggggaaatgatgatccttgagtgtgactttaaggggcccagaccacgttatgtaagctgaatttcctgaccttgcatagtcacgccaatcattgagggaacttactaaaatacagattccccggctctatgccagacctagagcttcggaatcactagggaggggcctggggatctgtacaataagtagcaagtcctctagatgaaccctagggtcaagtgctttagggaaactacatggttttgctaaaacctctgaggagcaggagcaggtttctggtttttgtgagctcagaaatttgtagcaggctttgaagggacaaggctgaaagtgcaggtgccagttaggaggctgcctccggaccccagtgtgaaatcatgaaatactggggtggtgatggagaagaggctgtggcctcaagaactgtccgggaagcagggctgggtgtgtgaataaaggtgtgtgttgaaatagggagcagctttaagatgactttcaggtttctagccaggaattagctgtcttcagagacagaaaagatgctgatcttttttggggaaaggtgatgagttcagttttgagaaccgaccttgggtgtgtgtgctggaacctcagggtttggtctgggcaggggttgggagttccctgaacatagacgtcagtggaaactacaacggtggctgccgtgaactagagagagcaggtacattgagaaaagcagagggccaaggtcacattcctagggaaatgtcaatatttaaagaaaagccagaggactgggagcctaaaggagagacaggaagaatgggcaaagtgggaggagagccagccaggacagtgcagccacggaagctggagggcagtgagtttcagggaggaggtgagtaaaggtgtcaagggcaggagggagaggatgaaattgggcctggctagtgcctttgggatggcacgtagaagacagctgctgataacaagaagagcctttccatgcagtggggtagccctggtgagccatggactgaagtgtgactgggagatgtgggagccagagagcctgagggtaaccagagtggtctggtcattagagaagcttttggctgagaaggggtcaaggaaagtagaagtatagttatgagagtttcattgtttttatttatgtatttattttttaatgaaagaagcagccttggaccaggtgtggtggctcatgccaataatctcagcactttgggaggcttaggcaggaggattgagcccaggagttagagaccagcctgggcaatatagtgagacctcatctctacaaaaaataaaaaaattagcttagtgtggtggcatacccatatagccccactactcaagaggctgaggtgggaggatcacttgagcctgggaagtggaggttacagtgagcagagattgcaccactgcactccagcctggatggcagaacaagaccctgtctcgaaagagaaaaaaaaaaaaatagcagcagcagccttgatgtaagggccgagaagaaagatccagtggaagggacaggctccctgcccatgcagttcacacagcagcaggcggcaggtgagggtgctggaaatgcatgacacagtagtgaatgctgaagctctccgttttagctttcagaaaattttataggaatatcatcatgtgcatacacacatataatgagaagccactaagtacaagcttcatatagtgcagtggtgcagtgttggtgcatttatctccctagggacccttcttgtggccttcagttcaaggggagactgtcattataggatggcacataagaactgttacagttgttcaatggaaaggggcaatgcaaatccaatttagcattagttagcaattgatcaattgctcttccactgaatacagattaatatatacagtgctgatacattttttctactttacaaaaacaagatggaaaacaagaaatctgtattcgtttgtgtgcttttttcccccctcactctggtctgtcagcaattcataatatccatgtcaatttagcattgatcaataatagtattcttggctgggcacggtggctcatgcctgtaatcccagcactttgggaggccaaggggggtggatcacttgaggctgtgagttcaagaccaggctggccaacatggtgaaaccctgtctgtactaaaaatacaaaaaaattagccgggtgtggtggcatgcacctttagtcccagttactcaggactctgaggcacaagaatcgcttgaacccaggaggcagaggttacagtgagctgagattgcatcactgtactccagcctgggtgacagagcgagactctgtctcaaaataatataataataataataataataataatagtagtagtaattcgtgatttttctttagagttttatcttcatagctttagttgaggttgatttttttgcaataaaacacatgtactttaaatttcttttccaagttataaagtattacatctatagaaagtttggggccaggtgcagtggctcacgcctgtaatcccagcactttgggaggctaaggtgggtggatcacctgaggtcaggagttcgagaccatcctagccaacatggtgaaaccccatctctattaaaaatacaaaatttagctgggtgtggtggtgcacttctgtaatcccagctacttgggaggctgaggcaggagaatcgcttgaacccaggaggcagaggttgcagtgagccgaggaagcaacaagagcgaaactctgtctctaaataaataaataaataaataaaatttggaaaatatgggatcataaaaagacaaaaaccacccacaatctcaaaatttctcttttgttgttgttgtgtttgtatattaaataggtgtactttcccccactaaattgctgagctacccagtgccctgtttttactgtagctgagagctctgttagtgaggggtctttgcagttttgctttaatatgcagtgtcttgagggattttttgtgtcactaagagaataaagttttgtagtaggagggagaaggaatatggagtgctgatctgggcaggaagaagtggacacaaatcccatgctgatcagcagcacttactttattcaattcggtctgttctcccaaacaatgttggcctgaggacaggtctggtgaaagaagcaattcatatcattcctaaataactcgccttaagtcctaggtcttgtgataatcatttttggattttacttcatttttgaaagtcaagtttctgttgttttttaaaaccataactcttttaattttttattttgtgcatttgcttttaggaatttcacgtttctgaagattttaataaaatgaactttatcaagacctacccaggtaattataatacacattatcttgcgtacacatacatgtagacatacacaaaactagaacatcatctcttatgatgaaaattagattttcacattaactttttagttttgttacccccactatgcaagagacttgtcttttagtgatatttcagctttttcttgctcattaacatttaaaattttgtatatcaggcacatgtatcagatttaattaaccattcttttattattggatatgtgtactgcttccattttttttttgataacacacattactcttcatacatgtatgtgtgtgtatataactgagtgtacaattttttgatatgtgtatacacattgtgtgtgtgtattgaataagtatatacacgtgtgtgtgtgtgggtattctccactgttattctgactctaatcctataattcattgtttctattttattttgttttgtttaaatggagacgaggtctcagtatgtagcccaagctggtctcgaactcctgaccttaagtgaccctcccacctcagtctcccaaagtgctagaattcaggtgtgaaccaccacacctgtccaaattctataattccgattatttaagacaaatccctaggtgctcagtgaggaattttttttttaagacaaattcctacaaagtggaataaccgggtcagacattaaaaagttttttaagtgccctagatttattttgcagactgcttcacagcaatagtgcaagtttttacagtctgcgaatggcagctgagaatacctgttcatgaagtcttcacaacatggctgcctcataatttctttttcctgttttatagtcaagaaagttctcaatttgaaaatgatttaagctttatttaatgttgaccatttgttgtcttttctgaatgtccgtttatgattttacgcatattcccagggagctggagtgttttctaactgaattgtaagcacttttcactacaaagctatcaatactttgtggcatctgtgacatatacctttttttcagtttttactttattttgtaaatttcaatattttaaaacttaacaaaagcaagatcccaatgacaacttcagattgaagttgcaaaactaaagcattttgattaagttgtggattcccatcagagcaattagctgattcccagaaacttcaccagaggacatgacatttagcctcattttattcactctatatttctaaaattttatacttaatgcttgtggataaaggtaaaaattagagtgtagatgttttacgtatgtgttgttcatcttggtgaaatgtggtctaataataggatactttaataagaaggccaaattgcttttccctacatattgtttcacctgttccaaatttaaaataggagaaaagcatccaggcacggtgactcacccctgtaatcccagcactttgggagcctgaggcaggtacatcacttgaggtcaggagtttgaggccagcctggccaacatggtgaaaacccgtctctactaaaaataacaaaaattagctggacctggtgacacatgcctgtagtcccagctacttaggaggctgaggcaggagaatcgcttgaacccgggaggcggaggttgcagggaaccaaaatcgcaccactgcactcctgcctgggcaacagagcgagatttcttctcaaaaataaatcaataaataaaataggagaaaagtgatataacaatgaccatacatttgtccttggagtatgttggtcagggaaactgttttgtaacaatgaatgataacactttccaatcttgcactgagtaatgtactagcattatggtgttattataacaccagaagcaactttgaattctcagctatcatgtgcaggtttatctttaaaataatcaagaatccgtaaattcctttatgaggtatatacctatgagtttggagacctttaaatgccaggcttggagacccttaaatgcctggtcaatgtttttgtcaaaaggcaaattccttaataaattatttcatctggacagttgtggtagctcccacctgtaatcctagcactttgagaagccaaggagtttgagaccagcctgggcaacatagagagaccatactgctataaaaatgtagccagccatggtggcacacgctgtagtcccaactacttgggaggccgaggtgggaggatcacttgagcccaggagttagagattacaatgaaccatcatcagactactgtactccagcctgggcaacagagtgagatcctgtccctttttttaaaaaaaaaaaaacaaaaaacgtgtgtgtgtgtgtatttttcatctttcattaaggatcaaattatttcatattcacatctcatgttattatctatattttggttgtcaaaggtttttttttgttttgttttgttttttgagaaagagcctcactctgttgcccacactggagtgcagtggcacgatcttggctcactgcaacctctgcctcctgggttcagtcaattctcctgcctcagcctacctagtagctgggattacaggtgcgagccaccacggccagctaattgtttgtatttttagtagagaaggggtttcaccatgttggccaggctggtcttgaactcttggacccaagtgatcctcctgcctcggcctcccaaaatgctgggattacaggcatgagccaccaagccccgctggttgtcagagttctttatgggctataaggcagcataggtttcttgtgcagtggttcttggacctttatatttcattgactaataacattttagaaaacatttggaggactaatatagggattgctgtattttttattttgccaagtgagagtttaaaaactaaaaatgaagcaaaataagcatgactatatctcaccatactttcataaaagaaaggatatcagaaaaaaccaaacagcagaaaggatataatcttagaaataggatggctcttcccaggaaaaaatagttgactattcactacagcatctttaccacaaactagtttaaaccctatgactgtttggcccgagtttaacaactacagatttagtggaaaaagtgttttgagtgagacagaccaaattaatctatcacttattagactttaggcgtatattaatatttatatttaatatatatttataaatattttataaataatatttgcatttcagttttcttatctgaaaatcagtataataatacacaccctgtaagtatttatggaaattaaatatcattaaaacagaaaaagcattaggctccacatcagacgctgagacagatcttatgagatatggcctactcaaatttaacattattttcagttttaaatttttattttttaattagagacagggtctcgccgtcttacccaggctggagtgcagtggtgcaatcatagctcaatgtaacctccaactcctgggctcaagggatcctcccatctcagcctgctgagtagctaggactccaggcaagtgccaccatgcccagctggttttaaaaaattttctgtagaggtggggtcttgctttgttgcccaggctggtctccaactcctggcctcaaacaatcctcctgcctcggcctcccaaaagtgctgggattataggtgtgagccactgtgcccagctgaatttaagattaatagctatcatagcatcctttaagtttcagaatccttcatgagtatttaattgttcagtgtaaccttttagcagtggatgaatctgacctgcacgtagacttttggggagagtccctcagttcttcctaagcagtctgtacagctgagagcaaggtcagcagtttctctgtcaggcctttgacttcattcatcagactggatgcttattaaacatctactacatgcaaagttctgtaccagatgaagttgaaggcaggttacactgccccggtgtggcttataattgacctggaaatatttccagagttaggtaacagacagaataccttcctcattctcagctgttattttggaacagagaactttacaaaagctttgtctttgtaaataataaaatgttacacactgataaaaagtattccagaaaccaaacacataacaccattttttaattttagaaaactgccattgctcttacttagaatgccagtgttttctgaaggttcaaaacactgaagttacagacgattaaaacattgcactgttacaactgctgctttccacatggttcttgttcatacagttttttagagcaaagtaaaaatgttctcttgagcatagcaaaaaaaaaaaaaaatctgttctctaatctattatttgatttctccttgagcgttactctttaatgattcctagcttctggtggccatgcctgtggggagcagagggcaccgccttggagagagcctgtgctagtgagttgttgagctggggcgggttgtctgaaatatactcacagaggacaggcatttccagtacactcttgtacacagctgtgccctggctgagcagattgagaggttgagcctcagttcttccccatagagtgctgtttctggagatgacatctgttcacctttctgttcctgcagctcatcagaaccgggtgtctgcgattatcttcagcttggccacagagtgggtgatcagtaccggccacgacaagtgtgtgagctggatgtgcacgcggagcgggaacatgctcgggaggcacttcttcacgtcctgggcttcgtgtctgcagtatctttcagagccacggacctctccttcccctggcctctgcttctcagtgtttggttctgaatctcatcccaaatggctgagatctaaagactgaatgaaacctatttaagtttgtgcaaaagtaattgcattttttttttaccatggaaagtaattgcaaaaattgcaattacttttgcaccaacctaatacatatttcactgaaaatccgagaacttccgtaagtttgctgtaaattgggtttattaaaaataatgaaatgaattgttctgtgctgggaggtgctataggtttttaattcaaaattgtggaaaacccaagcccattaatgcaaacccttcctctcacgtctttgtgtttctaatggaaagactttttattgtgcgaagaaaggaaaaaaggaacttgtcttctagtaattggttatttgcagactctgtaagtatatgtactgaacattaagggtttatagccctggggtttgttcctaaatgggctacaaggagttttacacaaaacttttgcttaatgcttttttttgtgtggagaggacccataatccttataatactctcaaagatggctcaggatcccccaaaatgctaaaaatcacggcctaaaaaattcctgctactacatggaatttgcttcatgtagagctcgcccttacctaaggatacctctgcctgctgtgtatcttagtgatggcaagatcaaggttatcaacaacaggcagacaccccgcagtagtttctctcttagagttgaatgtctggcttagtaaaattctgtccattgaaagcctttctttaaaatgtttgctacaaatgaatgcacagcatgagatatttaaaatagtatcatatactttaggatcaaacaagcaaaaaatactctgatatagtatgtgctacataagcgtttttgttacgtgctaggcctctcaaaatggatttgtagaaaatgacacagaatcacagttcatgccctagtttacggtgctctttttgacccgtgttttggaagagtgatagttatcctactgtaaatagctttcctattacaaatagtagttaacatgtcgtgtataaatttctggttttccacaaatatctatgaccacaaatcgagaaagtaatgagttgtgaccaatagttaatatattttctaaatttaaatgtactaccgccacaaataactgcgttttggattattaaactatccacagtaatttaaagtgaatcatcctcttcatttatagctaaattctctaggccaaaagaaacatggattcatgtcttgtatttactgtcagatttacattattttcagagatatttcataaataaccattacgtttcagagctttcttgctgttttcagtagttagcaatttctttttcttttctttcctttttttttctttttttgagaaagagtcttgcactgtcacccaggctggagtggtacagtggcaccatctcagctcactgcagcctctgcctcctgggttcaagctgttctcttgtctcagcctcctgagtaactgggattacaggtgtgtgccaccacgcccagctaattttttgtgtttttagtagagacggggtttcaccatgttggccaggttggtcttgaactcctgacctcaagtgatctgcccgcctcagcctcccaaagtgctgagattacaggcatgagccactgcagccagcccagtagttatcagttttactctttgacactttattgtacttgattatatctacttgttttcgtgtgtgtctgccctaccagctctttttttattgccagttcctgggatcttgcttgatatagtaacaggcactcaatgagttcctgttgaatgaatgaatataaactttctcagtaataacagctgttttaatttttaccttcaatatttacatattgcatgcttttcagttgggtgtttcctttcttgttatagttttacgtgtatgcttattctctttaaaatgcatgttttctaactttgaaaactaactttgactaatgctggtatctctcttatgagaggactttcaggtgatttctattctacatccttgactgcttctcctcagatatgactttgacactcagtatgctttcgttggtgattattctgggcagatcaccctgctgaagcttgaacagaacacgtgttcagtcatcacaaccctcaaaggacatgaaggtaggctatattatcacccaagagttttttttgcctaacttggacatccaaattcagttctctactatgtggattcatgaatgctgtgttcctcatgatctgtcagatttcattttgattggccagatatgggatttagagtgaaaactaagtgaaggtggggtgatgggttcatttcatattgtcgaaatcccttctaaattgcttgtgtggataatactttctacgttgcttacctttttaaattaagttatggctggcacattggttcacacctgtaatcccagcactttgggggccgaattaggtgtaccacttgaggccaggagttcgagaccagcctggccaacacagcaaaactgcctctctactaagaatacaaaaattagccaggcatggtggcgcatacctgtaattccacccctagctactcggaaggctgaggcaggagaatcacttgaacctggggggcagaggttgcagtgagccgagattacagcactacactcctgcctgggtgacagagtgagactctgtctcaaaaaaatagaaataaaaataaaataagttattgtgctgggaagacctttaaaattacttctaactggtaaaaaccttttggaagaattgttgttattactttaaaaaaatttgtcagtttctaagcccctgagcaagacctgataaatacaattagaagaaatgtgtgggctggttcagcctctgcttgggaaacataccctgtgtagggactgagggaaaagaattactgggtggaatttcatttctgtagtgcagtgggttggtgaagctctgtggaggggtttttaaagtccattgattgtattgagtgactcgccacatacacatgtgtaataaagaggtttcattagatgctgtattgggccattcttgcattgcagtaaagaaatatctaagactgggtaatttataaagaaaagaggtttaattggttcgtggatctacaggctgtacaggaagcatggtgccggcatgcttctggtgagggccttaggaagcttacagtcatagcagaaggtgaggtgtgaacaggcacatcacatgacaaaagcaggagtgggggtgtgggggtgccacacacttttaaacaaccatatctcaagggagctcatttactgactcaaggagagcaccaaggggatggcactaaaccattcgtgagaaatccacccccatgagccaactaccaagccccacctgcaacattggggattacagtttaacatgaaatttagaggctgggcccgttggcttacacctgtaatcccagcactttgggaggctgagttgggcagatcacttgaggtcaggagtttgagaccagcctggcaacatggcgaaaccccatctctactaaaaatacaaaaaacattagctggacgttggcaggtgcctgtagtcccagctactcagggaggctgaggcaggagaatctcttgaacccgggaggcagaggttgcagtgagccaagatcatgccattgcactccaacctgggtgacagagagagactccgtcttaaaaaatatatatatatatatatatatatatatatatatatatatatgcgaaatttagaggggacacatgtctaaactatgtcagatgctaagctgtaatggattgcagttttcatacagatcacaagatcacattctgatatatgtcacaaagtacaagctttgaggccatctggtttatggagaactggggagttgctgaaagaatcaatgatggacttatttatgaccatagtaagcgtttcagttgtaacaagttataataaatgtacactatgctttctatgtaatctatttaggtgaaatggagtatatcaaatcaaggaccctgtaggggaaaagaagaaaagagaacagcaagttaaaatagctttgggcaggaaagcagaggcccgtgaagaaaccactttctgtttatgactaattctctcatgacccccaggctcgccagttttttcagggttgctaaaggcagaatgggttctagtaactaccagaatgggtactggttttcatgctgaaagaccgtatttatctgctcttaagcctctaactgaaatggatggcacatagattacacagggtcgaaagtcatgtgaaagtaacccctgaagcctttgcagaatatttgtttctacttttgttctgtttttggaaagtgtatgtgataaagtagtttctgtttgcttttgaatatggcatcattaattttctatatacctaccaaaattattattagcttgtgtggctggttcagttttactaagttgattaatgtttcttctagacaaacagcagtcgatgaacaaggaaaggacctactgaaagatatacctgtagaaagaaagatttccccaagggtttcaaatttgataagttagccaatataaagtatgaaatgtgaagttcagatttttcacataaattacttggcataattatgtagtgtacaacagacttttttctgtggtacttaatgtaatttgcttaaacatagacatcttggggtaaaacacctgccatgtcccagagacccagaataatctagattttttatcttgtgtaggttggacacagtaaactttactggtttttgtcactaaatattagtagcaatttttttcttcattctgaacattttgtatgtaagctactttgtaatttttgtcacagaagaacgaaaaacttctttaaaaatctttgtattacaagcagttttttttttttttttttttttttttttgagacagagtctcactctgtcacccaggctggagcgcagtggtgctatcttggctcactgcaacttccacctcctgggttcaagcaattctcccaccttagcctcccgagtagctgggattacaggcgcctgccaccatgcctggctaatttgtttttttggagagatagggtttcaccatgttggccaggcctagtcttgaactcctggcttcaagtgattcgccctccttggcctcccaaagtgctgggattacaagtgtgagtcaccatgcccggcccaaagtagtttgatgcataattgaaaattgtaatcttatgactgtggataatggtgctgtgtcttctgtatgactcatgatagcatggttgaatgacccgttgtacaccatgaagatacctttttgcttaaagactcagctgctcctagtttggtcttcagctgtcaaatgtatacgtcctgatgtagagttatattttacttctcccctgcctccctctctctctctctctcacaaatccctaggtagtgtcgcctgcctctggtgggaccctattcagcggttactcttctcaggagcatctgacaacagcatcatcatgtgggacatcggaggaaggaaaggccggacgctgttacttcagggccatcagtgcgtgaccacttgtgggggtggggaaagaatccgagttagtggggagctagtgaaaggcattaatagtctgataccactttctgcaaaccccacgttctaagatggcaattatcattgatagggctcagttcacttttaactgctttctgtcagccccgagtgtctgatgtttagtagcaaaaaactaaacaaaacaaacaaacaaacaaaaaaacaaatgcagggctttcttcctccttagtccaaagagcacttgccactttttctctcaaggagtcaccctgttgaaatatctgattaaggcaggcataggatagagatgcaggtgaggactttgaccatggaaggttgcatgtaacatgatactaagctgttgttgagctgggagcctaacttgttttttgttctttgtttttttattctaaaagatattaaattaagaaatgttgtctagtttgacagtggaattcacctgagtgataccattgtatatttaggatcttgccctgtagccctgaaagaaaaagaaatacatcttcaccttgctttcttttctttcctttttggctaggctgcagctgttactataatcacagtcaagctgaaaattagctgaggaaacatattatacacaagtataacaggccaagagcttgtttccttgggcatcctaaggggtagtatgacaggcatgcaggagggacagaggtcttcaccccatctgtgtgtgtctgtgtgtgtttgtgtgtgcacactagtgatctttgtggtgtttgactccttgttcatatgaattgtggtcagtaggggagttatacctccttcgttcttgtttctgaacaagtaggtaaatcttatgcatctgaaagggaaatcatgttgattggtcccaaaaaccatagccctcatcaaatctctggcctacaattcttaatgaccgatttgaaagtagtcatatattttatagaaagtatcattctgtattatgagttataaaatgccaagtaaagtttatactagaattcattttaccatgctaaatagtcagtggtaaaataccacttgctgattttaatgaggagagcaatttgagcctaaatgaagacagttcctgtgtttttccgcatggagacaagtgactgttgtgtgtgctgtttgcagtgacaaggtgcagtcgctgtgctaccttcagctcaccaggcagctcgtctcctgttcctcggacggcggaattgcagtgtggaacatggatgttagcagagaagaggtaagagacaagggcaagtccaggctgatcgggggagacccccaagaacctggcttcttcttggcttttcaccccgcaagctgtaaatgctggtccaggtgcagacagtcccagcttccccttctgctaatgggttatttctgacaaggtcctttgtgtcattttgcattgcttcctctgctcatttgagagtttctaccaatgacatgcagtatatacaatcagcgtttaggctggttctcagccttgagcaatacactgagataacactttgagacagatttctggcatatccagtgatttggactgcatagaggtcctccgaagcaccattgtggtcccgtagcattcctgtaggaaaccctgagagatgcatcagtgactgctgtcagggacatagctaaacacttgacaggtttctgggaaaatatatttccatttctctgcttttacttcccattgagttctagttcactgaggccatgtcgacatagtattcttttcaggtgacctaatttctaacttggttcggccactaactagttgtgagaccttatttggttaagtgccttaatttctctaagtatctgttccctcctacataaagtggaattgtggaatgaaatgacttctcagttgtcttccagttctttagacagacagtctaattgtctaaacaatctctctctctcttttttttttttgagacagggtcttgctttgtcacccaggctggagtgcagtggcatgatcttggctctctgcagcctcaacctcccaggcttaagcgatcctcccacttcagcttcctgagtagctggggctacaggcatacactaccatgcacagcttatttttcaattttttttttttttttttggtagagacagggtcttgctgtatcgtctaggctggtctcaaactcctgggctcaagcaatcctcctgcctcagtctcccaaattgctgggattataggcatgaggcactgtgtacattctcttttttaaatattttgaagaatgctgcagtgaatattcttgaccttgtcattgtgtgattgatcaattatttatttcagacaaatttctggaaatagaccttctgggtccaaggatatatacattcttaaggctttttatagatgtcgtcaaatgatttccaatcaaggtttccattctcatctctgcctgtactgtcattatctttcttttctaagtgacatctacaacttacgatgttgttagcaaaaaagttgattccagagaagattttagaccatgagggatgttaatgacttatagtttaacttcagaaatatttgttgggcacctacagggtgtccttacagtcgggaaactcaagtgaatgtatttaataaatggcttattgatattgcattgcagtacctactgtgttgcatgacatcacatgatctgttcagtatcctgtcctttatggcaatatgttgttcagtgtgctgtgcaccattgtaatagacattatgcgttgatgcagaattcccaccagtccctgcacatgtgtctgctttgtgttgtctctgattctttgtgagtctgattctcactgattaaaccttcatttttagcatattccagtagaagtgatcaaggggctttcatctattttttttttaaatggtgacattactcatttccagactttatggctactgtacacaaagatacttgcccacaagaaatgtgtaatctagtggaagaaatagactaccctataaataataaaatgcaatccataatacagagacgtactgattgtgagattttttggtaactttgtaagacaagtcagatagaggaaatttggattacatgtctgctggttaatttctctttttgaattttctaaaaattatttggtaaggcttagaatattttattattaaacacagatacattggctcaatagtataggatgtggccagcgcagtggctcatgcctgtaatcccagcgctttgggaggctgaggtgggtggatcacctgaggtcaggagttggagtccagcctggccaacatggtgaaacccagtctctactaaaaaatataaaaattagccaggcatggtggcaggtgcctataatcccagctacttgggaggctgaggcaggagaatcacttgaacccaggaggcagaggttgcagtgagccaagcttgcaccactgcgctccaacctgggcgacgagcaaaactccatctaaaaaatatgtatatatatatataaattataggatgcataatactatatttgcaaagatttattcgaactgtgttttacgtttatcagctactagttatatgcagcaagaaaagctagtaaactgttcttggctcttggcctattatttttcagtcttattctgagagagcagaaaactcagagaaaggctgtattccctggatgatgaggggaggagactgttggtgcccagcactgctggtggctttcccgagggtttcacaacttagattttaacctgctctttttatcgttggtaaattcttttagaaaaagtacttagaaagtagaagtgggattcctaccgtcaaagtgcatcactgtggagtgtatttctctatctagggaaagaaaaaatagtcccatcaatcaaggcatttcctgtgtgcacaattcactgcgtctgtagaagagacaggaaggcaaattgtgtcaaaaagatgcattatttttagtgggtttttttgtttgtttgttttttaataactgagaaaatgtattgcaaggataaacaggctataatctataaggttctgaccctgccttaggatttttgggctttttttttttttgagacggagtctagctctgtcactcaggctggagtgcagtggtgcgatctcggctcactgcaaccttcgcatcctagtttcaagtgattctcccacctcagcctcccaggtatctggggtgacaggcttatgccaccatacctgtacctggctaatattttatatttttagtagagacagggtttcaccatgttgaccaggctggtcacgagcccctgacctcaagtgatccgcccgcctcagcttcccaaagtgctgggattacaggcatgagccactgtgcctggcctttagggttttataggactttcttagaccagggcatagaggattgatcccagatcctctagctctgcaatgcttgcctggaatttctctccaagtcccctgtcaatactaactggagcatttactacccactgtggcttcaaccactacgctgtcgagttggaagcagatttgcttccctgccagatcataatgagaagggatccttttttggaagtaggcacaaaatataaatgaggaagtaacaataattagaatgaatcttcttgaaaagagaactttattttaaaactagtaggttacagaatgtatagcattttatatactagtgcagtgtgacgagtgcagcagttagtggcagtagagcaatggaatttattcttgccatatctttgttcagatttggcaggtgcaaaaagatggagaaaagagagtgaagcaattataataactgattaatactctctcttgctcttctcagcacaaaacgaaagcttcttcttagataataagtataaggatggctcatgttagcttacagtgtaatgctatattctgagtattaagtgaaataaagttaggggtatctcttatattaaaatatgttctaaaaagctatttgtttctgattttgattttaatttgttatctcaaatttttttaagcatatatttttgtcactgcaacctctgcctcctgggctcaagcgattctcgtgcctcggtcacctgagtagctgggactgcagacatgtgccaccatgcctggctaatatctgtatttctagtagagacagggtttcaccatgttggccaggctggtctcgaactcctggcctcaagtgatccacctgcctcagcctcccaaagtgctgggattacagatgtgagcaactgcgcccagccaaagtaatattctttcttaaacctgtaaacagaatcatgctccctgaggcaagagctcagatctgtaggttgccctagcccaggaccatgtttggagacccccataggtagaagtggataggcctcatatacagaggctgtgtggagcatagggatacacagagagaggcaggctggactcctggatctgcccaggatctgcgtgtactcattgacagttgctttaatctctgagccagtttctttgcctgtaaaatagggatagtgttgctcggtatctcctaggacataatgaaaattaagtagaataaaaaaacatgaaacacttggcacattgcctggacttagatgtcacttattgtatgccacgtagtattctgaacacttcccaaatattaactcacttaatcctcacaaccttatgaggtatatactactgttatcccattttacagatgtattagtccattctcaggctgctaataaagatatgcctgagactgggtaatttataaaggaaagaggtttaatggacttacaattccacatggctggggaggcgtcacaatcatggtggaaggtgaaggaggagcaaagtcatgtcttacatggaaggcaagagggcatgtgcaggggaactcccctttgtaaaaccatcagatattgtgagacttactcactaccaggagaatagcatgggaaaaacccacccccatgattcaattacatcctactgggtccctcccatgacacatggggattattacaattctaagtgagatgtgggtagggacacagagccagaccataacagtggataaggaaacctaggcacagagaagttgagtcacgtgcctgaggacactgctgacaagtggcagagccaggattggaaggcaagagatctgactcctagactttgtgacgacttgctacgaaccacttgctatgaaccacttgctatgactattagaaatgaattgagaggccagacaccgtgattcatgcctgtaatcccagcattttaggaggctgagacaggtgaatcccctgaggtcaggagttcgagaccagcctggccaacatggtgaaatcccaaccctactaaaaatacaaaaaatagccaggcatggtggcagacacctgtaatctcagctacttgggaggctgaggcaggagaatcacttgaacccaggaggcggaggttgcagtgagccaagatcacgccattgcattccagcctgggtgacagagcgaggctccatctcaaaaaaaaaaaaaaaaaaaagagttgagaatttaggccaggcacggtgactcacgcctgtaatcccagcactttgggaggctgaggcgggcagatcacttgaggtcaggagtttgagaccagcctaaccaacatggtgaaaccccatctctactaaaaatacaaaaaaatagctgggtgtggtggtgggcacctgtaatcccagctactcaggagactgaggcaggagaattgcttgaacccgggaggcagaggttgcagtgagccgagatcatgccaacgcactccagcctgggcaacaaagcaaggctctgtctcaaaaaaaaaaaaaaaaaattgagaatttaaaaatggcttatctgtatttatttttaaaatccttgcttgaaattgaatcacttgaaaacattaaaatattaggaaatccattgatgtactgcttaacagacattgctggagatagaggccttttgtgttaaaggaatgctctgggtaattgaaacataattcaaatgccagccccttatgaagacaatcactttgatgaaaatgtacagctgggcacagtggctcacgcctgtaatcccagcactttgggaagctgaggcaggcagatcacttgagcccaggagttcagcctgagcagcttggagaaaccctctttgtacaaaaaatttgctgggtgtggtggtacatatctctagtcccaactactagggcagctgagaggagggaggatcgcatgagacagaggttgaggctgcagtgagccatgattgtgcccctgcagtccagtctgtgtgacaaagcgagaccctgtctcaaaaaaaaagtgtaaatttaatgtaatttactaatttcttgatgatgcagtttcaccattctgaccacaaatgttgcatgtgtgtttcatggtaatacaattttgtatttgtgtagaaaactatttcatgtaggactgagaacgtttttcctgaaactatgttcttgccttcaattctacccaccttagtccctttaatctgttatgtcctaggaaacaaattttaaaaatttgtggatcaaaccaggccaataatgtcataaatgagaggctaaggggggaaaatgcagacatttcattcagtgatttttctttattttttttaaccaaattttaactcaagaaaaatagaaaatttaatcctccctctgttttggttgagagcgagatttctgaattccagaccagtaaagtttaagatttttattttaagtaatacttaatagacactgtgtgttcaaggaaaatagaaaatccagccattaactgtagacaaaagaaagaagtgaatttctaaagcactgagcaataatgggcaagtttgcaagtcaggtcttttttacacttaatgtttttgtgcactaaattaaacatcgaattccctgctgctaagtatggaaagtataaacgggaacaaactttcatctattagtctgtttccattaaagccttcattgtgtcgtccttaaagcatattagcccttactgaagttgtttggagatggcttagtgaatacatttttgtgctgctttttggtccatgtgactgtggttttgcaagagttacgcttgggcatgtcccagacataagaactttccttcttccggcaattaaataccctgtgccattggcagcacagcctgctgtgtctctcttagggacagtgtccccaggtagtatccccacacatcaccagcctccatcaccacctgccttgcattgatcacagaaacaaagaagtaattccatatcaagaaaataatctttctcacatagatacacatctctttattcttctttcatcccttctcatctccaacattccccagttatttaaggaaacctttcttctatctcagcctatttcagtctacttgtgagtgccttctgcacccccacctcaaaaaaaggcctttctaatgtctgttatatgtagaaatatttctagtgaccgatctaaaataagaaataggaaggccaaaagttttgatgcaataggagagaaaatgaagaactaggggcacccatcgttcaaaccaccaaatatattaatatatattttagaaaaaatattttctactatttttgttgcacatatataatgttaagtgattggggttaaacaggctttttttttttttttttttttttagacggagtttcactcttgtcgcctaggctggagtgccgtggtgcaatctctgctcactgcaacctccacctcccagtttcaagcgattttctctcctcagcctcctgagtagctgggattataggcataggcatgtgccaccacgcctggctaattttgtgtttttagtagagatggggtttcactacgttggccaagctggtcttgaactcctgacctcaggtaatccgcctgccttggcctcccaaagtgctgggattacaggtgtgagccactgcgcccggcctaaacaggcttttagcaggtttgtcttagaattgagtatagtttgtaattttttgtttagagaaatattttctaagtttttattttgttttgttttgttttttgagacagagtcttgctcttgtcgcccagactagggtgcaatggcatgatcttggctcactgcaacctccgcctcctgggttcaagtgattcttctgcctcagcctcccaagtagctgggattacaggtgtgcgccaccacacccggctaatttttgtatttttaataaagacggggtttcaccgtgttggccaggcttgaactcctgacctcaggtgatccatctgcctcggcctcccaaagtgctgagatgacaggcgtgagccaccacacctggcctattttctaagttttttaacaaattaattttgagactgcttcctctgtttcaacaaaaatgcattaaaaacctactgtgtgacaggctgtggctagatcaagatgaataataccaaaaagtaactcattggttagaggggagaagaaacgtgcaccaagagttccagtaccagagcttgctgctcagtgaagctgcaggatgcctgtgtggacccaggagggagggacgtgctgctgtggctgggaagggaaggggggcaaatctgccggcatagtccctacccagagcaactaggtgatggggttttgtcagatctcttctgttagtcacctgtgaccccgcaagcctttccaagtggtaggtcaccagattctgctgcatgcactgggtttctactcaactggatttagagttcaaacatctttggcataaaaaagaaatacataaagacaacccttaagggttcacaataaaaactgatttactccctcctatctatagattacaaattgaacaccctgtaaccatggctaaaattgccatgattactcggcacacagttaaggctgggcgcagtggctcgtgactgtaatcccagtgctttgtggggctgaggcagaaggattatttgaagccaggagttcaaaacaagcctgggaaatatagtgagatcctgtctctacaaaaaaataaaaataaaaaattagctgggcatggtgacactcacctgtggtcccagctattcgggaggctgaggcaggaggatcatttgagcctgagagatcaagcttgcagtgagccatgttcacgacactgcactcgagcctgagtgacagagtgagaccctgtctcaaaaaagacccccccccacacacaattaaacataatattgaatatgacaactagctagaatatttcgtggaattaaaaagaaatgctaactggccgggcatggttgctcatgcttataatcccagcactttgggaggtcaggagtttgagaccagcctggccaacatggcaaaaccccatgtctactaaaaatacagaaattagcctggagtggtagtgcatgcctgtagtcccagccacttgggagcctgaggcaggagagtcacttgaatccaggaggcagaggttgcagtgagccaagatcacacatactgcactccagcctgggagaccaaaaaaaaaaaaaagaagaagaagaaaagaaatactaaccttggcaaggtctagaactgttgtattaattttgaaacatgggagtaaatatagacacactgatggtggctttgactttctgctcccccaggctcctcagtggttggaaagtgattcttgtcagaaatgtgagcagccatttttctggaacataaagcagatgtgggacaccaagacgctggggctaagacaagtgagtagccactgtcgagtcatctctggcttgattgtgtatttcactatttgcatacttaatctggggtttttttgaaacacactttgtttttgcaaatgctattaattcctacattttctatgtctttatcattgtgtgactaacaatgaggaagacctttcccagggccagtgagactgttacctcacttttccattgcttgtcctgtattggaaaggcaggggtgcgtagaaaatcctgagagcctatttttaaacagataaaagatctttcagtttaagactattacttattaaagtcagtgttttatgctagccaagaacaaaattagaataaagtcatacagttatataccttatgctgtcacaaacagataaaaagtaataatttagtcctcacttgaatgcctgaccctatgagttttagattattttaaattgttcccttataagcatacctggaatatttttattaagcatgttttgagtactgttttttaaattttttaattaaagaaatatgttccaaatagcctgtagattttaaaggtgctgttaaaggattcttgtaatactaaagttctacaaaaaaaaaaaaaagcaggtaagtaaaaaagaatgctgattttattccttttattattggttgcatctctatgagcgattagcctaaagtttgtatgtgttaataaacttttttggccctgcatggtggctcaggcctgtaatccctgcactttgggaggccgaggcaggtggatcacccgaggtcaggagtttgagaccagcctggctaacatggcgaaaccctgtctctcctaaaaatacaaaaattagctgggcgtggtggcggacgcctgtaatcccagctactcgggaggctgaggcaggagaatcacttgaacccaggaagcggaggttgcggtgagccaagatcacgccactgcactccagcctaagtgacagagcgagactccatctcaaaaaataaattaattaataaataaaatctaaaaaattttactcacagagatactccacagtaaggtctcatatgagactggcaggcaagaagggaattattagtgctcagaccattataaagctctgaaatagcacctgagttctgtctgtcattagccaagttctcacaatgcatggctgatggtaattagtgcagtataattaataggtgaagtattccctacttctaaaggaaacacagagaaatggattttacttccatttattaacagttaacagaagagagaagaggtgctggtcactaaacttttggcggtaaaagaatatgtcaaaatcagtaataataattggactattttgtaatgttcttgaggcttatttccagaatcacagtttgagagattttagaaaatagcaaaatacatgattatgggcattagtttcttaatgagagcatagtgcatttaaaacttattttagaccgggtatgatggcttatgcctgtaatcccagcattttgggaggccaatgtggaagggtggcttaagcccaggagtttgaaaccagcctgagcaacatgatgagaccccgtctctataaaaataaataaataaaacttattttaaaaccctttaggctgggcatggtggctcacacctgtaatcctagcactttgggaggccgaggcaggaggatcacttgagcctaggtgttcaagaccagcctggacaacatagcaagaccctgtctctgcaaaaaaatcaaaaaattagccagacatggtggcagacacgtgtagtgccagctacttggaaggctgaggtgggaggatcgcttgagtctgggaggtcaaggccgcagtgagctgtacgccattgcacctttgcattccagtctaggtgacagaatgagaccctgtctctgaaaaaaaaataataataatgccttttttatgatggaggaataaatttttctttccctaaatctacagtgattaggctcctaaatgaactaaatttggtgttaataatattgtttgttaacatgtagacagataatatgaatgaatgaaaagcaacatttgaccagtacagcaaagttttttggaaatccttgactagtgtcagaattgtctatcttgtgagtgttaattgatacattgaattggggtgattgcaattcaaggcatatcctccccgctcctgttgccctactttagagggaaaccatgtgctttaaagcaaaagctaggccaggcgcagtggctcacgcctgtaatcccagcactttgggaggctgaggcaggtggatcatgaggtcaggagttcgagaccagcctgaccaagatggtgaaatcccatctctactaaaaatacaaaaattagtcaggcgtggtgacaggcacctgtaatcccagctacttgggaggctgaggcaggagaattggtagaacccgggcgccagaggttgcagtgagccgagatcacgccactgcactccagcctgggtgacagagtgagactctgtctcaaaacaaaacaaaaagcgaaagctaacaccctgttttcctcctcccggtcacctgtgaagcatcactgcaggaaatgcgggcaggctgtctgcgggaagtgcagcagcaagcgctcaagttacccagtcatgggcttcgagttccaagtccgggtttgtgattcttgttacgactccatcaaagatgaagagtgagtgtttgcatatttttgtctcattgcctcttattacatctgtctaatggttctctgaaatgtgaagagcttcagaagtgataggatatgtttagccatgtgtttgtttctcctgaatttcctaagccattttatttgttgtttgttttttgagacagagtcttgctctgtcacccatgctggagtgcagtggcgtgatctcggcccactgcaacctctgcctcccgggttcaagcgattctcctgcctcagccacccgagtagctgggattacaggcgccccccaccacctggctaatttttgtagttttagtagagatggagtttcaccatgttggccaggctggtctcgaactcctgacctcaagtgatctacccaccttggcctctcaaagtgccaggattacaggcgcgagccaccgtgcctggcccctaagccatttttgaagagaggacctgccctagctttatgacttaagaccatgactatgcatcttaagttgcccctctgactgggcagctttctcctgaacacagtgaggaatgctaagttacatggtccagtaactgagtggataccctgagcccccgcatcccactggctgctatgcagggataagtccatgcacctgtggatggcagtggttgagctggttctctataaaagtatccagtgcccagacctttgttcacacatgcatgtaaatttactgggaaaactctagagaccaatgttctttcttccacagaaatctggcctagcagtctattcttaaattgctctttgtgtgtaagacacatctgtttgataccccactctgccctgacttttaggcaaatccgttaggacagaaccactattttctttccttccctttgaatcatcttttaaagcagcagaggcaaatgttggcagaggtccacattggaaagctagtgcatcacgactggtgttggtaaatgaactagtgatgggattggggcagctgggctttgaagcgggtgctgtaagaggcactgctcctgtgcatggcagaggtttcagggaaaacggcagctctctgatgttttgcccatgctgtatgattttattcaatgcagttcttcttttatattgaagattcttgtttttatatctaggaatgtatcagcctttccagtaaaaaaaaaaaaaatcagttattttgggaattttataaaacaatcttgtgatttaacatgctttctgtcatcattaaattataaggttagttttcaaaaccatagccacaattttaggagcaaattttaacactattatcataagcatttactttcttttttttttttttttgagactgagtcttggttgatcacctgggctggagtgcagtggtacaatctcggctcactgcagcccccacctcccaggttcaagcgattctcctgcctcagcctcccgagtagctgggattacaggcgtgtgccaccacacagagctaatttttatatttttagtagagacggggtttcaccatgttgaccaggctggtcttgaacccctgacctcaagtgatccacccgtctcggcctcccaaagtgctgggggtacagacatgagccactgcacctggccatatttgcttattttatgttgctaaaaaagcttaccccactagctctaggtacagtcaagtaaattttcagtgatctcttttctcttgttagtcggacttctctagcgacctttcatgaaggaaaacataacatttcccacatgtccatggacattgccaggggactgatggtgacctgtgggaccgaccgcattgtaaaggtaagctggctaattgtctgtcagcatctcagttgagattgcctattaccatgctgtgaatgtgcaggagacagtcactctttctgactggcaagctttataagcaaatgattgccagtttaaaaccttgagtaacaaactgcttgcctctgagtttccatgcattcattggtggtcagtcccagtggcacctccctctgcagtgtctgtctggcagagtgagtctggcaccctgtatatccctatgggtggagttgacctctgggttctcccttgctggcctgggtcctcacccctgacccatctcaagacattcctacgcttgccaatgttccttttcatcctgggcagaatgcgtcctcagtataaggaataaccacacattttaacaattaaatccctgggtcactaacacataaattgaaatgaagtgttttatacttagtaccactcttttttttttttgagatgggtcttgctctgttgtccaggctggagtgcagtggcacagtcactactcactgcggccttcaccttccaggctcaagcaatcttcccacctcagccttccaaagtagctagaactacaagtgcctgccaccaggcttggctaattttggggggatttttcatagagattgggtcctactatgttgcccaggctggtctcaaactcctcggctcaagcgatcctcccatctcaggctcccaaagtactgggattataggcatgatccaccatgcatggcctaagtaccactcttcagtggtgaaactgagatattctatattcctgatgggcttttctaaaaaaaaaattgaatttatactaaaacattattatgatttaatttttatgtgtaaagacactacctatatgctttattcacattttagtgaactacattgttttatctttctgaaaatctttttgtttgagacaaggtctcgctctgtcacccagactgtagtgtagtggtgtgacctcggttcagtgcaacctctgccttctgggctcaggtgatcctcccacctcagcctcttgagtggctgggaccacaggcatgtgccaccacaccaggctaatttctgtattttttttggtagagacaaggttttgccacgttggccaggctggtcttgaactcctgggctcaagtgctacacccgcctcggtctcccaaagtgctgggattacaggcgtgagccaccgtgcccagccacctggcctctttctataaatcttaagaaggtgttatgaaagaggagaatgagaaaattcattaatttgacaccttttcaggtttaacagtcgtttgtttgtctgtgttgactcttgccgttagacctggttatcactgctgccttttctgcgtttcttccttccttgtagatctgggacatgacacctgtggtgggctgcagtctggcgactgggttttctccgcactgatctgagagctgggcggcgtccacacctaagaacagcagctccaccaaatgaagtccctctcacgcagctccacagcgctgtctcgtgaatggacagtagccacttacaaacaaatcaacatttttaaaaagaaaatgtaaaggtgtgttttggggcatttgtggaacttacccatggggactaatatggaaaaggtctgtccatagtggttccctgaagactggaattacttcagcaaaacttccccatgaacagctaatgtgtagtgaaagaatgagctagcaaatgagttttagcggggacaaaaaatcaaacaaaaaagtgaatgcttagaaccttctcaaagcagtcacaagtacagacacttcacttagcctagggggccttccagggttcttgtggctgttgtcagagcaggagctgggggagggaagacttgttctctctttcttgaggggtggcattaggaacttacgaaaccagagacctttccctatgacttggcagtatgtgaatatcctctacacttagttattgataaacttcttaaagagatctgttattttcaggtagtgccataatctgcacttagcattggcttgcttcagttgtttctcttcccagccagtatgccacaggtgaactttcgaggttgtcattaagtaagttgtgaaatttctgtaataacaaaggcagtccgcattcttccctttcccccaaattcctagggcaaaacttttttatggtgctgttaacatgggagtcacacaagccgcctgactttttctcattgccattagtaatgactgatggaaaacccagccaccactgtgatgcgaaatgatcagtctgttgcctgaaacagcccagtcctcttaactgaaacagcattctacttcttgttccaagatgagcctctgcaatattctggcaatttaatataccccctacaaaagcactccacagcttttacactattttgactttgagttataactagtattattcatgttttcataaaaagaagttagtgacccagagctataatcatccatcaagtcttccacaataattcccaactcataaattgctttcctaacaactagcaaaagctattgttcataatggcatttctaaagcttttgggcactgtgtaccaggatgaggaagagaagaaatgaggagcctgtcttttaatattccagtatttgtgtgtttgattttttttgacaacagtacatatatctatttctctagggatatggaagtaagtggagaagggcctacctttttaaaggacaaatataaaaatagcaacagtatctttgctaatcttactaatggatattgattaaaaaaaaaaaacctcagtactgcatcactgtgttgggatcgtaccaggacaatagggtcattccatatgataaaactaaaggactaaatttgttttataatgatgtcttagagggactgaaaagtttaaggaggcgatcaaactaaaatgtcttaatggctgtgtgacacacgtaaggaaaggaaagggggtcacgcacatcatgtactggaatgatctgcattaaacattgacttgtcttcagaaataagactgaagggttttgttgttccttagagttttcgtgttacatcacctaaagagatttcttttaaaaactttctagactctttgcaaaatgtatattactaacatagtttggaagaaaaattgagtagtggtaagttttgttcaagcacaatgttgaatgttaagcttcctgtattaattttagttcagttaatggttcagcccatacaaaggtgctatcctagggattttatgaattcctgaaaggaaaatagaatatgatcaattccttgccctgtggaagagtgcagaactgtggttttgttttcctttgacttctgtaaaatgtgaccgtttgacatctgtggtagattgaacggaatatcacagctgctgagtttactccatagctttcaaaccttttttattttaagaaattcttgaaaaaccctatgttccatgggaacataaagttattatagtgcctcctaaggggttaatataaatcaaggaggaagtttatatttaaggaagaattggagtgacgtatcttagaaaaggaaaggctgatgtttccatatagcttgctctccaccaggcctatcatttttctttttagagacaaacgtgacaggctagtcttgtctctctcatatgctaggtagcaaatggggtgatatttttatagaagtgggcaaaaattattttctcaattttactgagtaggcacagaagaaaagtacagataggctgatggttattgccttattttgactgcatttctcttaaatggatcatttaaattagttcttcaagtaacagtttactggttgttccattcctgaatatgcaggctaatttgtacagatagggattaaggaatacagactattagagaagatccttatatttacatctagtatatatgtggtaaggaaatgccgattcttcattataaacaagttttaaaattgttctttcttagttcaaatgatagcaatacccctatagcattaggtagaaacaaattattcattacatcgtaaatctctttactatgtcctagctctgtcctgctacctaaaggatataaagaaatattattgctctagaatgtattactttgttctcccatgaaagaattcagtttgttagtacctatatttttaaactggtgaaactgacccaaatatgtaataaataccatagtagctcagacccaaggagatatttttctaaaatcagttttcgttaaagtacttctacttccgttattggatatggtatctcctaaagtgtaaaaaaaatctgttactatatagtgataaaccatctgctcatcgtaagtgtaaggcttaacaaataagtaatacatgctatatttattcaagtgtctattgcttaattgttaattgtgagcagatttattgaatgcctattctattttctgcagtttacaatacaataactctttgagtaagttgaagtttaattgtgcaacaaatttgtattagagtacaatttaaagtgtttttctctatagccttttttgactggggaagcaaggggtaatgttaattagtacactttgttcttgtactagctatgtttctataagatatggtgccctgtgtatcccagagatgctagaaaactgttctttgctcctatttgtgggttctgtttttgtgggtttttttttttttgagaaaatgtacacaataaaacattccttgcttgttactgtgtttgcctaatatcacttttgttgtagtcagcctggacgtagggcaataacagtagcaaccatttattcagcaccctctgtgtgctgggtgctttcactacattatcttactcaatcctggcaacacttgggcaaggcatcattcctcccattttacagatgagaaaaccaagagaatgtgtgttattaagtctgcctttctgtcttgaaaacacatgccttcttcctgcctctggcctgaatgtgctagcatgtcatttgtgctgtctgtaagggtggtgggtattactgtctctgccgcttgaggtagcagtcagcatagtgcaggatatttaggcgctctgactacacagagctatctagtgataacaagatcaagctctacttctcctcagcagctcagttttgtgagtgaacacgtgtggttcagacccagaagaactgatacctcaactaaaccagagattgatttagaaaccagaaaggcagtgaatagtatgtttttcaaaataaatatggctttcttttctctcatcatcaaaatattatcttattataataaaaagaaaaggaagctgggcgcggtggctcacgtttgtaatcccagcactttcggaggctgaggtggatcacgaggtcaggagttccagaccagcctggccaagatggtgaaaccctgtctctactaaaaatacaaaaaattagccaggcatggtagcaggcgcctgtaatcccagctactcaggaggcgaggcaggagaatcgcttgaacccgggaggcggaggttgcagtgagctgagatcgtgccactgcactctagcctgggcaacaagagcgtgactccatctcaataaaataataataataaaaaaggaaaagaaaaagatagaaccaaaaagtataaaacaagttgtttttaaaatcatctcatcccaccacctggagaaaacaccattaaacttatcctgtatatctttccaatgtttttataaatgtctccttacatatgtaacacacacttagagatacattgttttaatgggaccatacttgttttcccacttgatacattatggatagtttgcccgtgtcaaaaagtagagctccatgttagtattttttatggctgtgtagttgcagtagacatttgctcctgccatcatctggacacatgttgggatcccacgtctccatttgaggtcaagaaaggcccttgtaacttgctttagcaaatgaaacgtgggcagaagctctttactgcaggtgagcctctggtaccatgacactttcttccatgcccctcatgaagcatgtgttggtgaagtgtgacgctaagccattctacagatcacaaccgctctaggactgcagtggactttgcatgatcgagaaataaatcattgttttagcccactgtggtaggggtgtgtggtgtgtgtgtcagggatgggagagtggctagggatttgtgtgtgtgtgtcttacagcataatactagcatgtatagcagtatcccattgtcctatgtggctaagccatcatgcattttaccaatctcataaaattagattatatatgtttagattatcattgtaattaaaacactaaatatttttcaaatttttacatttaaaaatatacaagctcagcatgcttatatgtttatcttgcccacttttccaattattttctgaggataaagtcttaaaaagtgggaattgctaggtcagaatatgcatgttattaagtgttttattgttattgataatatcctcacactattgccaagatttgaatttgtgtttttggataggcgataaaaaggtatctcttagtgtctgaatttatggaatggcagttactttacagtgaaaataatatcagtttcccaagtagaaaactggaaattctgaggccaaagtccaacctccttttctagtaaccctgtattgcaaaccaattatttacttcctatattctctaaagaccagtgattcttagttagtgttttatgataccgtattttctttattttgaaattttttaaaaaaattatgctttaagttctgggatacatgtgcagaacatgcaggcctgttacataggtatacacgtgccatggtggtttgctgtacccatcaacccatcatctacatgagttatttctcctaatgctatcccttccctagccccccactccccgacaggccccagtgtgtgatgttcccctccctgtgtccatgtgttctcattgttcaactcccacttatgagtgagaacatgcagtgtttagtttgctgttcctgcattagtttgctgagaatgatggtttctagcttcatccatgtccctgcaaaggacatgaactcatccttttttatggttgcatagtattccattgtgtatatatcccacattttctttattcagtctaccattgatgagcatttgggttggttccaagtctttgctactgtgaacagtgctgcaataaacatacgtgtgcatgtgtcttaattctttctagaaagtacattttattttttattttttgagatgaagtctgactgtcacccaggctggagagcagtggcgtgatctcagctcacttcaaattctgcctcccgggtttaagtgattctcctacctcagcctcctgagtagctgggactacaggcgcatgccaccacgcctggctaatttttatatttttagtagagacaaagtttcaccatgttggccaggctggtcttgtgatctaacctcaagtgatctgcccgccttggcctcccaaagtgctgggattacaggcatgagccaccaccccggcctaatttttatccaaaatagattaacattaatgcacagcaaggaatggaggggtgtcccaaaattgagctaataaatttgaaagaacttgggactcagtcttctagagtatggctgttaaacctatgatgctcttaaaggactttgttacttaaatcctcctaatagggatattatctcttcctataatattgagaatagccaatagctttgcagactctaccatgaaaatcaaacacaactaataaaagttacaaaacaatcacatgattttagtatttcaaaactccaggtatcattcatttattaaataaatgtgatattgagttttggcaagataatagcaaacaaccagattttttaatagctgtagatttctttggttaattctgtgatattaagttttgcaggcttgcataatttgttgaattcaaaataccttaactcgaccaggcacggtgcttcacgcctgtaatcccagcactttggaaggccgaggtgggcagatcacctgaggtcaggagttcaagaccagcctggccaacatgttgaaaccccgtctctgcaaaaatacaaaaattagctgggcatgatgacgggtgcctgcaatcccagctactcagaaggctgaggcgggagaatcacttgaaccccggaagcggaggttgcagtaagctgagattgtgccactgcacttcagccggggtgacagtgcgacactcggtctcaaagcaaacaaaccttaactcagagaaagaaaaattgtttttgaacaacttcacatttatttaaatgattcttctagatccaccacatgcttaaactcttgtgagactcgacccatgcatgataatggcctgtaacctgcatttctgctctagcttggaagcctctggaagacaggggctggtcttatcctcagtgtccatcacacaagacctgctcagtccctgatctttagacctttgatttagatcttgttttcatttattccacagattggagagcaaaacttgatatgtttcttctcatgctttgaaaatgccactttaggctgaatgtgtggaaagttctgttgtgcaattttcctcaagctgttggggatagaggaactcattaaagagcaacttttataattaggaacatctggttgaatgaacccactgtggtgttaggaagaaagggaggggagaaagaaaacatatggtcaggcagaaatttgttcatttctggagttacctgtataaaaacaattctttgctcaggtgatttgaggactttatttctaagttattcatgtactttattttttatttatttatttatttttgagacagagtctcacccttttgctcaggctggaatgcaatggcgcaatcttggctcactgcagtctccacctcctggggtcaaacgattctctagcctcagcctcctgagtagctgggattacgggcatgtgccaccacatctggctagtttttatatttttagtagagatagggtttcaccatacttgccaagctggtcttgaaatcctgacctcaagtaatccacccgtctcagcctcccaaagcgctaggattacaggcgtgagccaccacgcttggcctattcatgtactttcatatttcttgtattgtcaggtatatattatctgttatctgagggagtcatatcagccgttatctgtccaacgaatatcaagttgcaactgtgcgccgacaacataggcgagcttgccgacatcaacctcggcacaggcctaagggcactaccttccaatagaccctcagaacagccgcttctcaccattctgctgctactaccatggggcagcccacactcatctattccggcagccccctggattagtcagggttctttagagggacagaactaataggatcgataaatatatgaaggggagttgactcacacgatcacaaggcgaagtcccatcatgggccgtaataggtctgcaagctgaggagccaggaagccagtccaagtcccaacctcagaagtagggaagccgacagagcagccttcagtctgttgctgcaggcccgagagccctggcaaatcactggtgtaagtccaagagttcaaaagctgaagaacttggagtctgatgttcgagggcaggaggcatctggcacgggagaaagacagaggccagaagattcaggcagtctaggcctttcatgttcctctgcccgcttttattctagccatgctggcagctgattagatggtgcccacccagactgagggtgggtctgcctctcccagtccactgactcaaagttaccctcctttggcaacaccctcacagacacacccaggatcagtactttgcatccttcaatcaagttgacaatattaaccatcagccgggcatggtggctcatgcctgtaatcccagccctttgggaggctgaggtgggtggatcacgaggtcaggagtttgagaccagccaggccaacatggtgaaaccccgtctctactaaaaatacaaaaattagccgggtgtggtggtgtgcacttgtaatcccagctacttaggaggctgaggcaggagaatcgcttgaacctgggaggtggaggttgcagtgagccgagaccacaccattgcactctagcctgggcaacagagcaagactctgtctcaaaaaaaaaaaaaaaaattaaccatcacaccccctaaccagtctccttgttcctgcccctgccactatcagcttgttctcaatgctgctaccaaaacgtgactcaaatcatgccattcctgtaccaaaaaaaaccttcacagctcccatcccattcatagtggaagttccagttctaaaatgtccgtcattctctctctggcatctctcactagtctccctgctgactcctatcaagccacatagttctccgtgttatcctccctctaacttctataaggacagggaatttgtgcctacaacaacatgagcacagtgtcaggcacatagtaggcacttaatacataatactgcttgtatatgtagaatttgggtgctatatgcataaatgaaaaggaaattatgtggatttgcttagggagtgagcctgtagtgaaagttttgaatggctgttcccccaccatgattattcctacccatcccactacacctgccaagctattgtcccaatctccaaatgcggaaaggagcatttaaaggaaggtttaggagagattataaaggataaatacatgacggatgtgatgagatttttcttgtctttctaaaacatcagactccagttctgaggggtctgttcatcattaagctttctttaagacaactccactttgcagcttatgtttgtgtgtgtggtgtgttggttttaaaatatttctgcaaatgtctattttttattttttgaggcagggttttgctctgtcacacaggctggaatgcagtgatatgattatagctcactgcagcctcaaattcctggactcaagtgatcctcctgtatcagcctcccatgtagttgggactagagggatgcacaaccacactcagctttaaaaaaaaaaaaaaaaatttgtggagaaaaggtctcactgtgttgataaggctggtctcaaatgcctggactcagctattctactgcctcagtctcccaaagtgttgggattacaggcgtgagccatcacacccagctctgcacagttcttatttatttatttatttttgagacggagtctggctctgtcacccaggctggagtgcagtggtgcaatcttggctcactgcaagctccacctcccaggttcatgccattctcctgcctcagcctcccgagtagctgggactacaggtgcccaccaccacgcctggttaattttttttttttttttttttttgtatttttagtacaggcggggtttcaccgtg

SEQ ID NO: 601 - DNA, 1378 bp, Homo sapiens
tcagctgatgggctgcctgccgaggaggccgcagcagtcgccgcgcgaacatggcggccgaaatccactccaggccgcagagcagccgcccggtgctgctgagcaagatcgaggggcaccaggacgccgtcacggccgcgctgctcatccccaaggaggacggcgtgatcacggccagcgaggacagaaccatccgggtatggctgaaaagagacagtggtcaatactggcccagcatttaccacacaatggcctctccttgctctgctatggcttaccatcatgacagcagacggatatttgtgggccaggataatggagctgtaatggaatttcacgtttctgaagattttaataaaatgaactttatcaagacctacccagctcatcagaaccgggtgtctgcgattatcttcagcttggccacagagtgggtgatcagtaccggccacgacaagtgtgtgagctggatgtgcacgcggagcgggaacatgctcgggaggcacttcttcacgtcctgggcttcgtgtctgcaatatgactttgacactcagtatgctttcgttggtgattattctgggcagatcaccctgctgaagcttgaacagaacacgtgttcagtcatcacaaccctcaaaggacatgaaggtagtgtcgcctgcctctggtgggaccctattcagcggttactcttctcaggagcatctgacaacagcatcatcatgtgggacatcggaggaaggaaaggccggacgctgttacttcagggccatcatgacaaggtgcagtcgctgtgctaccttcagctcaccaggcagctcgtctcctgttcctcggacggcggaattgcagtgtggaacatggatgttagcagagaagaggctcctcagtggttggaaagtgattcttgtcagaaatgtgagcagccatttttctggaacataaagcagatgtgggacaccaagacgctggggctaagacaacatcactgcaggaaatgcgggcaggctgtctgcgggaagtgcagcagcaagcgctcaagttacccagtcatgggcttcgagttccaagtccgggtttgtgattcttgttacgactccatcaaagatgaagatcggacttctctagcgacctttcatgaaggaaaacataacatttcccacatgtccatggacattgccaggggactgatggtgacctgtgggaccgaccgcattgtaaagatctgggacatgacacctgtggtgggctgcagtctggcgactgggttttctccgcactgatctgagagctgggcggcgtccacacctaagaacagcagctccaccaaatgaagtccctctcacgcagctccacagcgctgtctcgtgaatggaca

SEQ ID NO: 602 - protein, 406 aa, Homo sapiens
MAAEIHSRPQSSRPVLLSKIEGHQDAVTAALLIPKEDGVITASEDRTIRVWLKRDSGQYWPSIYHTMDCSAMAYHHDSRRIFVGQDNGAVMEFHVSEDFNKMNFIKTYPAHQNRVSAIIFSLATEWVISTGHDKCVSWMCTRSGNMLGRHFFTSWASCLQYDFDTQYAFVGDYSGQITLLKLEQNTCSVITTLKGHEGSVACLWWDPIQRLLFSGASDNSIIMWDIGGRKGRTLLLQGHHDKVQSLCYLQLTRQLVSCSSDGGIAVWNMDVSREEAPQWLESDSCQKCEQPFFWNIKQMWDTKTLGLRQHHCRKCGQAVCGKCSSKRSSYPVMGFEFQVRVCDSCYDSIKDEDRTSLATFHEGKHNISHMSMDIRLMVTCGTDRIVKIWDMTPVVGCSLATGFSPH

SEQ ID NO: 603 - DNA, 38239 bp, Mus musculus
cggccagctcatcccgggacttgagcagaggtctccccagtttcgggggtcttacactacctgtgtgtatctgttccagctgagacttcatagttgaatgcgacagagaactgaaagaacgctaagatgagggagcagctggcacacaagatcatctgaaaacagcagtgttagatcgggcctcctacatcagggacagaagagaagttcagcaaagaccctttcttgggtcctgtcttttgttccttctacctaagccttgtccaggattccctatctcctaggcactgtgatacatcaaggccatcggtgctgatctaactagcctgtgaaataagctatgcagtagaacaagtggaaaccagaggcggtgcaatggaaaacattatgcaaatgtgaaagttgttagtcattagggaaatgcaaattttaactaccccgagaaatcactttatattcaccaggttggtcgtaatcaaaaaaaaaaaaaaatggaaaataacaaatgttggcaaggatatagagacattggaagcctcgtgcattcgctggtgggaatgtgaaatggcacagcagctgtggagtcagctgtggaaacggttggtgtttcctctgaagttaaatggagaattaccgtattaccctgcaattccacttcaaagcgtacggtcaagagaaatgaaaacaacaggtgttcaaacacctttttgttgacccaaaaatgacatcacagaacttttttaagtacaaaaacttttatgtatacaattaaaaatatatacatgtctatgctcaaagactttgtaatgtaaattgggagataaaataaatgtaataaaacaagatgttcatgggccagagagacggcttagtggataaaaagcacttgctgacaagctttaccaccagagttcaatccccaggacttacaggatggaatgagagaattaaatcccacagtcatcctctggcctttatatacacagtgtggctggcacttgtgtgcccactctcctacacacacactaaataaactttttaaaaaattcttgggccggccgtagtggcacacgcctttaatcccagcacttaggaggcagaggcaggcagatttctgagttctaggccagcctggtctacaaagtgagttccaggacagccagggctacacagagaaaccctgtcttgaaaaaaaccataataataataataataataataataataataataataataataacaattattattattattattattattattattattattattattattattggagctggaggtatagtgacaaagtacttgcctggcatgcatggagccctgagttcaattcccagcaactgaaagaagaggaggaggaggaggaagaggaggaggaggaggaagagaaagagggatgcaagaagaaggaagaagaaatatatatgagagaaattttgagctgtgtaagtaaccatctacacccaccacacgcactcaggcacacacttaatgctgtcttctgcaaacgccacagtctcccttgctagtctgtcatttcaatcttttccttttttttttttaagatttatttatttttattatatgtaagtacactgtagctgtcttcaaacactccaaaagaaggagtcagatctcattacagatggttgtgagccaccatgtggttgctgggttttgaacttcggacctttggaagagcagtcgggtgctcttaccaactgaaccatctcaccagccccccaatcttttccttttaatcagaacctttttctcccctgctttcaatgctcctgggcaagcacttaggagtgaatacttagtgatgcagaaatgctgggcttaacgttgagactacaccacgtgttcgttcactgcagcagccaggacaattttaccttcccaccagtaatgcacactgacaggtgctgttagtttctaaattttgttcctccgcttccacctgtatgaaacaatgtagcagatgcgaggtgttatctagtggttttgatttgcatttccctaatgactaacctccgttactttttaaatctacctattttgtatcaatccactgactccgctgtccttatactgcagcaaacatcttcatagtgtaattactaaaagcaaatgaatttttatatgattccacgttgtcagctttggttaaagttcccctgagccactgaagactttccaagcctggctgagccttttcagccaaaggcaagggtctcttgctgaagggtgtttctatgaaagctccctggagagtctaatacaaagttacaactgaaagcctccagcctaagacactgctattcaaactagtcagatcatgatatgttccccctagctacctcttacaagaagtttccctgtctctggcttgtgactcactctctgaaggaatatagccccattaccaacacccttattctgagactgccagtccttaactctttgcagtctgcaaagtttagaattcaatgtgaagctcagaaagtgtgagctgacccttcatgctggttcatgcttggttttggttcttcatttttttttttttttttggtgaaatcagaacagtctgactctgtgagggaattttgcaaatgcaactgccactaatccagaatactggagaaaggcgctcttgtctcccccattagagctgtggctcagaaatatgcaggcactaactcaaggccatgtactttaacatgtggctaagcatgattcaacccatgtaatttcagagctgtggcacattctaccttgccacactgttttggtgacactggatggttataagcatggggggctggggagggggggagctgtgtaagtggctgtctcatctgtactccacatgcacccagtcacacactcaaggctatcctctgcaaacgccacatttatgtccatgcaatgcctgttataaatcactggatgattgtgcccactgttatttgcccagcttcgctcaactgaatgatgtgaaataccttgaacaattctgcttgaagaaatccccgagtgggtgtcaaagaagctttgggaactgagagttcagttagagagaagccaaggcaaggtgacaccttgctctgagaacagatggcagtacttctccgtaccacccacatccctacatcctcttcaagctgaatgaagccggaaggggatgatatcacctcagctccaggcggcaggaaagaagtgacctctgggaggatggcagtagggaggggttacagcaaggggaaaaatgggagggggtacacacactcagaaaaacaaaagtcaggaaaatttccagccatgctgggctagtcttgtgactgtggcatgctggtgagggactccaaatctatgggactctggaattttaggatgcatcaagacagctcccaaagttgatcttaaaggagctcttagtggtcagccgctgtacctgaaggaaggccgtagagtttggagaaccatgggatacaatagcaaatgaactgtgaattaagacaagtgtcaagcaagactggaaaaggcttacccaagaagccttccctaccacccacgtcagctgacaactacctgtaactccagccccagttttcttccaacctgcatgtgaatacacacacacacacacacacacacacacacacatccacagaccagcacacatacacacataatgctaaataaaaataacactttaattttaaaaagacttcataacttaatttttcattattagtagtatgtgggcagcaggtacgcacatagaggtcagaggtcaactctgtaaaatcagttctttccttccacctttccatgggtcctaaggggttgaactatatcagcaagtgccttttctcactgagccgtttcactggctcagcagtagacacatctgtaaggccagatgaggaacatgtgagccccttgggcacatggaagtccaagtcttacaaaggggtcatgaaaatgctcagagacccacatttatggcttcctgacacttcctgacgctcatggctgagtcttgcctggagtatctggctggcttgctacctgctgctaattcctgtcttttcatctgtgacctttgctccccacatctgtgtttctcagttcatagactgcagctgctctctgggtacagaaaggataagagtcttcctcttctcaaggttacaggtggctggactggaaggaagcgtgcttcccccgggctctcttgctgtctaactctacgaatcagcataacatcggccacagtgtctaggccagtctcctctctattacccatcatactatcaaggccagttactgatctgactatctcccaacagacgttcgccgtattttctgagcgcttactgtgtgccaggtgccagaggtacagaagtggttaaaacatgaaggccataatcctgacccagtgatcctggcccttcaggatatcccagaagaatgtcttctgcgctcacagacttaaagaaatatttgtaatacctaaagctaatgaaggactcatatccaaaatatatgaactcctaaaaaaaaagtcaaaaagccaggtagaaagttgataatacttaaaaacgatccaaatggcaaagaaatgtggaggaaaggtgcttaatctcattagctatcagggcaatacaaatttaagccacaggaaataccattatatacccactagaatcgctactctttttttttttttttaaatgagtcagagtttcatcatggtagccttgacgggcctggaacttattatgtagaccagcctggccttgaacccataaagatgaacctgtctctgcctgctcttaggtgctagaattgaatgactacaactttaatcttttcagattggtgataccagtgttgataaggctatgaaacaataaggcatttctagcaagaatataaattagaaaaagcacgtcagaaaattgtttagtagtgtttcctaaagctaagcatttgcctgccctatgatctagccctgttccaatgtgccaattcaggctgggtggcacatgcttttaatcccgatgtttgaaggcagaggcagagatggaagcagaggtacgcagatctctgggagtttgaggcagcctggtctgcagagtgaattctaggtcagccagggctacacagagagactatgtttcaaaaacaaaaagatgccatggcagattcataaaataacaatacctggaaacaactgaaatctgcatcaacggatgcaaattgccctgtgctcgcttagtgacatcacgctgcaatgaaggtgaattaacaaatggtactggggttggggatttagctcagtggtagagcgcttgcctagcaagcgcaaggccctgggttcggtcctcatctctggaaaagaaaaacaaaacaaacaaacaaaaaacaaatggtaccatgtgtgatgtatgagtaagagaaactaagcacagaatagtagtgcctcctgagaggttctgttatagaaagtccaagcgctcacagacaaaatgaacagtgtcagacagaggccaccctagggaagagggtgagagagtgaccaagggagcttctggggtggcagtaatgactgaattcttccttttggtggtggtttcatcagcctgttccctgtaccataatttggtggtccatactctaggttttacgcactttcccatatgttcagtttacttcgactaaaaagaaaaacttttcaagtagataaagagtatgggggtggaaataagagaaggacaaagattttgtttttaagttgctattggatgaaagtttttggccttgaggcagagtctcaactgtataactctaactatgaggcactgtctcttggtagacccagacgacctcatatttgtagagtctcctgcttctgtctcccaagggctaagactgccaacactcaggcagccatataatcagtcttagttttcctctcaatctatactcattgtgcacaaaaactggtccttctggcgaagacctagtgttgcccaatctaggagtaacttccatatccaaacatagacttggctgtgaaaccaaaattggagttcaactacagtgacatttgctgggcccttaaaaaatatagacctttgatatcctagcagcggagctgagcccggggttgctggattagcaggtggggacaggtttttgtggctacatttgttatcattgtccaaaggaatggccctctccagttgctgttgagcatgtgtgctcagtagccagcactctttttctctcctatatacatcctatccttattcaacggtctagagaaatgctcaattgccccaaggaacctttctagggaagaaagtgacaggaaaggaacctctggtcataggctctatggtctagaaaaatgctcagttgccccaaggaacatttctagggaagaaggtgacaggaaaggaacctctggttatagactctaccgatgaagggggaaaggctggaaatgggagttcctttatagggaggtcacatccccttcacaaaaacaacccaaagagaactaactggtactgattttggattgatgaagtgaagacaccccagggaggaagtggcaaaagcgaggatgaaaacactttgattccacaaggtgcgtcagggaaagttggcgttcatttcgcccgggatggagacttctctcccacggggccacgattgggtcaaaggaaacccccgctcccctccgcccttacctcattggtgtgtgtagccccagccatgagtctaccaaattttccctccagtctgcccatccccacccctatcaaggctggaactttattaaggcagattaaggttcggtcagtcgcccagaggaacaaggaacctggaaggagagatgaggagcctgatgaataggaactgtgcccaggaagaaggtagggactgggcgtggagaaggaacacgcgatggctgctgcggcccgggcgatcgccagctggccggctcaaaggggtggtttcgggtcttctggaaggcccagaggctcactagagatagtcaagattcaggagtacatgcgtagcagaacgctcgccttgagaggccgtgggaactcaggagcgcagcacccgcccgcgcttgagcaccgcgagcccacaacaccctccaattctgagttcccgtcactctgctgcgttttccccctcaccccgcccccagctcaagaaacgccggggaaatgggcggggcctgggcggggcccgccccttttcctgctctgattggctgatgcagttgtccatcctgactctattcttgatggaggggggttaccacccgctctgccccagatcacgtttgccacccacagccaaacactcttgtccaagtccgcgggcaagaggcgattggggacgagcgagctcggcatctcaggcccagtccggtccacaccagcccgaggcggaatatcctgatcgccccccaccaggccacctcccctcgtggaatcggagcggcggcctcacaggaaggcagaagcgaaatgtagcgagccgggtgtcgcggttggacgctcgccttgcctgggggtgtagcggggaacacgcgggggctcgaggaggacggctgagggggaggagtgatgagaagagggggtaccctacatcccccaattccgcgggcccctgctaccactctccaggcgccctttctccccagcaaggcgcaggtcagtgttgttgggtctgggagggagggagacgagggcgggggactccaggacgcagtgcttttgcagtcttgagttgccgggagtcggcggaaatcaactaggcactcctcctccccacccctgtagttggggatacctaaaccgggcttttttgtccatccccgcttggaaaggagacgcggcttcctagagcctgaggcccatcggtagtggctttactgctgatgtagttgagagactggcctgctccccttgctagcccccttccaggtcaaagtggcctgccagaaagacgggagggagggggcagtcaggttttagcgaaggaactcagaaactttgctggctcgggggcggtggactcagactgagtgtttcctcttggctgactagtgaggatctttgaaaacaacggtgctgtgttaaggtggcttggctggtgaccgagttagtggaagactcataacttgggccctagagtttgattctgccttaaccaaactggagttgactaattgtgagtgtttggaatactaacagcctgttcatcatacctgcaaaaccctctggatttttttttttttttttttttactattgagagccatgctggtgaaatgcaacaagttggtggcaattcgtggggattcctttaagctaagaaaagcagggcaggcaaagacagacatgatttgggagtaaatgcatattagcttgtgacacttggatttgcctgactttgtttttctttcctctttctacaccttttaccgatgatatttttgtttttaagagttacaccatgtctggctgtcagtaacccgagaggaaagggggaaggccaggcaaccaaaaatgtaggaataaacagtagcttcaccctctgtctcttcaatctagttaactgccgggtcctatctgacaggctcacaggatctagcatagagagaagtgtaaatgcagcctggaccagggtttagcctgtggtttctgtaacactcgactttcaagggcaagagtaagaaggaggcctctggttcttggccttggtcttggccggcttgccctgccccggttgcctggggagttctcctggcttcctctcccatcccagcagggggctaggacaattagaggtctagggatgctcccctcaatgaccagcctctctgtttgccctgtcttgctgttgctgtcttgtaataagtcactcaagaagagtgaatgcgtagggagtttgcatctgaatctgtaactttactgataagggactatacttaagtaatactgagttcttatcaagatccgagaaaacaactaatcacatccctgcccaccccaggttgctcaggaggcaatgccaaggtctcctatgaagcatcctccttttgggtggtggtttgctggctgggaatctgctgggaatagaactcactgcatctcgacatgaagtggggcaggacagtgtaattctagcaggaaaagaacagctaatagccacccctgtaacaccacatgctctgcagatcatcctagtaggaactggtttttgctatgtaccaacattcattctcccccccccccctcttctttttgtccttcctcccaacgtaaggtgttccacaccaattcttgtgactttaaggaccaggcaactgagaaagtacaagatcctctcaagaagggaagacatctctgggagagagaggaaagatagcagacactgggaccagctgagcccagccacggtgctgtgagaagctgaagccacccagcaggagtgagaagaaaccctggcctcagattgaggcttcgttctcaacgatctgaactcattcagcttttcccaagagagggctgcagcatcaggcactccagactcaggttgagctcttctgctcctgctctgaggagctggccactgagaaccaaagattgcccctggcacaacacagagctgctgggagcaggcacccactacccatagaggcagctgctgcatctggtgaggactttgtttccttccagctccaggctgcattgcttgatggggctgtcttttggtagatcagtttttacagtgcccggtaggagtggagagccgtgggaagaggtcttgcggcaatcaagcctgggttcaccccaagactaagttctttcccaagtcagagtcgaagagagaaagaaaaataaataaattctcccctcctctcctccctgcctgtcatgtcctctaagccagagccaaaggacatccaccagccgaatggtactggccctactccttctccctgttcttcggatggccctgggcgagagcccttggctgggacctcagagttcctggggcctgatggggtggaggtggtagtgattgagtcccgagctaacgccaagggaattcgggaggaggacgccctactggagaacgggagccagagtaacgagagtgacgatgtcagcacagaccggggccccgcgccaccctctccgctcaaggagacctccttttccattggactgcaagtgctgttccccttcctactggcaggctttgggactgtggcagctggcatggtgctggacattgtgcaggtaagacctgaggagggtgtcctctgctcacaagcccttgctcaataccttggcctttggggaaactgactcttagaagttcctctccacttctgtgtcagaagcagctgctgcttcctagaatactctttccctttggattacatccttggtttcatcgatgtctctgttacttactgcagaaccttcagagaggccaagtagccccagggaggtggtcagagcagtattgcctaacagtaacagatgtaactccagagctcagcctcggggtgggaagagaggagcaggcctgttgcttgctatgcctcctcagtgctgttgattccagctcagtaggagacatctagataggtctcctctttacgcctgctttcctttctccagaggtttcaaggataccaatgatagaacactccttttcaagcctctcctccattcccccgctgggcaggaatttactcagctgtcaggaagggtctcagacccagtgagaaagctcttaaggcattttgtattgctgatctttgtgcatccttggcacggtctccttggtgagcgaggatggtttgggaaggtggtataagatctgaagaagctctaagtgtcgtggatgggaacagaatgtaaccagaccttagcaggagcgtccctctctgctcctcgtctgtcacaaacatgctctgggcaaacaggaaactttgtgaggatactggatagacaaaacagtacgagttggtaggacacctgggaactaagagccagagcaggggcaagctgtatttagtgcattgtgagtcaggacttaccaagagcctccaggttggaaagagaaaaagtcttgttttgaagttaaagcttttgaagctcagtgacacacacacacacagctttctaccagtgctaatcagaatatgtctagtgcttgctaaatgctggctttatcctaggtactccaaaggacaggggcagaaggagattggtccttggggaccactccccccaccctgccccagggctccctcactgtgacatctcccgaaaggataggaggttcagcctcgcctccctttgtgcccagctaacactcaagccgggctcacagagactgccatgggggtctccaggtccttctcaggtgactgaaggtagtgggctgtaggtgctgtatgtaacatccatgtagaccatgaggcttgaaccttgcaacttaggaagcttaatgagaatatttatagctggtgaaagtgtctggtgctgccttccctctcttcaaacctgttattgtgaggactgttcctacccggacttaggaagccaatccagagcttggggctctccgtccaccccaccccaccccaccccgctgattgctcagagcagggggaaggaagaaggggagaagacatgagactggctttgtagtctccctcacctctcctttctgaggccttggttctcattcttaccatttgggggttctcgatgaatgcctgcaaagagcttcagggctgtgggtgtagctcagtggtacggtgcttgcctagcacgcacaaatccccagtttccattcccagcaccacagaatgaaaacaaggggcctacagaacgagcatcctgtggtgagccaggagacatttagcttagtttctgataatgatgatgctagcataggttaatgggggtctttcctgtaagcctaaaaagtaggaaaaaggcatctccattttgtggatgagaaactgtggcatagaaataccagtggttatctcccccagagcttgtgtcagtaacccctgtgaccttcattatggccgggatttgcagactggcttaagactgaggagcctgctgcttttgtcttgtcttgaagaacagggcaaactgggaaccagaacgattggcattggcttttaaagtgaacaaaagccaaagggagagtagggtccagctcccctacccctcactctccacctctgacatggcaaggtccaagagtaggaacagacctctgatgccttgctttatgtcctaggttgtaggggacccggagctgcctagtgtgcccacagagggttggcatctccctcagtgtggcatcttggctcataccagagctagggttccgttggtgtagatgacaatgactggcttgtccttgtgcccccttcccccatggtcccaccacagctgggctaaagcagggcccatagatggctacagcagtagaactggagtgggcgagtatgggggggtgggggtgggggacaggggcagggagccccaagaaggttcttactctacatcctggggagtgatggggatggttgatgctctgagatacaggagtcacacctgtgttctcctttcaggataagattacctgcagtgagacaatcccaaagtgcccagatagggctggttgctggttgctcaaggcccccgtggttccagagcatcaggagtctgcactcagtacagagatgccaccttgagccaaggttcccactgcagctaatactgggcttttcctagagacctgcttctgtccagtcagaccccttgcttcacttcctgcgtgtagtcgcctccacagtgaaatgaggagcagagggatcctccaggttagaagagaagcagactgcagtctgttctgacttgcccactgcagccaatagttttgagggaagtaggagcgagcccagtgttggctttagaaagagactgcataggagcctcaagctgcccatgctttattgcccccctaccccccattctttcctgggctcctgcaggagggcattacaaccattttctatcagcctttgtgagaaatgggagggttagaaggtggtggtatgtggtcttcataggacctctcaactagattaaagtagggaagctctacactccttgttttaatgcactcttacttgctgagtatccagagagattaagacaccccccctccccacgctcccccagcagagccttggggaagggtatgggagagaagcagagatgggagctgttttcctggaggctgctggagcccctgagcaggccactcagttcctgtcttccttgactaccttccgcactgcccacctctgccttgcgtgtgctatcagagccatttccttttctcctgcttcatacagctctggacatgcaggcattgccctgaggcccctctgctcgaacacctccaggaggccctgtgggataagcctctatcagatagaaactgtgatctagcctgacccaagattacctgaaaagttcttgagcatcgtggtgccttagaatgggtgtgggtgtgggttgtcattttaatgtcttgattccatcttctcctcaccctggcttgacttcttactaatctgcttccggaacaggaggctgggccagatgaggttacaggcagaagagcaggttagatggccaaggaaggagtcacagcgagatctcggagctctggggcttggagtgattgctctgggtcagggttagttttaaatgtgggagcagttatctgatcatataccttacaggaactgaggcgagagaacaaagggagagaggctaagattctgagaagcagtaaagatccataggtggtcctaacccccacccccgcaagccaagcagagtttcctggaccctgttccatgcccattggttcaggaaggtgtgggtggtagcttgcctaatggcttagctgactggtttgacttcatgggcagacactcccagccagggtgaactggatgggccggaattaggccaaaggagtaagagaaaccactctaatctataccgatccatcctcaccccctaacctcaggaccacactgctttctggatggctctgcttcccagagtcctgtgcaagcgtacagtcacagactacctgtctgagctgcatctctgagagagttttgtgagtagaaaaattggatatggagattggctctttagtcccaggtgccagcttagggctttgctgggccaaaagtccagatagtgtgatttccaggctgtattctgtgagtcgggaagacttcttctgcagggggctgctactggccctgatcctttcctttgccgatacaccctatctcatcctgcccaaaatcccacaacttctaggttcccctgtagttcaaagcagagggtgcgtatgtattgaaaggagaaaattaggggtgcttagggtggcagctaggggagttaactgaactttatacgttcttttctccaggattttattgctgtgtagcccaggctagactcactcacatgtctcagcatcctgaagatagacttacaggcttgtcccaccaaccccgctatatatttttttccttgatgatactatatgctatactccttacaaacagtccatacactttgagagcttccctctactctttcctctttatcggcatacacccatcaccttcagagagctagcagctgagatacaggaaggcaggcatttgagatgagggtgggatgagggactgtgttctaagagagctccccgggcccacactcattaagggagggaaagaatccttccctctctgaagctgcttgcccattgtgagcagacggaacaaggctgcttaggcctcagctaaagggagctggatccccaaggctgtctctcccagccttgtccaacagtaacggtcccggggctcatgaggcacctcacaggggctgcctaagagcggggaagatcttcaccttccccggtgtttgaaaagcagtggctgaaaggtcagaactgccatggggtcgggagtgcctcttctttcctgggagtcttcagagagtccaggtcctttaggagtcactacaaaatcctaggcctaggagctcagacaaggctatgctgcagccctgcaacaaatgagctgttctctggatcctgttcacttcacacactctaagaacactaacaagaaggcaagttcttcgccttataggaccaccagtgtcttcatctctgctccctggcccaaccttgtgcatcttgttgtttgtttgtttatttgtgataaagtttctctttgtacctctagctatcttcagactcccaatcctcctgcctcagtctctgaatgctagaattacagacacaccatctgggttgtttgtatgtttacttttaatgttgcagaaaatcacataacacaaaactataccgtaaccatcttgaagtatgtaaactacattctcagctccactctgcatccacggaatgctgatcctgttctctccaggccctttgcccttagcaaccacaattcattctctctctctctctctctctctctctctctctctctctctctctctctctctctgtgtgtgtgtgtgtgtgtgtgtgcgcacatgtgcacacttctatgaatatgatgactactgcagaccttatgtaagtggaatcatgcaatatttgccttgtcatggctgactgttgtggtagaatgtccttaagaatgtccttaagttgtggcatgggacaggatttccttttcaagacagtcatacttcaatatttgtataccatattgtactggtccactcagctattggtggacagttggatcaattctacctcttggctgtcatgaatacatgaagctatgaacaggagtggacagatatttcttcaagatcctgctttcactcagttattttggataaatacttaggactcagggctaagtagtcaggagaagaaataggattgctagaccatatggccattgtacttgtttaattgttcatttgtgtgtgtgtgtgtgtgtgtgtgtgtgtgtgtgtgtgtgtgtgttacatgaattgtatacatgttgtatgggtatgtgcacatacatggagaccagaggtcaacataggacattttttttctgttgctctccaccatatgtgtgtgtacacacacaagcactcttttttgtgtatgcatgttttccctgcacatgcacatctgtgcatcatgtgcatgcctaatgcttctggggaggccaaaaaagggtgtcaaatctcttgggaatttagacagttgtgagccactatgtgggtgttgggaatagaaccccagtcctctgctagaggaatgagtgctctaaaccactgtgccatctccccagacccacctcttaccttagctttttgagatagagtctctcactgaacctgcagctccctgattggctaagctggtgactcattaatcttcaaggcccagcaagccttagtgctggggttagggacactgctgagcctggcttttcacgcgcaggttagggaatccagactctagtacagagacttgtgtagcaagcattttacagaccgagccatctccccagcatatttgggtatttatttatttggttgattagtttggggtttttttttggttttggttttggtttcaagacagggtttctttgtgtagccctggctgtcctagaactctctgtaaaccagactggcctcaaactcagagatccacctacctctgtctcccaagtgctgggcttaattaaggtgtgcgccaccactaccacctggcttattcatttttaagacagtcttgccacgtagatagctggccctgagctttcagaaatacctatacctcccaagtgctgggcatacacatgcagttgatttttagtgtgaggaactgtcttattgttcttcaaagtagccccattttatagtcccaccaatagtgcagacatgttcccatctccatgtctgtgctaatacttggtattttctgtttgtcctcttaactgtcttaacaggcatgaggtgacctctcactgtggtttggattggcagccttgttctttagcagtagggtcgaggggctggaattgccttatgagctagctctctagtctagcccctgaccgcttaagcaggagcttggtgccttgtagcatgtctgaaggccccagcctgccatccatcgtgagaaagcttgctgaggaagcagcgtgagagccctcgctgtatctcttagaggctcataaggctctcagctcagcacacttacgttacagctccttgtctccagacacccaaaagaacctgtatacctccacctgctgcctgcccctcctcccctcacaaacgtgcaggctttccattcttagaactccatgccctttagggcgggagggtggtggggataatcccagcttctttagggaaatcctcagttttggttacaactaaggggactttgagtggccaacctaggttccaacagtaactaagacagtacttcctgagcctcagttttctcatgcgcaaaatgggaacaaaaaaaaaaaaaaaaaaaaacctctttattggcttgttgaggtgactaagtgaaaaaaaaatgcattaacataggttggccaaggaagttggtgggagagccaggactgattgacccaggactagaacccatatctcctgactccaggcccagcctctcccaacaggggtgtatttgcttctgttagctaagagattgggtgcatagaaaggaatcagaaatctattgcagatcagcataggagaagcaatgtctaaattcagaacctgctaggggaaagtcactgtggctgagacccaaagcccttggaaatagaaaccaaacaaacgctctagtcaccccggccccagccctgtggagctgagctctccacagctgagacaacacctcccaaggccgaggccacagagcaactggataaaggcaggcgagggggctgcagagtgctctctgagagagtatatcactaagggttctagaacataagccagcgtggggtggctcctctgcaaggtccccatgaaagcatattagaagtcaggctagggatccctcctgttctgagatggtggctaggctgtgctttttggaattcatagacttattctacttttaggcttcttgcggggaggtaaggtgcctctcgtgcttgctccagctggccctgtttccctctgctgtcccctgaccccactctgttcagctccaatgccagtcctttgaggtactgaaattcttggactctgtgttcatcttatagcactgggaggtcttccagaaggtgacagaggtcttcatcctggtgcctgcactgctggggctcaaagggaacttggaaatgaccctggcgtcgaggctgtccactgcagtgagtgtcctagctgtgggaagtaggggagagggtcagggagaaggtagcaggcaacatggagactggtaagtctccacacaactgcctgggctgggggaggaaagggaagccgtggagggagatcccagactgggtgtcctgtccctgggcaggggctccctgcccagaatggttcccaggctcaggctttggatgtcccagccatccctggatgcctgccccacctcctgctttgcaacctgcctcgtgactgtttgtgcagctttgacaggcaggcatcatgctggtccctccagccacacaggtgggggcctcctctgatctccagccctactctgcagctgggcaggagcagagccaggccttccccacaccccttcaaaccaccccctttccctgtggcagcttattcttcaagagaattggcctttccacctcccaaaatcctttagatcagccacagatagacatttcgtggactgagcccaatagaaagccatggctgagaggcaagaggtgttaaaactcaggaccaggcatgtctctccgtggccaagtctggagaagatggtgttgagggcagctagcctaacccaccccaacttgttcttcctttctcctggctggtgcaacccactctttcctttccaaatactggcagcctcagcccttgggccagcaactgaccttgccttccctaagagaacaggctgcttctgggccaggacagttatacagacccatgcaggaacgtgctgcctggataaacaggacagagtgggatctgccacaagccccctcacagcccagagtacacctgccctgggtgctctcttgctctggccctagagccttaggctatctatatgcattgcttttttgatccagtcaaacagatagagccccaaaccctgtgcagcctgctccagcccctcaccctccctctttcaggccaacattggacaaatggacacacctaaggagctctggcggatgatcacggggaatatggcccttatccaggtaagaaaacatagaccagagacaataggctaagcatctccttagtcaggaatccctgaaaggcttaggtcagcccagctggatcctatgtgattctccggcatctgcaaagtaggctaggaggtgactagttactcaggaaaatggccaagacagggagtgccccagcagcttccatatcacatgtccaggcactaggtggtttgggggattttgagccttcactaatctttgcagtagaatcagatgtgtgaatgttagagtgtcctctgccactgctgtcccatcttcccaggaggccacacagatcaaatttcttcccccttgaatcctgggccttgactctgactgatctctgggctgttgattctcaccccatctccagagaagcatccaaccagccagtaacatgtctggatttttgtagggtacattaccctattctaaggtagcacaaaaactaaataaagtcatccttctagcctgcaagaactgtagggcccagtcctgcgtgcttgctaaggaccaggaattacccattgggtgtttagtgacctcagctaaggagctctgctccagactccacattaccatgcctctccccaggtacaagccacggtggtaggcttcctggcatccatcgcagccgtcgtctttggctggatccctgatggccactttagcatcccacacgccttcctgctatgcgccagcagtgtggctacagccttcattgcctccttggtcctgggtaaggaagggaaggctcagggtgtgggggtgctgctcactctgtcttgcacgtcgacgttcccttttgtttattaatatctttttccccttctcaccctacccggcctgcctctccttcctcaccaggtatgatcatgatcggagtcatcattgggtctcgaaagattgggatcaacccagacaacgtagccacgcccatcgccgctagcctgggcgacctcatcaccttggcactcctctcaggcatcagctggggactctacctggaactgagtaaggctaaggccactgagaatggcttgggtgggactgggagagatagggaccattttgcaagcgtgtgaagatttttcctgtactgttaactgtacgaacagtttgtcacaacttctgggcgcagggtagcaaggctagatagacactgatgtcagatcctgtaggcaggcaccagaggaaggaccgtatcagcactcatccctgcctgaccctaggggttttgtttctcctggagaggtgagatgtggggaagggaaaggaaagaatggaagactagaatctgctagcaaactggagaggaggatggatgggaggcagagattgctgggatcagaccaggagacatacagtctgctctctgcctgttaactttcttgcctcaactgggcatggtggtgcgcacgcacacctatgatcccagctactcaagaggaaaaagcaggaagaccgtatgaggccaacttgggctccatagtatggcactgtctgagaagccatacagtgcctgggtagctctaatacttcatttcttcctctgcaaaatgggcaaagctggcctcattgatgaggtgaggtgctgtgcatccaggcacttagggtagaatgactgactgtggatgagctggtctcttgggacatctgcagcttaagctggggaaagctgggaactaaaggtgcttatttccctctgatctctgcccccacagagcactggcgatacatctatcccctggtgtgtgccttctttgtggccctgctgcctgtctgggtggtgctggcccgaagaagcccggccacaagggaggtgttgtattcaggctgggagcctgtcatcattgctatggctatcagcaggtatgctggggccctgggttctcatcccctgtaccaacctcaccatagaccccatctgaacccctagaggggcagaaacggagcacatactggaaatgcattagtagtgtcagccatgtgtcctactgcaagtgacaggaatgatctctactaggtttcattccaaagcagaacatactgaccttgggaactaaaaagcagccgcattctgggacacacgcagtgtcgtcagggcccagagtgactctctgtcactctgccttctcagtagggggtcagcagtccaggttttcactcttctgactcctccccattccagcaaggggacagagaggctttcccccaacagggcacagagacccagtatagagtgtcactgcttcctcttcaatcggtcacagttctgtccttgtatcagtcacttgctcttggaaatgcaactgtctggttggactgcctgggcttagccacagttgaagcacagtggctgggttcgagaaagccagctccctcagggaggagccagtgcagttacccttgaggaaatcagtgctgagcaggcaggccacagcgagcctcactcctcacgggaaggtggctgtgccttcccttcttaactggagtcactgtgccaagtcaggagattatgagcgacaactgttgcatgcacgagaactaaagactgaaaggagagactcctggaagccactttgctgtccttgtccccaaggttagctaggcctatgtctctttgtcccagagactggagcagaaccttccatggtttttatgtcatttgtcttcatgtctgtatagtgtgggaggtctcatcctggacaagaccgtctcggaccccaactttgcaggaatggctgtcttcacacctgtgattaatggtgagaccttagcatcagctgctgggggaacgaaaaggcttctgtgtcactcagggctccagcaggccagagaatctagctcagagagaacaagacctaataaagatagagatggcgtgacaggaccaacaggggaccgtgagaaacccagaaatcagcaacatgaaagcttctagccctgaagggccagggaacccagaaattgtcttgtgggagcccagttagaatttcaccccgctccctacaagagtaagctcctgccaaaaaagcataaaaggatccagaaggaaaatagaaaacactaaacccctctccttgtttacctgcgggggccttccactgcacaagtctaagtagaagcatccagcaggagagactggtgtggggcctaagcagttcacctctcagggctcagggtaaagctgagaggtacagaggctaggttagggggtgatggtaaagggaaatggtaaccagcggtttaccagggcagtgccagtttagagctcacactggatactggaagctggttatcgggtgagtgtttgagtgctgagtgcctgccggggtcagctccagagaaagggaaggcaaggagagctttggagcctgctgtgtagtgagtggggggtccatgctgcacacacgggtgcagcagacaggccacatccctgccaacactccaagagcctagatagagcatccctcagaagctgtggaatatttgtcttcttccatcgtattctgttggcaccagagggaagagtgatgtcggctcagccccgaggaaaggtagaagacagggcctctacagatacgggacaaagaacaaggtgttttcctcccggtccttcctcctccaagtctgagtcctgtgtgtctctctgcaggtgtcgggggcaatctggtggctgtgcaggccagccgcatctccaccttcctccacatgaacggcatgccaggggagaactctgagccaactcctcgccgctgccccagtccatgcaccaccttcttcagccctggtaaccatagcatctcaccctcccagatccattcctgccttaggggttgggggggggcagccaggaacctcactagagaaccagctggggcccaagttcaagggtctcctctgctgggctgtgcctgcatttctgaagagtggagcgcccaggtaagacatcattgtcttttcctgaaacaccctagagagatagctgtgtgctgacctagaatacggcgttgaccatcctgggacctcctggggccaatgcttctcttcccatcttcctctctcctcttgtagatgtgaattcacgctcggcccgtgtcctcttcctccttgtggtcccaggacacctagtgttcctctacaccatcagctgtatgcagggcgggcacaccaccctcaccctcatcttcatcatcttctacatgactgctgcactgctccaggtatggcagaagcagggcacagcccgggggccacatggaataagaaccccaggtttggacctggtcccttgccaccttttctctggccgggactcaggaggatagacactggcctggaagaattactgccattctgtgacttcagcttggtcgtgtcccttctcagcttcagtggcacactttgaaagtgagagtagtagaccagccgcagggtgcctaggaggtgggcttgaaccacccataccctgtcctctgctgggcttcctttaaaataagggcttttccacagctagaaaaagcatcaaaaccattgtgcaagacaaatccatcttcaagactcatccaagcctttcctttcggtatgctatggcattcccatggtattattaatttagtcataagcaattttccttccaaaccccgaaccgagtgcttagaaaagttgtctgttaggaatcttggcgagagccaggctgagaaccaaccatatgctgttcccagcagtcattacccagttcaccacgctcccttgccgatgtagtcaggtgcacccctgatgggaaaggagcgtgagcaagccaaaggtcttttgtggccgcctcagttgaccccttcccctgggttgaaagccacacccccattccattgccccatcctaggggtcatgaccctgtggtcaattttagctgtgcttccttctctgagtctgtggagaggcaacgtggtagcaattgctccctgtaaagttctgccaggtccctttgccacctgtccctgtatgtgtccttgtgctactcgggaggctaaaatgtgaagacagctgttgacgtttccaccctagcacatatactaaaagcctctggctgcatcttctgcagctatcagaaaggctgtgaagttctagggagactggatggcacccagggccagggccatgggagtacaaggtagctgtgtgcagagcagagggtgtgaaaggttccagaatagtcacccctgacttccttacagagaggccaaaacaaccaaatttgcctaaaaacagggaacattactggctcctacccctgagtcccttaaggcagaattttcatacctcagtctttacaaagtacagtcaagaataaactccaccagcctttaatcccagcactcgagaggcagaggcaggcggatttctgagttcgaggccagcctggtctacagagtgagttccaggacagccagggacacacagagaaaccctgtctcgaaaaaataaataaataaaataaaccccaccagataaccgtatgtcagtctaatggttagaatgcatctcattctcatatagacgtgatcatgtagggacccctaaaatcaggtgttaacgtcctagatgaagtgctgctcccagtgcagagcacatgtaattcttactaacatgccgattcccattcacaaggcccagcgttaggcctgaggttgtatgtttgtgacccactgtccactgcaagcgataggtaccactggtcctggacccagtacctatattccaatctcatttattctctatatctattatctattctcatctatagttatagaacataagcaagggagcaaataaatcgatgtagataatccaagatgtatttttgaactgttatgcattataactgacgtatttcgctgactggctcataaacctactttacagatgaatattagaataaacagcagggtgggaagggtgaagagaaagcagcttgtgtaatcagctgttacccagggccttgtaagagaaactggctctacctgccagcccctaccaggctcctggagaggccaacatggcaggaattgcagtaactgaagaatgatctgacccagaattgagacaagggcagccttcctgtaagggcaggatttagtttagaaagcccctggcttgctgtgagctgtcctggcaaaaaggttgtgaccggccaagccttgtgatccactgaacacatccaattttgtggcctctggctccccctgcagaaagcgggtggctacaagcagaacccctgtctccccaggtgctgattctcctgtacatcgcagactggatggtgcactggatgtggggccggggcctggaccccgacaacttctccatcccatacttgactgctttgggggacctgcttggcaccggactcctggcactcagcttccatgtgctctggctcattggggacagagacacagatgttggggactagcttagccattcagtctttcccccacccctctgcactttctatttggatttttattttccttttgtttccctaccccaccctacactacactcccatgcctttctgggatttcactttgataccaaattctcattattttcaatgggaattttttatacattgagccaagtttggataggaagaattcgggacagacagatgggctgacataagcagtaaaagtagacttttgagacaatcaccaagtgcaattccacggtgggtgcctccagaggaggttagatcgggaccttggcatcctgtccagcatcggggacctttgcattagctttagcgacctcagcctcggccctaatgagaaactctcaagtgggctctgggttgtttagggtttggctgaacagagggaggagggataattaacactcccacacatgcacgcacttttatagatgtggaccaacttcacagcactgggcaggggaacgttgcttcaactcctcgtaatcacaggcctgctccaggccagcctgcccgcagagtcacgtgcactggagattccatctgcgcacatgtgccttgcccaactgcctgattgcttcccagctgaaatgagtggtagtgacccgggctcttcacggatccatgtcatccacaggtttccaaaggtccatgtgccccctgagtctagagaaccgagttcaagcctcctctctttaattctctccacacactccgtctccgcgcagcttgccagatgggcttctaagattggggataggacaagggaatgtgccaaatgacctggagattgaggcaacggggaggggtggggggtgtctcactgccgtctctcatgacataatcacgtggtcagtcttggcctctgtcacttcctaaacacactcattctatcacacgagggctccgttggcctttctctcggcttctgcccacagacatgcatcaaccattcactcattcagcaaatctcagcctccccgagatgagcccttccacagcaccggcctgcaataattcttcactgagcagtcgttacggggcgcatactgtgctaagttcagtgcctggcatcaacccaccagtgctaagggaatcgctgctctaacctcacctcatcccctaggctacagaggccattgtgcctcttcaacctgacagtaaatgttccctcgttcgcccctaactctgcagtgactgccaaccccgttgctcaagcagcagcatgtcctccaataccctcctcccgcagcctctctcctctccacatcttgctacccactcagaagagggcttggaattagcaagctggatatcaataggctgcttcagtatctgcctcgtccatgattcaaagaaaaccaaagtcccttccctacacatgccccaaactgttcaacaaatggggtgcaggctgtacttctggcctgtctgtctggaatccataaattcttccccctgtgtagcctaaagggtcagcctccaagaaaaggattaagcagtgctccgtgtctaccaacactgtgcttagacctagagactcttctcggcctcatttcctctgtcatcacctgaaatcagaactgtcgaattggacagattcatagagattgtctagttggggttgtgtcaggcagatcagtgtggatctgagtttatttctgctcttccctctggcctaactccatctcaaaacacaagactcttgcacaggcatcataccctaagactgtgaccccagggtccccagccacttgctctatcctgacatctggagttggatcaggctgtctggagactgaagcatccttcttcctttgcctagaaaacagaaaggtaggggcgcccaggctcagcgcatgtgagtggaggggcctggagtgacaggagagtgacttcaggagattcatttcttcccaccgggttgcacctattgcatgtacttttggcctgactggaagaaacaaaattggtttactttcatatccttcaaaagttacagaactgtgtcttaagagaattatttatagttactataactgaattgacaaatgtcgacttaactgataaattatatttggtaaaataaaatggaagtttatttcaatggcttgtatccctgtgtgtctcatcaaaaagcagactcagctatttccttggaccctgttctgtggtcccgcccccacctcagaaatgggaaggggtcgatgtgccaaaagtgaggaaccatcttagaatataatagaaaacacatcagacacaagcaatgatgctatggggcggatgttaagggtacaaagtccttgtgttaaaggatattagacggtgctctcccctccctggcccccatgcattaccttggtgcaggtgataccagcatctatgggttagaattccttccttgcagaggtttatagctgagttgagtcagtgtagaaatgcttttaccttgagtatttaccatgtaactggctgcaaaagaattgtacaattttatatgaccttccatgaatcattagccctttcctaacctgaattataccctgtttatagggtaagtgtaagatgaggctccagtgatacatgcatacatacatacatttatgcatacatacatacatacatacatacaattctgttcctggtacatactaagcccaaaaatactatgaaatattaaaagtagattatgttattcaaccttccattgctgtaacaaaacaccagaaatgccttataaaaagaggagggggctggagacgtggctcaggggttaagacgctttgctttgctgctattgtaggggataacagtgtggtcctcagcacccacatcaggcagcttccaacctgatgctctgttctagcctccatggacacctgcgcagacaggggaggtgcacatgcatgcacacacatgcgcatgcatacacacactttaaaaaatagttttcagtgcctggttaataggccccactgtttctcacttgtgatgtagatgttgccaaggaacccagggtagggcaggtcgtacctcgtggcagccagtaaatagacaagggggaattttgttccacagcccactacaaagcatatagctccatgatctaaaacaacctcttaggctccacctgttaaatttccagtactttccagtagtgtctagctgagggtcaagtctaatacatgggctttttaggtagacatcccctatctaaaccctatcagtgggaacagtgcaggcctatgatgagcagtgtccagacaccacaggggaagctgagaaaggcctcatgaatggggttcatggaagcctgacttcctcagggacggttagctcagagactagcagggaggagagggaagggaaagccattttacagaggagtaaggaataaaaagtcaggctgatattttggagaactgaaaatggttccaaaagccctggaagttgagctcacagcctgtgaaatgcatattatgggataggagcagacagggacggtttccgttttgtttttctttcattttgttttgagacagggtctcacttaacgcagcctgaccttgaatttgccatgagtccaaagatgaccttgaacttctgatattcttgcctctgggattacaggcatgcggccccctgtccaatttatgtagtgctgtagatcaaaacccagggtttcatagatgctgcacaagccctgttaacagctgggcacagatatgtgatgaggaagatgtggataggcaaagtcagagaataaacctcacctgggtctatctgatgccaagctcttggcagagaaacaccacccataaaggacaaggttcctgcaaggtaccacaccacagtctagagcataaatcttgtgcagactcagcctctaactgccctgggctctagaactgactcttcaaagtacccatgttagtaagactgtgaagggttaacgagaagatgataattgcttgtcaatgatctacatagtgttttaccatacagcccgctgtgccatccagcatactgttaaattagtaagcttatttacaatgttaatatttctagtagctatgagtagatatcatcactatttttcaagacagaaacggaataagagagattaaatatctggcccaactacagtttttcaagccaagtttctcccagtccagtgcttcctgctgtgcctggagacagatgaagctgctggccaagccacccctttataatcataaagcattgctgaaatcattaaaatgtctgtgtattaccagctagctcagttttgctcaggcaacaaattaactgcaaaatattagttattaaccccaagtagccttcttaacacagcttcttttgaacccaaagtgatgccacatacctgtattccaacccttatgaaacagaggccagaggattgccccaagttcaaagccagcctggtcttcatagtgagttccataccagccatggccacagagtgagacatcatctcaaaaccatccaaatataaaatgcaaaaagagagagagaagaagagggagagggagagagatgggtggggtcaggggaggaagggagggagacagcccaggatatacagctacctcgaatggttactcctagaccagagctgttaaagaataattctgagactggaaagcactcagcagcaattcctatcacattatgctgtgtgtggtggggtcaggtttgaggtagctcccagcagattcttggaatacacagtatgtcccaatggatactttaaaaacacacctgccaggcacagcctatctctgatgatattttttaaaacataattacagacaacacttccaatcctgcaggcagccaagcagtcaggtgacagtcttctaaacttgggcctgaaattggtcatccccttcagctaaaactcagcactttgggtgcacggtcctgcattttatattacctaaacataagatgttttaatttcaccactctggaaatgtttgacttagaagattaaaagagactaaaaataaacctgaacctgcagaaaagtaaggacagtttgatcaagaaaatgacttttaaactaatttgaaaaactttgagctggagagatggctcaacggttaagagcactgactgctcctccgaaggtcttgagttcaactcccagaaaccacatggtggctcacaaccacccgtaatgagatctgatgccctcttctggtgtgtcaaaaggcagctacagtgtacttccttatagtaataaataactctttgggctggagcaagtggggccagagcaagcagaggtcctgagttcaattcccagcaaccacgtgatggctcacaatcatctgtatagctacagtgtactcatatacataaaataaataaataaatctttaaaaaaaaagaaaaacttcatgattatattcacatgcagttccatactcatgactaacacagtctagccattgctgttattcttaaaaagttagaagaccagggctggggatgtgctcaattggtagagtgcttgtgtagcatgcttgtgtagcatgcctgggtttgattcctagcgctgcataagaacataaggttgtgcatacctgctctcccagcacttgggaagtataggcagagatttgaagttatcctcagtaagtctgaagccagctggggctacatcagactctcaacaaacaaagccaactggatacagtagcacatgcctataatctcaggattcggaaggcagagggaaaacggattcagaaaaatagagggtatcaaccattgccccgaggactcttggagacctattcccaagacaagaatattaccactctgtcccttagcttcctatgctctagaagacagagcccacagtgtgcccattcatgccactgccttctgtctttctcattggcttagcgtttggttatctttttcctctatcaaggtgaaagacagcagctggaattctctggatgagtcagacttacccaaagctctacttccaactagacacgactgcctataatatttaatctttttaaatatatctaatgtttataccaataaatgacacctgagggggctggagagattgctcagcggttaagagcactgactgctcttccgaaggtcctgagttcaaatctcagcaaccacatggtggctcacaaccatccatgatgagatctgatgccctcttctggggtatctgaaaacagctaccgtgtacttacatatattaaataaataaatcttttaaaaaataaaataaatgacacctggggtaagagcgaatgtaaaaacctgctagctcagtcattaactttgttttcctaactgtatacaaaatatctatttacaagcctgattctacaattgaactgctagaaatctctttccatatgggtcattctaccaagctagtctacctttctcatgagctcctccagacccagagggctccttagctctctttccgagaattctgtctcacctgtgtcctgccagttgctcctacaagcccaaatcggaaaaatcactcttacctggagcttcttccaagaagccaagagagagagagagagagagagagcgcacccaaaaactcaagccagtgcagagctctcaaaggtccaattgctatcaaagtctctggatcttccactgcaccattggcaggctgagcacttgggggcaagacaaggccatccagctgattttgcctcagtcctcacccaagcaatttaccttaaaataagcagaacctttccattctttttgtttgtttgtttgtttgttttggtcttttcaaaacagggtttctctgtatagccctgtctgtcctttgtagaccaggctggcctcgaactcagaaatctgcttgcctctgcctcccaagtgctggaattaaaggcatgcgccaccacgcctggcttaacctttccattctttagcattcttatctatggaggcttctagaggaacacccaaacttcctgtctgcaggacacacctagctacatctgacaaacacagtatctttttaggttttcgtgttttgctaacaataatgttttctatgaacaataatagaatatcctataacaactgccaggctgctttccctgtcagatcattgttcttttaacttggtaagtaaggggtttcttgcccactttcagaataaggaaactctcacagagaacaggtggaagatactttcccctgggaaatctccctaacccacatacacaacttaatggtttgttgtttgtttcaagacagagtttctctgtttaacagccctggctgtcctggaactcactctataaaccaggcctcgaactcacaaagatctacctgcctctaccttctgagtgctgggaataaagtcctgcgccaccacgcacagtcacaatactaatacttagaggtagacagataaagacttggatcccagcttctgatcataattagtttataagctcttaaaaatggacagtaatgcctcctcggttggtcagacagaaaaatcccaaaacagtagttttgctattatgatgatacaacatgggttaaattgtttgaatatttacaaggtaaagttaaaaagaaaaaaatacccaaaatatagagctgggataatatgaagaagtagacaggagcgcagcagaagtggaacccagtgccccaacaagctgcacagagattctcactggttaaatgcatcaaggccttgagcccaacctcattttccaaaactcaggaacccagtcccacctagaaatcattttacatagggagggagtttgactcagactggtaaagtcatagaggtgtgtactagacgtctgtggcctgtgagcaggacagatctgtttgcctgataggcacaatcattctctagaaacaagcttcataggcaagcggctgatgaggaggtacctaggaaatctaacagagagttcagttctagttcttcagagttcaagggcagcggtctgtggtgctgaggaaaggaaatgttcgtttattttaaggcaaattgtttgggagaggtcttaaggtctttgctctatgacccaggcaaaatcagctgcaatagaaacacttaagagaacccagatcttgtaggaaaaaatggtccctctgccatgggaagccctaagttgtgtggccaggattccttcagaggcctttggtattttcaactcctgagcagggtgacttcagtggatggcccgctggaaggacaatctcttcttcctcacttctgagctcatgagtttgtgaagaggacggcagaagctaggacagaacccacacatgccactttctcaaagccttgctggcagctgcggccacaggctacgttttgaaacctcaattactctctagtttctgtttctcctctctctctctctctctctctctctctctctctctctctctctctctctctgtctctctcgtccttatttggaacaagagggaggatatttaatgaatgaggcaatctgtcaacaagtgtggttaaaaacattttcaatgattcccagctacacccagcctcaaaacttgccctagatttgggcacaaactggcagaggagtggtcagcagctcgcccttcagctccacagcctctctctctcagggatctgcctaggtacttttgtcgtggagcctcagagttatggcttggctgggccacaggcatttcacaaagctgccttcttgccccccaaaagccatcaccaaaacaccacgattggaactgggactgtagcttcggtcggtagagggcttgaatcccttgcaggaaacctggggtttgatctttggcactacaaataccaacaaaaccatgatcgggagatcctaggctacttgcttgcagaagactgtctcagggtctgctgggccgtttgttgggtcgtcttatgagttccgaagcatttttcctctcttgtttctaggatactgatggatctccaaggtctggatatttgaagtccaactcctatgctcttaggcaattgtctggtacaaggtcatttctttggcaagtgttggttgggtgcatactgtaggcatcaccaagagttgcctggcagtagcaactaggatgcataccacatcctctgaggaaggcacttgccaaaaatgtttttccggctttattaatcttgaggaaacaatcacacaatcccgaatgcgagactttctattgagacgactagactagtcgggtttgtttttggagacagaacttggcttcatagctcaggttgctggcttactcttgaggaagaaaagcaatgttatttagaaagaagggaagccaggaatggtggcatatacctttaaatccagcaaaaagcagaggcaagtgaatctctgttaagtctgaggccagccaaagctacatagtgaaagtttgtctaaaaccaaggttggggtggggggttgctacaatttctgtagtggcagcaacagtgtatgtctctattagtcaggcttctgtgctgtgataaaatttctggcagaagcaatttaaaagaggagagacttagttcggttcagtttcaccacatggtagaggtagggatacggaggtgcagatcggatggaaccctggagaccaggaagcagagagaggacgcatgtgtttgctgcaggatatttgatcacattgtgaaccccaagattgtgaactaggaaaaaaacctattgtggtgtggcccagccctagcacacacatttaacccaagagctttctataaacagggttaaataaagtcaaccgtatgtccagagcctgagcaagcaactagttgacagggagtgaacctaagaaaacccaggaaagagaaaggaaaggcttgagttgagttgcagcctggagaaggagccctttccttctgggaaggcggtggagtaggaaggtcagctgggtgctttctctgcctctctgagctggcaggctttcaccacagcatctggttatttggtaaatcaaacatttggggttttgttgtcaaaagccgtgtgtggcagcaggctccccactcttccctctttgttctctcctggcttctgcctatgggatgatgcctctcacatatatcacagctctccccctttctgaaaaccccctcacagacacaccaggcatatgctattaattaatttgtttgtttgtttattataaatttttatttatttcccatgcaggaaactttgggcttaatccctagcactgcaaataaacaaaacaaacattatcaggagagctatatgcctacagaggacccacagcctccccgttgtctgggtctctcctttgcctctaggttgctaggctatttgttggggcaccttacctgttatatatgtatacatacacacatatatgtacacatatgtaatatattatatataatgcatttatatataatatatttatatattatataacacatgtatatattttatatagatatatatttatataaaaatataaatatatgtataattattgattttgtataaatagttcaggccagcatgggctgcgacatgagatgttatgttgcacaacactctagttagctgcacatcaaataattaagtgaccaaaacggaacggcaagaacaaagggagaaattaactaagccagtgagatgggccagtgggtaaagatgcttgtgactcaagcttcatgacctgaatctgatcccctgaacttacacagtgggaggagtgaactgactccccaggtttgacctctgaccaccatacatcatgacacactctcacctgcacatgcatgcagagacacatacacaaaataattcatctattaattaaaacataaactaaccatcaaaatacctgagctgtccatgtagtaactactagcccaaggtattttaatggtaggttggggtctggagagatagctcaagtgcttaagagcactggctgctttttcagtggacctatgttcaatttccagtagccacatgtcggctcacacttggctgtgaatgcagtcccaggggaaccacttctcttctggtctctataggcactgcaagcatatagcacactgacatgcaagcaaacactaatacaaataaaacttctagagagtctgacacccggcaacctcatattgctggcacatttaaacacagtacaattctttttaaagatttatttattatatgtaagtacactgtagctgttttcagacacaccaaaagagggcatcagatctcattatggatggttgtgagccaccatgtggttgctgggatttgaactcacgaccttcagaatagcagtcagtgctcttaaccgctgagccatctctccagcaccccacagtacaatttgaaaaagtttccaggcaataatgattacagctccaggtacacaatgaagcttatcgagtgactagacagaaactcctttacaaaacacatttggccatgaagacaggttctatagtttaaggacctagggtctggtgtggtctctgactgagaaagcatagcaggctataaagtatgcggcatctcccctaagatgggttctatgcgctggaagctaaaggtctagagagagagcatctgagataaacactctggtagacttgggtgaggtctgactccacccatagcaaaggtcaccaggtcattagcagcatccactcccagctttctgggtgggaaacggagatttcttccactgaggagacactattaacattaacattccctcttgcttgctacatgttcccatggtgattctaaagtccagacgctgaccatcaagattaggccatcatcgttgataaacccagtgaaagagcaagctggtgtgaattgtattctttagcagagtcaaaaatatttcagaataaaagatgaaaagcaaaaagtgagaaacgaggaatgcagacatctatcaaaggagtggcgggtgaccgtgcaaaggtgaccattgtccctgattccaaactctgttccttgaagaactatttaactttgcaacatgctggttacctgtaagtcaaat

SEQ ID NO: 604 - DNA, 3698 bp, Mus musculus
atgtcctctaagccagagccaaaggacatccaccagccgaatggtactggccctactccttctccctgttcttcggatggccctgggcgagagcccttggctgggacctcagagttcctggggcctgatggggtggaggtggtagtgattgagtcccgagctaacgccaagggaattcgggaggaggacgccctactggagaacgggagccagagtaacgagagtgacgatgtcagcacagaccggggccccgcgccaccctctccgctcaaggagacctccttttccattggactgcaagtgctgttccccttcctactggcaggctttgggactgtggcagctggcatggtgctggacattgtgcagcactgggaggtcttccagaaggtgacagaggtcttcatcctggtgcctgcactgctggggctcaaagggaacttggaaatgaccctggcgtcgaggctgtccactgcagccaacattggacaaatggacacacctaaggagctctggcggatgatcacggggaatatggcccttatccaggtacaagccacggtggtaggcttcctggcatccatcgcagccgtcgtctttggctggatccctgatggccactttagcatcccacacgccttcctgctatgcgccagcagtgtggctacagccttcattgcctccttggtcctgggtatgatcatgatcggagtcatcattgggtctcgaaagattgggatcaacccagacaacgtagccacgcccatcgccgctagcctgggcgacctcatcaccttggcactcctctcaggcatcagctggggactctacctggaactgagtaaggctaaggccactgagaatggcttggagcactggcgatacatctatcccctggtgtgtgccttctttgtggccctgctgcctgtctgggtggtgctggcccgaagaagcccggccacaagggaggtgttgtattcaggctgggagcctgtcatcattgctatggctatcagcagtgtgggaggtctcatcctggacaagaccgtctcggaccccaactttgcaggaatggctgtcttcacacctgtgattaatggtgtcgggggcaatctggtggctgtgcaggccagccgcatctccaccttcctccacatgaacggcatgccaggggagaactctgagccaactcctcgccgctgccccagtccatgcaccaccttcttcagccctgatgtgaattcacgctcggcccgtgtcctcttcctccttgtggtcccaggacacctagtgttcctctacaccatcagctgtatgcagggcgggcacaccaccctcaccctcatcttcatcatcttctacatgactgctgcactgctccaggtgctgattctcctgtacatcgcagactggatggtgcactggatgtggggccggggcctggaccccgacaacttctccatcccatacttgactgctttgggggacctgcttggcaccggactcctggcactcagcttccatgtgctctggctcattggggacagagacacagatgttggggactagcttagccattcagtctttcccccacccctctgcactttctatttggatttttattttccttttgtttccctaccccaccctacactacactcccatgcctttctgggatttcactttgataccaaattctcattattttcaatgggaattttttatacattgagccaagtttggataggaagaattcgggacagacagatgggctgacataagcagtaaaagtagacttttgagacaatcaccaagtgcaattccacggtgggtgcctccagaggaggttagatcgggaccttggcatcctgtccagcatcggggacctttgcattagctttagcgacctcagcctcggccctaatgagaaactctcaagtgggctctgggttgtttagggtttggctgaacagagggaggagggataattaacactcccacacatgcacgcacttttatagatgtggaccaacttcacagcactgggcaggggaacgttgcttcaactcctcgtaatcacaggcctgctccaggccagcctgcccgcagagtcacgtgcactggagattccatctgcgcacatgtgccttgcccaactgcctgattgcttcccagctgaaatgagtggtagtgacccgggctcttcacggatccatgtcatccacaggtttccaaaggtccatgtgccccctgagtctagagaaccgagttcaagcctcctctctttaattctctccacacactccgtctccgcgcagcttgccagatgggcttctaagattggggataggacaagggaatgtgccaaatgacctggagattgaggcaacggggaggggtggggggtgtctcactgccgtctctcatgacataatcacgtggtcagtcttggcctctgtcacttcctaaacacactcattctatcacacgagggctccgttggcctttctctcggcttctgcccacagacatgcatcaaccattcactcattcagcaaatctcagcctccccgagatgagcccttccacagcaccggcctgcaataattcttcactgagcagtcgttacggggcgcatactgtgctaagttcagtgcctggcatcaacccaccagtgctaagggaatcgctgctctaacctcacctcatcccctaggctacagaggccattgtgcctcttcaacctgacagtaaatgttccctcgttcgcccctaactctgcagtgactgccaaccccgttgctcaagcagcagcatgtcctccaataccctcctcccgcagcctctctcctctccacatcttgctacccactcagaagagggcttggaattagcaagctggatatcaataggctgcttcagtatctgcctcgtccatgattcaaagaaaaccaaagtcccttccctacacatgccccaaactgttcaacaaatggggtgcaggctgtacttctggcctgtctgtctggaatccataaattcttccccctgtgtagcctaaagggtcagcctccaagaaaaggattaagcagtgctccgtgtctaccaacactgtgcttagacctagagactcttctcggcctcatttcctctgtcatcacctgaaatcagaactgtcgaattggacagattcatagagattgtctagttggggttgtgtcaggcagatcagtgtggatctgagtttatttctgctcttccctctggcctaactccatctcaaaacacaagactcttgcacaggcatcataccctaagactgtgaccccagggtccccagccacttgctctatcctgacatctggagttggatcaggctgtctggagactgaagcatccttcttcctttgcctagaaaacagaaaggtaggggcgcccaggctcagcgcatgtgagtggaggggcctggagtgacaggagagtgacttcaggagattcatttcttcccaccgggttgcacctattgcatgtacttttggcctgactggaagaaacaaaattggtttactttcatatccttcaaaagttacagaactgtgtcttaagagaattatttatagttactataactgaattgacaaatgtcgacttaactgataaattatatttggtaaaataaaatggaagtttatttcaat

SEQ ID NO: 605 - protein, 516 aa, Mus musculus
MSSKPEPKDIHQPNGTGPTPSPCSSDGPGREPLAGTSEFLGPDGVEVVVIESRANAKGIREEDALLENGSQSNESDDVSTDRGPAPPSPLKETSFSIGLQVLFPFLLAGFGTVAAGMVLDIVQHWEVFQKVTEVFILVPALLGLKGNLEMTLASRLSTAANIGQMDTPKELWRMITGNMALIQVQATVVGFLASIAAVVFGWIPDGHFSIPHAFLLCASSVATAFIASLVLGMIMIGVIIGSRKIGINPDNVATPIAASLGDLITLALLSGISWGLELSKAKATENGLEHWRYIYPLVCAFFVLPVWVVLARRSPATREVKGWEPVIIAMAISSVGGLILDKTVSDPNFAGMAVFTPVINGVGGNLVAVQASRISTFLHMNGMPGENSEPTPRRCPSPCTTFFSPDVNSRSARVLFLLVVPGHLVFLYTISCMQGGHTTLTLIFIIFYMTAALLQVLILLYIADWMVHWMWGRGLDPDNFSIPYLTALGDLLGTGLLALSFHVLWLIGDRDTDVGD

SEQ ID NO: 606 - DNA, 41199 bp, Homo sapiens
  misc_feature (1)...(41199): n = A,T,C or G
aattagccaggcatggtggtgcatgcctgtaatcccagctactcccaggaggctgaggcaggagaattacctgaacccaggaggcagaggttgcagtgagccaagatcatgccattgcaccccagcttgggcaacaagagtgaaactccatctcaaaaaaaaaaaaaagtaaacagaattgccatatcacccaacaatggtatatggtcaaaagaaattaaacaaaagatattcaaatgaagcttatatatgaatgttcacagaggactattcacaatcaaaaaaggtgaaaacaacccaaatgtccatccatggatgaatggataaacaaaatgtgttgtatccatacaatgggatattatttatccataaaaaggaatgaagtattgatctatgctacgatgtggttgaaccttgaaaacatctggatagaagaatatttaagggcaaaaaataaaacaacaacaacaaaattaagttaagtaaaaaaacccattcgcagaaagttacatattgcatggttccatgtatatgacatatccaaaatagggaaatctatagagacaaaaactgactagtggttgactaagcagggagaggaggggagggaaggggagagtgggtactgactgctaatggatacaggatttctttttggggtgatgaaaatgtcttaaaactagacagagtgatggttgttcaacactatcaatataataaacaccaatgaatagtacattttaaaatggttaaattcatgttatgtgaattttacctcaaaaaataaataaatccaaaaaaaaagttatttaggaggtagagtcgatggatggcaaatggtgattgatgggtggtgggcgaggaggcggggaagtagaggaaggagtcaagaatgactcccagatggctgacaaacaaatgggcgagggaatcctcttttctgggatggagaagacagaataagaaatagacatctgggagagaactagcgcattttggatatcacaagttggaagtgctgagacatccaagttcagagctcagaagagaagtctaagacaaagatatttgggcatcatgaacagagcatcataaatggacactatgcaagtgaatgagactccatatgtaacggtctgacagagaaagaaggcccagatgtgtaaattacaaggtgtcagcaaacatcacagaaattttaaaatataaggtatttcaaaattaatataaattttaaaatataaagtctctgtgttcaaggactttgtgatcaagcataaaacaatacgttcatgtcaaagaagccttcagctctgtaacatatcaccaaagcctaccatttcatctttcatttaacacgtccctacgtgcatccaaccacatgttgaagaacctgctgttccttgaaaatgccaaattctcccttgccttcctgccatttcactctgttctctctaactggaataattctttcccatttccaattcttttaggcatatacttaggaatgaaattgctcagtgatatggtaattctgtgtttaaccttctgaagaaacatcaaactgtttcctatagcagctgcaccacattatattctcaccagcaaatggacaaggttccaatttctccacactctcaccaacacttgtcattttctgttattttctctcttttttttttatggccaacctactggatatgaagtggtatcccattgtggttttgatttgcaattctctaacaactaacctaaataacttttaaatctatttaccattctccaacccactgacctcattttccacctgatatattgcaacagcctacctcctagggtaattattaggattaaatgagtttgcatataaacccacacagtcagattcaatcaaagcacctccatgtctttgaagacttcctgagccttgccttcctgtgacaaaatatacctttgtcacagtgtttcctcctgtgacaaaggtatatttttgttaaagctccccaggagattctaatatgcagccaggactgagaaccaccagactggggcagtttcccaacccagtaggatcatgggagtcacctggggcacttatttaaaagggtaggtttcctggcccagcaccagacgtttggaaacagaatttccaggaaagaggcctggaaatctatattttaaaagaagttcccaacaggtgattcctatgaccaggccagtttaggaaaccctggtctagaggataatcctagagcagtaggcagtaaacacagagggcagtttgaaactaggtaatctggtttgcaagatacagtctttttgcatcctggctcttgcaagataaagtttgctcatctttggcttgtgacccactgtggggttgctgcccctattagctcctacctgcatctatgtaagagactgtccatcattaaccctttccaggtaggcatgccctcacactctgggaagtctaaaatttcacgtgaggcccagaaaaagcctgagctgcccgttccaagtgcctaatccctgtttattggctgtttctctttggtgagatcttaacagtcctactgcgtgcagggaatgttccaaatgctatattatcctaatcctctcatcatctgtgaaggctaatgcaactccatcttggatgctaatccaccatgttgacttctgattaactccagttctggaaatgcctctaagatttctattttatctactattccttggtaagaccatatacttatcataaatcctgctcttaggttaaaacaactgaccataaatcctgcccttagggaacttcacatagcattctcgcctttccctacaattgtcctacacattccttccctgtaaggtataggtattccttccttataaggtattcaagccctggtcttactgctgtccgggatatagacagggcttctgttcgcaagtccctattaaatgcttctttcaagaaaccagatttgtcagcctctttggcctctgagctttctcagactttgggggtaggtttgcatagaactgctcaccatggaacatatattgcagaaagggaattatgtctccatttgatagacatggcccaaggtcatgtgcctaatgaattgctgagccattcatggattcaaatccatgtgattacaatgctgtggcatattccactctgcagcactgcctctcaaagattacttttctatccccagttatagttcaccagaccattttgtttgctgtcaaggcttcccagctatactcagtaaattcagagctgcagctccaaatacctggaaccatcctgcctaagggaatcccagggtgggtatccagggggctttggggaaagggagctcagttatagagaagcaaagggaatgatgacagtgctgagcacagatggccacacttccctatcccacccccatcactacatcctcctaaaactgaatgaagccggaaggggatgtcacctcagctctgggcagcaggaaagaagttgacctctgggagggagggagcagcggaggggtcacagcaaggggaaaaatgggagggggcaccctcccccacagaacaaaagatagaaaagtttccagccacgtcaggctagtcttacaactagccatgctggttagggggtccaggatctatggggctctggaattttatgatgtctcaagatgagtattcaggtagtctatggagaagccattggtagacagtacttggcccagaaggaaggccatggggctaagagaacctcaggatagaggctaaattaaccacatattaggacaagtgccaagcaagactgaagaatgctgccccacagaggaccttcccacacaggctcctccacaggcccctgcctgtggagtgatcaacaattccttttgccacaacactctttcccaccccacacccaacatatgctcatattctaaatgaaaacactgtgcttgctatacaaatgatgtttcatgacaagtcacccagcctctctccaactagatggcgtccccaagctcagtttatataaaaatttggggtgctactactagcttctagttaaatgccacattatgttctgaaagacatgaggaggggatgctgtgagtttgttagggtggtgcaaggggaaatttctgtctcccagagtaacaggaatcagtgagactcttgaccagagctggtcaaggatgctggagagaaacacagcaagagaaaaacgctgtagaatgcaacaggcctatgaaaacagtgcatggagaagaggctgattcggtggtcttccatattcaggatggacattacaggccatgaggaagttaaagctgattttaaaaaaagagttgcccaatgcaggttaggaataagaccctccaaccaaagtttcagggaacctcctttggagaaagaaatgtgtttctaggtgtggaagagctctcttggctaacaagctcaaagactgggcatgtcttgaggcaagagagagtccacatgacctttggaggttcttgtcatacaaaggtccacagtgatgctcagagaccctcactatctttttgatacccccaactgcgtctctccttctgaagtatctggctggcctgctacttgctggtagttcctgtcttttcatctgtgacctccgctccctacatctgtgctcatcatttcacagactgtagctatttctgctctttcagtagagaagggccaggatgtcttcctcttcctaaggtcacagctggctaagccagaggaaatctgcttcccccaggtcctcttggtgtttgactctagggatcagcacaatacagagcaaagtacctacatcagctttatccacctcatccatcattcattcaacatatttattaagtacctactatgtgccaggagctgggtttacactagtgatcaaaatagatatagagattatattcttgttccagtggccctgacacttcagaagacaccaaaaccaagggcttttgtatttatttactcatagaaatatttgcaatacctataaccaacaaaggactcgtatctgatattcataaagaactcctacaaagtggtaagacagggctgggctcagtggttcacacctataatcccagcactttgggaggccaaggcgggcggatcacttgaggtcaggagttagagaccagcctggccaacatggtgaaacgctgtctctatcaaaaatacaaaaattagcctgtcatggtggcatgtgcctgtagtcccagctactcaggagactgaggcaggagaatcacttgaacccaagaggttccagcctaggcaacagagcaagataccatctcaaaaaaaaaaaaaaaaagtagtaagacagaaggaatagaataatagaaaatggacatgatacttgaacagatatccaagggtcaaataaatgcatggaaaggtggtcaacttcattggttatcaggataaagcaaatttaaactacaataccactatacacccaccagaatggctaaattttttaatttttctagattgacaatatcaagtgttaatgagaatatagagcaactggaacactaagacgctgctggcaggagtgtannnnnnnnnnnnnnnnnnnnnnnnnnnnnnnnnnnnnnnnnnnnnnnnnnnnnnnnnnnnnnnnnnnnnnnnnnnnnnnnnnnnnnnnnnnnnnnnnnnnnnnnnnnnnnnnnnnnnnnnnnnnnnnnnnnnnnnnnnnnnnnnnnnnnnnnnnnnnnnnnnnnnnnnnnnnnnnnnnnnnnnnnnnnnnnnnnnnnnnnnnnnnnnnnnnnnnnnnnnnnnnnnnnnnnnnnnnnnnnnnnnnnnnnnnnnnnnnnnnnnnnnnnnnnnnnnnnnnnnnnnnnnnnnnnnnnnnnnnnnnnnnnnnnnnnnnnnnnnnnnnnnnnnnnnnnnnnnnnnnnnnnnnnnnnnnnnnnnnnnnnnnnnnnnnnnnnnnnnnnnnnnnnnnnnnnnnnnnnnnnnnnnnnnnnnnnnnnnnnnnnnnnnnnnnnnnnnnnnnnnnnnnnnnnnnnnnnnnnnnnnnnnnnnnnnnnnnnnnnnnnnnnnnnnnnnnnnnnnnnnnnnnnnnnnnnnnnnnnnnnnnnnnnnnnnnnnnnnnnnnnnnnnnnnnnnnnnnnnnnnnnnnnnnnnnnnnnnnnnnnnnnnnnnnnnnnnnnnnnnnnnnnnnnnnnnnnnnnnnnnnnnnnnnnnnnnnnnnnnnnnnnnnnnnnnnnnnnnnnnnnnnnnnnnnnnnnnnnnnnnnnnnnnnnnnnnnnnnnnnnnnnnnnnnnnnnnnnnnnnnnnnnnnnnnnnnnnnnnnnnnnnnnnnnnnnnnnnnnnnnnnnnnnnnnnnnnnnnnnnnnnnnnnnnnnnnnnnnnnnnnnnnnnnnnnnnnncagccttaattccccacccaaccccacaccccgtattcacaaacctcatctttctggacaagtcccagcatttcctagactagcagctacttctcctggcagaaaaacccagtatttgaggccaaaactggggtctgagacactgatattttgctctagtaggtcctgtgagtctgcaggcccttgatgcaaatgctccagagctgatctggaatcatcctgggggtactggtttggggtgggtgaggggaacagggtttggtatgtgtatttgtcatccttatcaaaaggaatgacctgctcaggttgctgtgtgtgctcttgtgagcacgtgcccaaagcttcatacacagcactgcgatctcttctccccaggcacatctccgctccaaaccctattcaggggtctagagccatgttcgaatgcccccgggctactttcagggaggaaaaggacaggaaggaaccgttggtcacaggttccactgacaagaggggaaaacttgggagtgggggttcctttatgagggaggtcacaccccctgcacaaaaacatcccaaagagaactggcattgagcttgtgttggagaggtggagataccccagggaggaagtggcgaaaggtgagcatgggaacacccctctttgatcccacaaggtgcgtcagggaaagttggatttcatttagtccgggatggtgacatctctccgcacgctgccaccaggctcagtgggtcagaggaagtgaggctcccctcctctccgacctcaggtgatgcgtgtgcgaccccagccatgggtctgacctcctttcgctcccgcccgccagtctccacccctttcaaggccgggacttttttaaggccggattcgtcaggggtgagccatttgctcaaggaacgcggaatctggagggagcctaaagtgacgagccggcgggagaagagcaaggtagggactgttctgtccgggtaccaagtgggaggagggagcacgcggctggctgcttgagcccgggggtcagaggtggctggctggctggctccacagggacgtttaccggtcttcccgaaggccagaggctccaaggaaacatccagaggcaggagaggacgcgcactgtcgcacacgcctctcaaagtctgctggggctccgacgcggcgcagcgggcccgggggcggtagcaccacgcagcgagcccgggcagcgggcccctcggaccccgggccgatgggcgctgggacccgcgcgctccaggcgcatggagccggctcccggttcccgtcactcctcctactgcgtttccccggcgccccgcctcctgggcacgaagcgaaggaagggggccgggccgaggttgatcccgccccctccccagtccctgattggctgctgctgttgtccatccgagaatctatttttgatggagcggggggggtgccacccagtctgccccagatcacgtttgccaccggcagccaaccagttgggcccgagtccgcgggcaagaagcgattgggggcgcgtgagctcggctccccggtcccccgtccgggtgcccccccgccgggcccgaagcgatatatcctgccctccccggccacctcccccgcgtggaagcggagcggcggcctcgctgtaacgcagaagcgaaatgtagcgagccgggtgtcgcggctggacgctcgccttggctgggggtgtgggggggcacgccgggggccaaggaggactgtcgaggaggagtgatgagaagagggggtgccctgcaccccccgagaccacgggccacgctgccacttgccaggcgccccccttcctcccaggcgaggggcaggtcagtcctgtggggtcctggggcggggagggggtggtggagggcggcagtcctggcgcgcagcgcatttgctgaatctgagtggtggagagactgaggaggccacccagttactttctctccctcctcggggttggggatactaaaatgggtcttttttgtccccgcctgggaggaggggatagggcgtcctggttcacttttgcttctttcgtcccagggccttaggcctgtctgaagtctctttacagggggagtggtgagggaggactggcttcccctcctgggagccccctctcaggttcagtggcctgccaggaacacaggagggaggcgggggtgtcagcttttagcggactcagaaacttttctggcataggggcactggactcagaggtttcctcctggatctctggtgagggagtttgaaagaaccacagtactgtgtttaaggagattggaaaagggagtcctggtgggtgactgaattgatagaggaaacagttctcctgggccagttcctggggtttgatacctcctttcctaaactgaacttgactaattgtgtgtgtttggaatacttaaggacctgttcctcttacctggtggaactctctttaaatttattttttacgaataagagctcttctggtgaaatggaataggatgggagtccatcaggaattaggaagcctggggattcctttaggcagagaagtggagccattacagctaaagagatgcatttggagcaagtgcatattggcttacggtgctttggtttttgttttgggttttttttattgctacttttgtttttttgtttttgtttctaagaattccactatatccaactctcagtaaccctggggaacaggaggagcctaattaactgaaatgcgtgggtaataagcaatcgttttatgctctgtcccttctaactgagataactcccttgtcctatctgacaagctcacagggccaagagcagggggagacggggagagacagaggcctggatccgagtcagctgtctgagctctttgtaacactgttgactctcaagggcaggagtgggtaggcctctggctcttggccttggtctggcaggcttgccccactgcccagggagtcctcctagctttgttttgttttctcagaagctagaacgatctggggtctgggggacttcactcagcaatcagtttctccctatttctttgccctgtgtggctgtctttctgttgctgtcttgtgatgataagcagtcactttatacaggggtggctgtgtggcagggagtttgtgactgaatttgtaactgaaccccacttaaataatgcagggttcttaatgggcattcaagaaggggtcttgctgaggacacacctacccacccccagttgctgaggaaacagtgcagagggcttctgcacagcatcttcccaatcccaggctggtcacatctcattgctggtgaccacggtggtgatccctcaggagggttgctggtggggaggatggcggggatagctcctgctgagcctccagatggagcagtgcaggactgagtaatttttgcggaaaaagggaggcaaatagcaaactctatagctatatgatgaactcctaacttccttggggggaaattctcccagtacaagctgtcctttgctatagtgtaatgttctttttcttttctttctccttcccacataaggtgttccacactgattctcgtgactttaaggaccagggatttgaagaggtattagctcttcccaggaagggaggaagtttctggaagagaagggaaagacggcagacgctgcgctgggaccagcagagcctgaggagctgtgggaagctgacagagcccagccaaaggagcgggaaggagccgcagccccaggctggcactgtgttctgaaagatttgaactcaagctgctttttacggaagaggggccacttcagagggcaccccagaatttggttgagctcttctactctggatgccccctgctctgaggagcctgccactgagaaccaaagaagataagaggacagatactttttcttcaagcacagagctggtgggttggagtcaggcatctgcacccctagtggctgtctggtgaggaatttcttgtttcttcccagcttgcggcttcagtgcttgatggggctgcctgttggtggatcagtttttgcagtgcctggtaggagtggagagccgtgggaagaggtcctgcggcgcccaagcctgggttcaccccaagactaagttctttcccaagttagagaagaagagagaaagcaaaaagaagagaggaaagttctcccttcccctcctccgtgcctgtcatgtcctctaagccagagccgaaggacgtccaccaactgaacgggactggcccttctgcctctccctgctcttcagatggcccagggagagagcccttggctgggacctcagagttcctggggcctgatggggctggggtagaggtggtgattgagtctcgggccaacgccaagggggttcgggaggaggacgccctgctggagaacgggagccagagcaacgaaagtgacgacgtcagcacagaccgtggccctgcgccaccttccccgctcaaggagacctccttttccatcgggctgcaagtactgtttccattcctcctggcaggctttgggaccgtggctgctggcatggtgttggacatcgtgcaggtaggacctgagtagggcagctcttgactgtgagcccagggccacctttgcctgctgggaaacttggaacttcctctctacctccctgtcagaagtggctgctgcttcctagaatactgttttcctttggatcatgtcctcggtttcttcttggtctagttcctttctacagaagcctcaaggaaaccgagtagccctggggaggtgatcagggcagtattgctaaatagaaacagaattggctcccgagctcaggcttgggagaggagagatggaacagggtcgttgcttgccatctctcccaagcagtcctgccgagcccagctcagtaggagacatttacaagggtctcctctttatgccttttgtcccctgcatttggggtttcaaggatacccatagtagaaagctcagtttcaagcctctcctccatccccctactgggcaggaatttgttcagctgccaagagggtctcaaattaagtaggaaggctcttgaaggcattttgtgttgcttatcttcctgtaaccttggcataatccccttggggggtgggggtgggcacttgctgtctgatgcatgatttggagatttggtgtaacaagacccaaatgtgctaattatctgctgtaaatggggacaaaatgtaactaggcctgggcagaactgtctctcctctttgctcctcacctgtcattctgaacctgccctgggcaaagagggttctttttgaggacattgggtagaatgaaggatgagagtcggtgggacatggaatctaagagccagagatgtgccatgttaatttattgtgagtcaggacttatgaagaacctccaggtccaagagttaaagttttgtttttagataaaagttttttaggcacagtgtggcacaccaaactttttgaaggtgctgggtttacctaagtaattcagcaatgtgtatcaaattcctgctgaatgctggcctctgtcctaggtactcagagaaatattaataccaaggcaggaggagatctggcctttgctttttgggacccccagtgttccctgactgtgatatctcccagaaggacacgaagcttagcatcaccttccctgtgccaagccaaccctacagaccatagtgatatagagttctgctggtaggtctcaccatgcctgtgtcctgggagactgaagggggttggttcttgatagtgtgtgcacatggagaactttgacttgagcccttcaggggaaccctgcacctttggttgctcatgagagtgctgtttaagtcatgccaaagtgccttgcactgcctcccctttccccaaaactgttatcttgaaggttgttcctacatggaggttgggaagccagcctggagctttgggttcctcctgctaggggctgctcctccccctagggccgggactgggacagtaggaggaggagaaagagactagggtaacatttttcttcacctcttctattcctttcctgtggcctcagttctcattcttgaagttgttgcattctggtttgatacctacaaagggttgcagagccagggtccagaggtgaactgaagagagttgtcttattttctggataatagtaatggtagtggggaagcatttggggggctcttcggtaggcccatgaggtaggatccataatcatctccattttgtaggtagggaacttgtagcttagagggattaggtaacttgtccctggtcatctgaccctagagcccacaccactaacccctgtggccttcgccatggccatggttcaccagttggttaaaaactcggagagggggccgagctcagtggctcatgcctgtaatcctagcactttgggaggtcaagacgggcggatcacctgaggtcaggagtttgagaccagtctggccaacacagtgaaaccccgtctctactaaaaatacaaaaaattagctgggcatggtggcaggcacctgtagtcccagctacttggaagctgaggcaagagaatcatttgagcccgagaagtggaggctgcaatgagccaagatcgtgccactgctctccagcctgggtgacagagcgagactccaactcaaaaaaaaaaaaactctggctgggcatggtggcttatgcctgtaatcccagcacttttggaggctgaggcaggaggatcgcttgaagccaggagttcaagaccagcctgggcaacaaagtgagaccttgtctctaccaaaaaaaaaaaaaatagtcaggcatggtggcattctcgtataattccagcactttgagaggctgagataggagtgatcacttgagcccaggagtttgaagtcgcaatgagctatgattgtaccactgcactccagcctcagcaacagagccaaacgctgtctcaaaaaaaaaaaaaaaaaaaaaaaagactctacgaggagcctattttctttgtctttccttgaagaactgggtggattagaatctggattaattagcgttatcttctgaagtgagcaagaataaaagttcttagatggggtagggagggacccccgcatacacaccacacccctacccatcccacacacttagattccaaagtttctgatgtgttgccccatccccactccaggcccatgagctggagacattgagaggcctgggtagggaacctttggagctgctctcagtgtggcacctcagctcacctcagagctagggtccacttggtgtggatgacaatgacaggtttgtccatgtcctcctcccccagccttcctgctacagctgggctggagcaggccctgcagatggcaacagtgagatggcaggagggggtgagtgcagagggaccgagacatgggaccacagggagattgttattccacatccatgggagtaaaagggggactgacaatctcagattcaggaagagcgggatggtttctaaggattcacacctatattaccccttcataagctaagatggacttcagtaagagaatctgaaagtgccccaagaccatggggccatctggagaagctggctatggagtgtccccagcatcttggagcaactgagcaggagtccatattgggcctggttcagatgtctccttggtccagggcccccatctttccttgctgctgtagaaaacttggtttctttttcaccaacgagatgcaaaaaaaataaaaataaaaagttgaattttaattttaatttaaaagaaaaagaaaacccactctcttcctagaagggtcatttctgcctcctcttatctgccctcccgtaaatgtgcacagcagcatctgcagtgaaataaggggctggtgctggcccaaagtaggaaaaggataaatggacctccatctgctctaacttcccaaccgtggctgaaagttcctgcagcatctggaagggaagcaggctggggcctggtgttggcttctgaagggggttgggatatgggagcctcctcactgcaggagccttgtgcccatctgcccagtttggtcctaggctgctccggatgtctcactccctttatctgtcagcctttgtgagggatggggtgacaggaagtagtgtgcccatctgcactttaattcccagctaggttaagacaggtccttattttaactcactactcacctgctaaggatcttgaacaaagtagatcctgctgtgtatacagaagtctacaacgatgaaagtgcatggcaagcgtggccttggggaagtagagtgggaaggaagtattcctcctgtgcctggcctgctcctgtggccgcagcatccctgggcgggacactcttatctgcttcacttgaccaccccttctgcttttcccatctctgtcccctgcctgctgtcagggacccatttgctttgctcctgctttgtcctgcaccgtatatccaggtgttgccctaaagccctttcctggacacctagaggatgccttttggaaaagcctcagacaggtgaagcctggggttactgtaatctcatctgacccagtccttaccctaaaagatcagctccagcccagcttctcccacaggagcccagattctccccagcctggagcctaaagcttgtatctgggaatttaagtcttcttaatgtcttgattcctggctctgactttcttccctgctgctaccctcctgaggtggctcaggccagaacccttgaaggcaggtcagggtcagtgtatgagcttggattggagtaggtgaaggatggaagaggcgcattggaagggcaaggaagaggtactggcaggaccactgaggatcgagacttaaggtgattgctgtgcctcaggattcattttggctatgggggaggcagtctattccctcacctgcagaataccagggatccatgagcccctcacaccaaggttagagaaggaaagagatgaggagctgcatttctgagaagtagttaaaatctagatgctcccctcacctccaagcagggcagcacttcctggaacatgccctttttcatccccatcagagcaggaaggcgtgggtggctgcttggcagacgggtgtgacttcaggggcagatactcctagcctggatgaacaggatggggctgaatttggccaaaggaggaagaagagctactcactgtctgcccctgcccatcctgtctactcctaaccttaaggccaccttgattcctgggctggctccacatctccagcctccagcatctctttccagagtcctatgcatgcccatgtgtcagaggctttctgcctgagctgcagctttgagagggtttgtgggtgaagaaagtatgtgtgtaggaattggcttctctgacccaagtgccaactcggggctttgctggcctggggtcaggtcgtttgaggttccaggctatattctgtaagagtcgggaagacttttgcataggggctgttactgtgactgctccctctccttgcctgtctgtctcttatcccactgctcctaacactccgtactttgtagatcctcctgtagctataaggagagggtgcattgtgctgggaggtagagagatttggggtgcttatggtagcaaccagaggaacttagctgagctttatacatttttcttaaataataataaaagcaagcaatattcattacaaacagctcagaaaacattgcttgcatacatgtggagtcttcttgtgggctttttctttctatgagtacatgtacattacatacacctacctgtagaagtcagattttcatggagctggcagcttggaagcagggtggagctggtgttttggggtgaagatgagctctgaggctgtgctctgagaggagctttgaaagcccgcaagggaggggagaagagggggatttttcccctctctggagctggtttgggaggaagcaggaggcgaagcagagcaaggccagactgcagggagctggagcctcagtggtatgtaccagccgtgtccaagagtaacagtccccaagttgctccagggcagatggggctcactggggctgccttctctctggggggtcttagggtgggaagggattcacttcccttcagtgtttggagagggctggctcatcctttggctgcctggaagcccagtaactgttgttgagatggggggcagtctcttccccattgttagtccctacggtggggcttccctaaggagagtcccaggtcttggccagaccagaagctcaggcaagcgtatgctccagccccagtgaaatgagtccttccccaggatcctgtgaggcctcccaccccattcacacagggagagctccgacaggaaaagagaggttcttgccttatagggccacccagcgcccagcctctcctggtctcaagccctagccccaccccctctgatagccttgcttatctttttggttattgtggtaaaaaatgtgtaacataaaatttaccatcttaacccttttttaagtgtgctgttcaatagtactacgtatattcacctcattgtacaacagatctccagaactcctcatcttccccagctgaagctctgtacctattaaacactcactcttttccctgctcccccagcgccttgcttccaccattcttctttccgcctctatgaatttgactacttaggctgggctcggtgcctcatacctgtagtccccacactttgggaggtcgaggcgagaggatcctttgagcccaggagttcgagaccagcctgggcaatatagtgaaacccctgtctctacaaaaaatacaaaaattagccaggtgtggtggtgcatgcctctagtcccaactacccgagagactgagatgggaggatggctggagcccgaagccatgattgcaccactgcactccagcctgggccacagagtgagaccgtgtctcaagaaaaaaaaaaaaaaaaagaatttgactactttggatacctcagataagtgttttttatctgagtgttttatcatacagtgttttttatgactagagtaatgtcctcaaggttcatccatgttgtggcatatgacaggatttccttcctttttaaggctgagaaatattccatggtatatatgtaccacactttgcatattttgtttatccattcattccttgatggacatttgggttgcttccacctcttggttattacatatagtgctactatgaacatgggcatattaatatatcttcaagaccttgctttctattcttttggataaatatccagaagtgggattgctggatcatgtggtagttttatttttaattttttgaggaaccaccgtactgtttttcatagcagctgcaccattttatagtcccaccaagagtgcacaagggttccaatctccacatgcttttttcttttcttgagacggagtcttgctctgtcacccaggctggagtgcagtggcactgtctcggctcactgcaacctccaactcccaagttcaagcaattcttctgcctcagcctccccagtagctgggattacaggtgtgcgccaccattcccggctaatttttgtatttttagtagaaacagggtttcactatgtttgccaggctggtctccaactcctgacctcaagtgatccactttccttggcctcccaaagtgctgggattacaggcatgagccactatgcccagcccaaactctacatccttgctaacactgattattttctgggtttttaaatagtaaccatcctaatgagtgtgaggtgatctcttactaatctacagtattgctcaactttattttatctattttattttattttattttattttattttattttattttattttatttttgagacagagtttcactcttattgcccaggctggagtgcagtggtgtgatcttggctcactgcaacctccacctcttgggttcaagcgattctcctgcctcagcctcccgagtagcttgggattacaggcatgtgccaccacggccagctaatttttgtattttcagtagagacggggtttctccatgttggtcaggctggtctcaaactcctggcctcaggtgatctgcccgcctcggcctcccaaagtgctgggattataggtgtgagccgctgcgctcggccactgctcatctttaacgacagagtgtgggtgttggaattgccttgaaagaccatctgatctggtccctgaattgaacatttttcaagagcttgaggcccttgtaacttgtctaaggtgtccagccggtctacgtgaggaggtgtactggggagataagcagggggccatccctgctgtctcctgtaggagacccaaggctcttggtccagtgcccttgccaaacatagtgcttggcctcccagccatgatacgcagaccaacccatatatatccgcctggcctcctgcctcctcctccctctccaaacctggaggctttccattcttaaaacaaataaaagaaaccacctaccctgttagggccagggagggagacacaatcctaaacccttttgcaagtcctcagtttcaattgcaagtaaagtagctttcaaatagccagtcctggttcctgcagtcctcttagcactaactagtggaatactgtctgaaccccagtttactcattcacaaaatgagaataaaaatagcccctaccttactgggttgttaagatgattaaaagagaaaatacatggagagcacttagcctagcacacaatcagtccttaatagatgttaaccaaagacattggtaggagagccaggattgattgtcttgggactagaactcaggtctcctgactcccggtccagggctcttcctacaggagtacacttgcttctcctagctgagagattgaggaaggtgtgtgggggtaaggcagtgcacagagaaataaaaagcctcttgcaggccagcattcagaggtttaggggccacagtcttaattcagagcctgttcagaaggagagttgctgtggctgaggcccaaagcccttggagatagaaaccaaacaaactctctaatctccccagcctcggccccagccctgtggagcccaactcttcacagctgagacaacagagaaactggactgaaggcaaaggggccagggattgcaatttgaggggggattgcaaaggatttctggggtgtcaggcagcccagggcagctcagctgtgtgggtccccattacccttccccacccacctccaggaaaacagaaaaggtagggccagactgagagtctcccaaccggcagaaaccctctccatctccctggttctgggtggcaggaaggggggttgtgttgtttgaagaatcatgggcttggtttggttccaaggttcttggaggaaaggtggctggcgtgctcactccctgctgattctatttcctcctcgagcccctgatctcagactacctgttgaacctcaatgcccgccctttggggcactgaaattcctgggttctgttttcacctcgtagcactgggaagtcttccagaaggtgacagaggtcttcatcctagtgcctgcgctgctggggctcaaagggaacctggaaatgaccctggcatcaaggctttccactgcagtgagtatcctggctgggaggagtggggcacagagaggactctgggcagcacagagccagagactgggagagggctacgagcccttctccactgcccaggcctggagtgtggggctggggtgggaagggagggcctggctgggcaggtgtagggagatcccaggctgggtgtcctgctcctgggcaggggctccctgcccaaagtggttcccaggcttggtttctggatgtcccagccacccctggactcctgccccaccccctacctctcaaccacctcgtgactgtttgtgcagctttgacaggcaggcatcatgctggttcctccacccgcacagatgggggcctcctctgatctccagccctgctttgcagctgggcgggagcagagccaggccctcccagcacccccagccccccggggccatcccattccctttacccatggcagcttgctcttctttaaggaaacagacagagaggagctgctcgtcattcctacctcccacagttgtgagccgtgacgattccgggcctgaacagatacagggccctgggctggaggtgggagatgataaaactcaggaggccagggatctccctgcagggtcaagagtctagagaaggtgacagacagaagtggcatccaagttaacccaccctgacttgccatacccgacttctggcccatgccacccactccttcccaaatactcttggagcctcagtcctgcaccagcagctgacctttccttccctgggatcgcaggctggcttcagagtcagggactgggttgttctgacccatgcaggaatgggctgcccagataagcagggcaaaggatagaatttgcctctgctcagctggtgtcctgagaggaagagaggcgactgcctaggggacccccttccaaccccccacccagctgcaggagcccagctttagctccttccctttcacctcagtttccctgatcctgcttcacctttccgggactgtcaggtcctgctctcagagtcttaggccacatgtactgcctcatgatctaggcaggagcctaatggatggagcttcaggccttttccagcctgaagctccagccccttgccctccctttcccaggccaacattggacacatggacacacccaaggagctctggcggatgatcactgggaacatggccctcatccaggtaagaaggcagggaccagagagggtgggctaagcttccccttagtcaggaatctctgaaaggcttaggtcagccccagcaggctcctgagtgaatctccagtatcccactgagctggcttcccccagagtagctctaggaggtaactaggttacccaggaaaacgcccaagatgaggagggcccagcatcacccattctggttctcagttcttggtggtgcacgtgcctttgagtcccagcagatcctggcaatatgagcagactcaggagtgctgagatgtcctgtgccactgctgtcccatctccccatgagaccacacaggttcagactgggagccttcccccttgaggcccaggccttgactctgggtggaagtctccggctctgttgaacctcactcccatccccagaggcacactcattcagccagtaacatgttctgggctcctgcagagtgcactgcccagtactagtggctggtgtgaacctaaataaataaagacatccttccagcctgggaggactggaccatgcagtccagcctgcctcctggggctactgccagccaggaagaggtctgcccagatgcttatgacctcagcttaggaagcccactgctctcagggctttctgagttaccactcctgtccccaggtgcaggccacggtggtgggcttcctggcgtccatcgcagccgtcgtctttggctggatccctgatggccacttcagtattccgcacgccttcctgctctgtgctagcagcgtggccacagccttcattgcctccctggtactgggtaagaaagggagggcatagaggagtaaggagtgccgccccagagaacactgcacctggcacttccactctctctttttgtttgttgagactcctttatctcttctcaccctgcctgcccctcctcccacttgctcaccaggtatgatcatgattggagtcatcattggctctcgcaagattgggatcaacccagacaacgtggccacacccattgctgccagcctgggcgacctcatcaccttggcgctgctctcaggcatcagctggggactctacctggaactgagtgagccaccaagagtgtggcttcttggagtcctgggtggggttgggagagatggtagtagtttgcaaatgtgcaagagtttcttctgtgttcttaaactatttggtttgaacacaggttgtaataattcctgatcttagagatttgaagctaagtactgatctcaaattcaagcaggcatcaggggcaggggaaaagtatcagaagtatattcctgtgtggtcctgcagattcttacttctcttggagggatgaggtggaaagggtaaaggaaaggaaccagaggcttagatctgcttgcaaaatgaagaagcgggtgggagatggtgttttctgggctccaatcaagagacctagagtctctgtcctctggtctctgtccctaattggctcagtgcctggctagctctctcccttggtttcctcatccataaaatggaaaaggcttgtcccacctacctcctgagctgccagtgaagatcaaatgggataatgtgtttactggcatttagtgtagtcttgctattgatctgttgggacattttcaggctgagccagggagaaacttagggtagggaaacacagtgcttatctccttctgacctctgccctctcagatcactggcgatacatctacccactggtgtgtgctttctttgtggccctgctgcctgtctgggtggtgctggcccgacgaagtccagccacaagggaggtgttgtactcgggctgggagcctgttatcattgccatggccatcagcaggtaggctggggccctgagtatccactcctaccccactccaacccttccacagacttctttttaaaccctggagagatggggtgggggtcagaccctagaaatgtgttcattagtgtttcagtcacatgtccttctgttgaaaatgacagaaaccatctgaactgggtttcattccaaggcagaatgtattggcctggagaaccaaaaaggcacagctgaattcagcgacatacctaagatcagggccccagtactctgtgactcttagctctgctcttctctgtcatggcctacagcccaggtttatgcttttcttactcctacaaattccagtgggaagagagattcttcccccaacagttccacaaagtcccagaatagagttccactgcttctcatctggtgacatgattatctccaaaccagtcagcgtggccttggggctgcaatcctctgattggatggacctggagcctagctatcattgaggcattgtcacctgagccacagtcactgagcttgagagaggtggttccctgtggaggagcccagtgctatcaccagaaagggaagtaaatgctgagtgggcagaacaacagaggtcctcagaggcagatagtcctgcaggctgctcctccggccaacttagagggcaggtacaggaggtggttgcctgacccagtaccaccagcttgttctggagtcactgtgcccagtcagaatgttatgagcagcacctaatcctgtcaagggaggcaaggactggatggtgaggaactcctgagagccatggtgcttcccttcatctccaaggataggtgggcctggacctctcatcccagagactaaggcagaacccttcagtggtcttgcgtcattttgtctttatgtctctatagtgtgggaggcctcatcttggacaagactgtctcagaccccaactttgctgggatggctgtcttcacgcctgtgattaatggtgaggtctgggcatcagctatcagagggcagggctgggggaaggaaagggacaggagaagaggacttaaggggttggtttctgtatcagtcagggttccagcagacgagaatctagctcagatggttcaagaccttaatgaagggactgcttacagaggtgggagcagagtaaaaggacagataagggatgttgaggcaccgagagattagcagcaatgggaagcctctactcctaaagggtcaaggggagtatcatagtccattatctgttgctagaacagaatacttgaaactggctaatttataacgaaaagaagtttatttagctcacagttctggaagctgggaagttcaagattgagcagctgcttctagtgagggcctcatgctgcatccaaacatccaaatggagaaacagaaggaaaactgggcatgtgcaaaatgggcaaaacaagagaggcaaacctcgctttatgacaacccactctcatgggaactatacctttcccaagaaagacattaatccatcttaataacctattcactcttaaaggcaccacctcccaccaccacatttggggaccaagccacaacatgagttttgttggggacaaactatattcaaaccatagtaacgagggaatagcattataggagtccagtgaaagctctgtctttgcccccaacatggggaagccaatgctgaaaagcagggagggattgggaaagaaatacctgatctctctctccacctgccctctggttgcctgctgttgcctcccactgaacaaacagtggaagcagccagcaagggagactgggtaatgcagtctgtggagaccagtcccccagagctcagagcaaggctgagaagagcagggagcaggttgggatgtgagggcaacagagaaatcagcacaggtcctggcggagataccagattccagagtttggagctcaaacctgatccttgaaactggttaccagaatcagcatatgaccataggatgcctgggtctgctcagagcattggagaggaggtgaggcaaggcagggcttcatcccctcagctgtgtaggaaggcaggtgcccatgctctactggtggagaagtcaggctctctgagtctgcagatctgcacgtatcctttccggcactgtcacagctttgccaggggaacatggaactgctgcatctccatagaggggaggatgggggaggctggaagatgcactggaagcaggggtctttgtcttccttcttagtgccttactcttcttttggggactggtgaatgggtgatgcccacatagaccctaaattaagacagaggacagtgcctctatagatagaagacaaagagtgagaagatcattttgttcccactcctccctctgacctttgtctgtgtctaagcccgtatgtgtctctgcaggtgttgggggcaatctggtggcagtgcaggccagccgcatctccaccttcctgcacatgaatggaatgcccggagagaactctgagcaagctcctcgccgctgtcccagtccttgtaccaccttcttcagccctggtaacggcagattcccagcctcccagccctggggggagtgggcctactgtcagtgagcttcacttaagagacagctggggccccagatccacaggttctccttctctgctgggctgtgccagctgttctgaagggcagagcccaggcaggagggctgtcttttcctggagcaccctaggggttggagaccacaggatgcagaagtagagacattcatctgtctgttgccctggggtatggtgccgtccctcctgactttgaaaggccttctggggccaggtcttctcctcccctcctctttacaccctcttttccccaattccagatgtgaattctcgctcagcccgggtcctcttcctcctcgtggtcccaggacacctggtgttcctctacaccatcagctgtatgcagggcgggcacaccaccctcacactcatcttcatcatcttctatatgacagctgcactgctccaggtacaaagtggcaggagcaggggcatgggaaggagccaggatgccctgcagggatgggagaggaggccagacttggcctcttagacactcaacctcctctttctctgtgtcagggcagctgataaacaccagacaagggtgcaggagaacagatggtagttccagtagagtcaccaacatggtgtgtgactttgaccctgttcttttactaccctgatcctcagcgatacagttgtaaattgagaggaatggaccaggggtggtagttttcatgcaggtggttgtaggatgctgagcctgtggggtttgcatgccaaccccactggccacagagctccacatggctctgttttgcatgttgagctttctcaagaaattcatttgcataaagcatcccatagcttgaaaaactgtcaaaaccactgcactagataatctgtcggatcctgtgtagccttgccattccataataccatgacactttctcccttcttgtattattacattgtaaaagctttttattttgaaatcattacagatttgtaagaagttctcaaaaaaaaggttcagaaatcccatataccattacccaatttccctccatgggaaaataacattttgcataactttaggacagtatcaaaatcaggaaattagcattgatgcaatctgcagtgcttattcagattgaaccagttttacatgcactcatgtgtgtgtgtgtgcgtgtgtgttcgttctatgcagtttttatcacaagtggagatttgtgtgaccaccactataaccaaaatacagaaaactgtttcatcaccacaaggctcccttatgctatccctttacagctagatccacccttattattacattttaaatttttataggtttgatttttgaatagtcacatagttcaaaaatgttttaaggttcatagagaaacctcagtgaaaagtcttcttttctgtcctcttcttcacagccatctgtttctctccttcacagaccatcagtattatccctttcttgtgtgtccttcaaacctattctatatttataaaagtaaacatatatttttcttatttccttcctcttttttacacacatgtagtatactgtacacactgtctgcaccctgcatttttcatttaagtttatctttgagatcattccatatcaatacataaagagaacaacaccctgattttcttacagctccatcatattctgtgatacacagaccataattttatttcgccagtcctgtattgattaacacctatccctccagccccctcacccccagctttagaaaggttgtgttcggacatcttggcaggggcggggctgagaatcagccatatgctgttgccctgcagcagttagccaagctgccacattccattgctagtgggttccagtgcagcacgtggtgggaagatgggggtggatatgccaggggtctgtggtggaggttttcagctcatcccttggcctgaattggaaaggatgagcctcagtgccatcacccatgatgaataccctggagacattcttgcctctgctgtcctctctagatctgtggagggccagagcgtgacacttgatcccctgtaaaggctcttattgatccctttgccacctcctcccagctgtgtgtcctggggcctgctcaagaagctggaatgtgaggacagctgctaccattcccttcctagggcatgtcccaaaggcctcctggccatgctctttatttgggacccttctgcagctgctggaaagggtgtgaagttatggaaggtaggggagccaaggccgtggtagcacaagacagctgtgtgcagagcaagggagaatgtgaagagtcatctctggcttccttggagagagggcaggattctctcaggcagagcctaaaatttaaaaaaaaaaaaagagagaggacaggagagcaaccaagattgcctaaaaataggtatcagttctggcttctggatcccttaagggctgtggttcccgcatctggatcccttagggcagaattttcataccacagtatttacaaagtatagtcaagggtaaaacctcccagatgactgactgtattagagcttgaccgtcagaatctgtttcattctcacgcagatgcagtcatttagggagcccaaatgtcaggcactgtgcagattctaggagattcaggcctgccccaccgtggtattctagatcaagggcatcgccaacttaaaagcgcatgtaaatcttgttaaatgcggactctgactcaagaggtccagagattttgcatttctaacaagcacccagctgttgttgatgctgctggtcctgggcccactagcgagattctgatctgagtcattcttaattatctgtattaatagaaggtaagcaagaacacagataaaatcaaagccacagatcatgtcaaatgtattttgaattggtatgcattgtctgctttatattaatattgaggtgacttattcacaattcaactttattaggactaatgttaaaataaacttgcattctttgagcccaaacaatggaaaagaatggaatgaaaagccacaacaacagaatgaaaagggtcaggaggaagccagcttgggatgatcatctgttacttaagacaaccgccagcagcagcttcaaacactatccttataccactctgccgagagaagacatccctttaggaaaagctgactccagcagccagccccctgccatgctcctggaaaggccaacatggcaggaattggagtgaccccagaatgaggtgacccagagttagaggcaagagggctgagtttctgcaacaagtaggatttaggtcaggaagctccttgtttggtaaacttgggagcagaatataatgctgatgtgggtgaccctgggtcgtagcagcatcttcctttctaaagagctcttattgtgcctgttgtctgctcaaagtggtaattgtggggtggagaaacacagagaggttgctggggtggaaagaggaagattaaaaagtaaggattatggccagccaagccctgtgatgcactgaatgggtctgatcatgtggcctctggctccccctggagagagaggatggctataggctgggcccttttgtctccccaggtgctgattctcctgtacatcgcagactggatggtgcactggatgtggggccggggcctggacccggacaacttctccatcccatacttgactgctctgggggacctgcttggcactgggctcctagcactcagcttccatgttctctggctcataggggaccgagacacggatgtcggggactagcttggtcactcaacattttccccatccctctgcactttctatttgaaatttttcttttgttcccctgtccctcctccaccccacactcccacctctttctaggacttcactttgataccaaattctcattattttcaatgggaatttttatacattgagccaagtttgtatagcaagaatttgggaaacacagatggcctgagataagcagtacaagtaggtttttgagacaatcaccaagtgcagtttcatggtgggtgcctccaggtgatgtggactggagcaggggagttttgtctggaatctggggacatggggtttggctttagcaacctgtcttggccctaatgagaaaccctttgtaagtgggctctggatttttggttttgttttctttttatctgttttgttttatttttggttttggttgaacagagggacagaagaataagtaacactcccaaacacagacatacttttgtagaagtggaccaacttcaaagctctggacaggagacacctgctccaggcccctgtgatcccagttctgttctcttgccctctggacctaagcgttcccactcgcagaaagagtaaggtggactgacttttcaatttgtgcacatgcctcttgttcaatggcctggtcaacatcaacaacccctccctctgatcatttccagttgattgtcatatccaggaaaaaatggaacagtgcactcttctccctgttgacccatgtccacctattggttccccaaaatccacattctccctgggcccagatgactttgtctccctgggcccagattctttgtctctcttcaaccttcatctcaaattgtctctaagcactaccttccccagagcttgccaggttgggttttgagattagggtcaggtcatgggtatgtggagaatggtttggaggttgaggacaaccacaggtgtctcattgctgccatttctcctgaggacataatcacttggtcaccttggaccctgtcacttcctaaaattactcgttctgtcatgccatagaggtcagttttcctctttcttggcttctacccacaaacattcaccaatcatttattcgttcatttagcaaatatgcagcctccgcaagatgagctctcctgcagacaagcatggtctgaaacattctttgagcaatatttattgagtgcctactatgtgttaggtactgtgccaggcactgataagccagtggtaagggaaacacagctctaacctcacctcattctccaggttacaaaggccatgtgcccctttgaatctggcagagaaagtttcctcgttgtaagtatttgcatctacttcaagccagattcttctgcctctttctcctttccagacccctactctgtgcagtgctgaccacagctagagccaccgccccattgctcaaccagtatttatttccctaaacgacccttcctcatattcccttccctccacctctccttaccaagcacccaaaagaggatttagaactagcagggtggacatcatctggttgtttctacttttctctgcctagcacaaaattgggagaaaactggagcctccatccgcagtcacacgtgtacagatctggggatttggatgtaggctttttctaacttctctctcagaagcttctacagaaacccttccatctgtagcctcaagggcccacctccaagggaaggcttaggcaatgatcctgtttctaccaacactgcaccttatcccaggaacctgccctagacctccagagaccatattttctctccctccatttctacccagacctccaggcctccttctggaatcatagaaccgtagaattggaaggaattttagaggttttctagttggagttgtgtccaacagaattcattaacaccagcctgggcttgtttttcctcctccctctggacttttttcatcttttcctccacctcaaaaaatacttacacacagattcttcttgtacaggcatcaaaaccaactcctctgcccctaaggctgtgtccctgtggtctccagccacccctaccccagtcactcgccccttcctcatctctggaatttggccaggcagtcccagaagactctggagtgacctcctttgcctaaaaagcagacagataggcatgccccaggccctgagtgagcagaggaggactgtagggtgagagggaaagaaaatgaaggtgactttcatggaagtttcatttcttttccccgattgtaccaactgcatgtacttttggcctggctgcaaggagcaatattggtttactctcgtatccttaaaaagttacagaactgtgtcttaagagaattatttatagttactataactgaattgacaaatgtcaacttaactgataaattatatttggtaaaataaagaggacgtttatttagatggttggtgtttcctgtatgtctcatcaaaaagcagcttcaactgttgtcttgggcccctctgtaggccttaccctctcctcaattaggagtagaaaggggccaaagtgtgacaagaaatgaaacatctcggccggctgcggtgactcacgcctgtaatcccagcactttgggaggccgaggcgggcggatcacaagctcaagagatggagacaatcctggtcaacatgatgaaaccccgtctctactaaaaatacaaaaattagtcaggtgtggtggcgggtgcctgtagtcccagctactcaggaggctgaggcaggagaaccacttgagcccaggaggcagaggttgcagtgaaccaagattgcaccactgcactccagcctggcaacagaacgagactccatctcaaaaaaaaaaaaaaagaaacatctctaaaatgcagagattgtgtgatagaaaatacagcatcgccagacacagcggctcatgcctgtaatcccagcactttgggaggctgagaggggtggattacctgaggtcaggagttcgagaccatcttggccaacatggtgaaaccccgtctctacaaaaattagctgggcgtggtggcgggcgcctgtaatcccagctacttgggaggctgaggcaagaggatcacttgaacccaggaggtggaggttgcagtgagctgacatcatgccattgcactccagtctgggtgacaagagcaaaactctgcctcaaaaaaaaaaaaaaaagaaaaaacaacaggcatttattgagaaactggtgcacggggacacactcaagaagctagatgcagggtccttgctctcgaggaggttgtactctggtctccatgtgttaactcagcctctgttgggggattgtgctatgggtccaagcatttatgggttaagattccctccctaccgaggcttacaatctgggtcaaaataatgacggctcttatttgttgagtatttcctgtgtgtcttcaccgttcacctttaagcccttagaaacttataatagactgactgcaaagggtttggagtcagatgggccttggttcaaatcccagctcttctgcctgtatttgtataaccctgggcaaatcattcaccctttctgagcttcagtttcctcatcagtactaatacttatttcataggatcattatgagacctcagtgagataataaacaaagcactaagctccgtgcctggtatatactaaacccaaaaatcctaatcaatactacagtgtgggagggacgaaggccagtgactaggtcatgtcagtacgctggccatgggataaattcagggtggataagggagcgggccaatgaaaagggcacctgatcaaggcttgggagtcagggacatcctggaggaagctgagaagaataggagttagcctagcagaaaataggagaaagagccgtcctgcagagggaaccaggagctgagcaaggaagtaagcctgatgcttttgggaactgcaaatagctctgtatgactggagttgggagcgcagacgttgatagcacaaccttatgagacgcacgtatttgtgacaaagcagtttttctgagatggcagatacagaaaggcagagtcagagcacagccccactgaggtatctctgactacaaagcctgtgtcgggaaccactgcccacccaggacatgcccccatgggatatgtcacaaaagtattgagcagatactgggtgcagaacatttgccagtctcaaaaatctgccttttatcacagcctgtgctccagtactaactcttcaaagcaatgtttataaggctagtaaaggttaatggaaagaggataattgcttgttaattattatttatatagtgtttcactatatagtatactatacatatacttttaagtgatagactcatttgtaacatcaatgttttctctaataacgctatgagatagatattattgccattttgcaagagaaaaactgaggctcagagaaaagttaaatgtcttgccccaggtcatatattcacacccaggtttcttagcccagtgcgtgccttctatgcctggagccagatgaaatggctggccatggtgcccctttataaggaatataaaacattgctaaaacgatcagaaaaatgggtgcctgttatctcagttttgcttatgagacactatacatgactgcaaaacgttaattgtttactgaaatagtatcttccaatggacatttaaagtcatggctccaaggcgccagcctatctctgatggtatttttataacataattacaggcagcactaccaattcagaggtcagtcagctgacagtctcctgaacttagttgtctcctttagctaaacttcagaaaccgaataatgcatagtataatgctgtttactgtactgtatttttattacattatctaaatatgaaatattttaatatggcacccatgaaaatgtctggcttgaatgattagaaacaaaacaaaaaaaaaactctacagccaggcatggtggtatgagcttatagtcccagctacccaggaggctgaggccggaggatcagttgagctcaggagttcaagtctagtctgggcaatttggtgagactctcttttcaaaaacacaaaaatcttaataactcaagaaaaaaaaagaaattgcagaaaagtgaagacagcttggccaaccaaaaaagaatgtttaaaaataatttcaaagactttacagtcatatttatgtttagttaagtatgaatgactaatattatctagtcattggtgatttttttaagttaaatgaaaaacacatccaaataagtttaaatgttctgtcctggccaggcgcggtggctcacgcctgtattcccagcactttgggaggccgaggcgggcggatcacgaggtcaggagatcaagaccatcctggttaacacgctgaaaccccgtctccactaaaaataaaaaataaaaaaattagccgggtgtggtggtgggttcctgtagtcccagctactcgggaggctgaggcaggagaatggcgtgaacccaggaggcggagcttgcagcaaaccgagatcgtgccactgcactccagcctgggtgacagagagagactccatctcaaaaaaaaaaaaaaaaagttatgtcctatttagtcatatttatgtgatatacagtccttgttttgaacataaatattttgtattatattcaaatgttaagtgaaaaaaatgttgaacaattgtatagagaacattgcattagaagagccccaaattgcggccttcttgggacacccacatgtttatctgtcttttactcggccacaggctgtcatgcgcataactttcaatcatattacctaaattgttaactacttcacaaattactcagaaataaagtatgtggtttttaggaattcgaagtccatggaaagggagactaaagctttaagaggttaactttaagacctgccccaggtgtcaaagacggaatattaactacagtctcctgattggcaggccacacaccaaaccacccttcgacacaggctcaagaaggtagcggggaaagatgtcaccatggccggaagtgctcttaggggacccacgtccaagccaagaacaaggccactgatctctcgccctcataactcccatcctgtggagccagaatagtccatcatgtgcccactcatgcttctgctcatgcttctacattctatatctctcgcttagcttaacatctaggttatcttttttctgtatcagggtcacagctggctgccagaatcctctgagatgacccagggcttacctagaatttctcctgcttctccaaccagacacaactgccaggctgccttcgccaatcagggcagattcttttttttttttttttttttacttcagtaagtaggggtcctgttttccacctttggaatgaggaaactcagaaaacatgctaaggatgctgtactcttctgggaaacctccctcatccccacacccagcttaatttttaaaaatagttgtaattagaggtagacagacatagtaatagatttggatcccagctctctcagctcgtggccataattagcctcttttggtccccaaaatggaacaataatgccctctctgtggggttgttaggcacacagaagattcgacaaatagaagcttttatgatgatgatgataaaatgtgggttgaattagtggtggtaataatatgaaggaactggggaatgaagaagtggatagccctggagcgatgctgggtttttttgtgaggttttttttgtttcgtttttggtttttgttttttgtttttttttgagatggagtcttgctctgtcgcccaggctggagtgcaatagtgcgatctcgacttactgcaacctccacctcccaagttcaagcgattctcctgcctcagcctcctgagtagctgggattacaggcattcgccaccacacctggctaatttttttgtatttttagtagagacggggtttctccatgttggtcaggctggtctcgaactcccgacctcaggtgatccgcccgcctcggcctctcaaagtgttgggattacaggcgtgagccaccaagcccagccgatgctgggttttatccatctgtgacatgggtgcagctgaagctggacaacgctgagcagtgaggaggaccagcctgtttcacagctaggcttccactgggcgaaggctatgacatggctaagctaagccaactatgaccctgagtccagctgcatcctcagaggctcagaaacctagtcccattcagatgtcatcccactcaaggaggctgccagacccacacacccccagaggcctgtgcataagaccagatgccagctggtcagtggactggacggacacgtcagcctgaccagcacattcactcctggaagcaagccacaagggaaggcagatgatcagaaagtacctggaaagtcaggaatcctaatagagaagttagttttaaaacgcaaaagtccagcaggcgccaggccttgttatatttggctgcatgagtctgcacaatagggatacctgacagagggccagatattctcgtaagactctggtccctctgccagacagagcccaaagaagtgaagccagaattctttcagagtctcctttctttgcctctgagacctttctttggatcagtgcattccttctttaggtgtgtttataccttgggtcaatgtcacctcctgcctgggcacctctcattacatgtggatttcacagtttatctttgagaggggtaggaggacaatgctacttccaagttcttggcaaggaggggcaggttatcagtggataactaaggatggcctatgggtgcaataatttctgcttttctcacctcctagagagttgaaataacataggaaattagaacagtcatgtctgtgttggaagggaactttattttgtttcacagatgagactttcctgtgccatatggacagttgggaaccacacaaccagttctttgaagcaaaattttctctttagttttcacttttttcctgtcttctttccctggcctttatttggggtggaaggagggtagccacagaaggaggcaaatgtgacaaccaaggcagtgaaaactatagtttgatgttttccctagatactcccaggcccaaatctggcctagacccttggcacgggccagcagaggaatgactggcaggctgccctttgaacttgccagcctctctgtcctgagggtttccttgggcaccttgctgcgaagtcttccagctgaatgcttagctgggtcacaggcatttcaccaagctgcctgcccctccccaaagcaacagccaaaaagttatgatcatcgaagtgagtctgggggttggggctgaggaacagctgtagcctcttgacctcacccttctctgggtctgtccctctcctctgtgctgctgctgggccatttgctatgtcacttcagtcttcccttcatgttacaaagcatttttccactctgctcctaggacaatgttggaggctctggagattatataagctgtctctctcctatttgaagtcaagctcccaagtccttaggagattgcctggcaccagatcatttcttcaacaagtgttcattgaattcatagtgtaggcatcactaatagctacctgacatcagcaacatactaagatgcacaccacatcctctgtgtggggctcttgcccaaaatgtttcttaaatcaaatcttgaggcaataaacagacaatccaggatatgcgacttcctgtaagacaactggcatggactctaaaaagaaagtcaaaaaaaaaagggcaagggattgttatagacagtactgtccaacagacctttctgtgatgatgaaactagtttatgtctgtgctgttcaatatagtaactgctagccaaatatggctgctaagcacttgaagtgtggctaggcaacagatgagctggtctttacatttatttattttaattaattactttaaaaaatttgtttagagatgggatctcgctatgttgcccaggctggtctcgaactcctgacctcaagccatcctcctgcctcagcctccctgagtagctgagattgcaggcaggagccaccaagcccagctgattttatataatttaaatgtaaataaccacacatggctactggctcctgtattggacacagcatgctcctaagattgaaagagactaaagaaatagaataaccaaattccatgcatgaaacttcattgtattctggatgacaggtgaggagaaaatgagaaaaaaatattggggagctatagagagatgtaaatgtaaactgtttgttagatgatattattggattaaggttaattttcatagatgtgacaatggtattttgggctgggcgaggtggctcactcctgtaatcccagcactttgggaggccgaggcaggcaaatcacttgaggccaggaattcgagaccagcctggccaacatggcaaaccccatctctattaaaaatagctcggtgtggtagcgtgcacctgtagtcccagctgcttgggagactgaggcagaagaattacttaaactcagaaggcagaggttgcagtgagccaagatggtgccactgcactccagcctggatgtcagaatgagactctgtcttaaaaaaaaaaaaaaaaaaagataatggtattttggctttgtaggataattttattattaggagctgcatgttgaagtatttaagcttgaagtgtctgctacttactttcaaacagttcaacacacacacaaagagacaaagcagatatggcaaaatgttagtaattggtaaatcccgatgaaggacatattagtatgcattgtactgttaacttttctatgggtttgaaatttttcaaaataaaaagtggaaagtaaaaagtagaaaagagaaaggcagacacatacaggaagtgtggtagttacagagcaaggctgacccctttccccagcttccaaactatatttccaaacatataccagttgacccttgaacaacacgggttggaactgcacagatgcgcttacacagggcttttcttcctcttctgccacccctgagacagcaagaccaaaccctcccctttcttcccctcctccttggtctattcaacatgaaaacaccaagaatgaagacctttatgatgaaccacttccacttaatgaatagtaaatatattttctcttcctcatgattttcttaatacattttattttctctaacttactttattgtaagaatatagtatatgatacatataacacacaaaatatgtgttaattggctgtttatgttattggtaagactcccaatcaacagtaggctattagtagttaattctcggggagtcaaaagtgacacacaaattttcgactggagggtaggtaggcattcctaacccctgagtggttcaagggccactatatgtgcaaatcaattgtttggcaccttgaatgtgtgttctctttctcttatttatatccgtctctcttaaaaactgagatcagaaatgcaatttagtgttgaagaaatacacctttcagccaggcgcagtggctcattcctgtaatcccagcactttgggaggctgaggcagggggatcacttgaggtcaggagttcaagaccagcctggcccacatagtgaaaccccatctctactaaaagtacaaaaaaattagctgggcgtggtggcagctgcctgtaatccaagctactcgggaggctgaggcaggagaatcgcttaaacccaggagatggaggttgcagtgagccgagattgtgccactgcactccagcctgggcagcaaagcgagactgtgtctcaaaaaaagaaagagagaaagagagaaagaaagaaagaaaaagaaagagagagagagaaagaaagagagagagagaaagaaagagaagaaagaaagaaaagaaggaaaagaaaagagaaaagaaacgaaaagaaaaaagaaaaaaaaagagaagagagaaagaaaaacacttctcatccccatcaaagaaatgattactactttgagaactgtgtctttcagggagtaccagaaatttgctaatcttccctcttaaatcttaactcccgacctttccgattttggaagctaagagtagttcctttcacagatgatcaggagcaaagtcaaaattttgaaggaaaaatttacttcttcctgttttcttcgagacacgctggttgcttatataagttaaatagttacaaattggtcacatagttaagtgaccaaagtgcaaatagaatataaatgctacaggccaggtacagtggctcacacttataatcccagcactttgggaggccaaggcaggcagatgacaagatcaggagttcgagaccagcctggccaatacggtgaaaccttgtctctactaaaaatacagaacttagcaaggcatagtggcacgtgcctgtaatctcagctacttgggaggttgaggcaggagaatcacttgaacccgggaggcggaggttgcagtgaaccaagatagcaccattgcactccagcctgggtgaccagagagcgactccctctcaaaaacaaaaaaaaggataggccgggcgtggtggctc

SEQ ID NO: 607 - DNA, 3840 bp, Homo sapiens
tgttccacactgattctcgtgactttaaggaccagggatttgaagaggtattagctcttcccaggaagggaggaagtttctggaagagaagggaaagacggcagacgctgcgctgggaccagcagagcctgaggagctgtgggaagctgacagagcccagccaaaggagcgggaaggagccgcagccccaggctggcactgtgttctgaaagatttgaactcaagctgctttttacggaagaggggccacttcagagggcaccccagaatttggttgagctcttctactctggatgccccctgctctgaggagcctgccactgagaaccaaagaagataagaggacagatactttttcttcaagcacagagctggtgggttggagtcaggcatctgcacccctagtggctgtctggtgaggaatttcttgtttcttcccagcttgcggcttcagtgcttgatggggctgcctgttggtggatcagtttttgcagtgcctggtaggagtggagagccgtgggaagaggtcctgcggcgcccaagcctgggttcaccccaagactaagttctttcccaagttagagaagaagagagaaagcaaaaagaagagaggaaagttctcccttcccctcctccgtgcctgtcatgtcctctaagccagagccgaaggacgtccaccaactgaacgggactggcccttctgcctctccctgctcttcagatggcccagggagagagcccttggctgggacctcagagttcctggggcctgatggggctggggtagaggtggtgattgagtctcgggccaacgccaagggggttcgggaggaggacgccctgctggagaacgggagccagagcaacgaaagtgacgacgtcagcacagaccgtggccctgcgccaccttccccgctcaaggagacctccttttccatcgggctgcaagtactgtttccattcctcctggcaggctttgggaccgtggctgctggcatggtgttggacatcgtgcagcactgggaagtcttccagaaggtgacagaggtcttcatcctagtgcctgcgctgctggggctcaaagggaacctggaaatgaccctggcatcaaggctttccactgcagccaacattggacacatggacacacccaaggagctctggcggatgatcactgggaacatggccctcatccaggtgcaggccacggtggtgggcttcctggcgtccatcgcagccgtcgtctttggctggatccctgatggccacttcagtattccgcacgccttcctgctctgtgctagcagcgtggccacagccttcattgcctccctggtactgggtatgatcatgattggagtcatcattggctctcgcaagattgggatcaacccagacaacgtggccacacccattgctgccagcctgggcgacctcatcaccttggcgctgctctcaggcatcagctggggactctacctggaactgaatcactggcgatacatctacccactggtgtgtgctttctttgtggccctgctgcctgtctgggtggtgctggcccgacgaagtccagccacaagggaggtgttgtactcgggctgggagcctgttatcattgccatggccatcagcagtgtgggaggcctcatcttggacaagactgtctcagaccccaactttgctgggatggctgtcttcacgcctgtgattaatggtgttgggggcaatctggtggcagtgcaggccagccgcatctccaccttcctgcacatgaatggaatgcccggagagaactctgagcaagctcctcgccgctgtcccagtccttgtaccaccttcttcagccctgatgtgaattctcgctcagcccgggtcctcttcctcctcgtggtcccaggacacctggtgttcctctacaccatcagctgtatgcagggcgggcacaccaccctcacactcatcttcatcatcttctatatgacagctgcactgctccaggtgctgattctcctgtacatcgcagactggatggtgcactggatgtggggccggggcctggacccggacaacttctccatcccatacttgactgctctgggggacctgcttggcactgggctcctagcactcagcttccatgttctctggctcataggggaccgagacacggatgtcggggactagcttggtcactcaacattttccccatccctctgcactttctatttgaaatttttcttttgttcccctgtccctcctccaccccacactcccacctctttctaggacttcactttgataccaaattctcattattttcaatgggaatttttatacattgagccaagtttgtatagcaagaatttgggaaacacagatggcctgagataagcagtacaagtaggtttttgagacaatcaccaagtgcagtttcatggtgggtgcctccaggtgatgtggactggagcaggggagttttgtctggaatctggggacatggggtttggctttagcaacctgtcttggccctaatgagaaaccctttgtaagtgggctctggatttttggttttgttttctttttatctgttttgttttatttttggttttggttgaacagagggacagaagaataagtaacactcccaaacacagacatacttttgtagaagtggaccaacttcaaagctctggacaggagacacctgctccaggcccctgtgatcccagttctgttctcttgccctctggacctaagcgttcccactcgcagaaagagtaaggtggactgacttttcaatttgtgcacatgcctcttgttcaatggcctggtcaacatcaacaacccctccctctgatcatttccagttgattgtcatatccaggaaaaaatggaacagtgcactcttctccctgttgacccatgtccacctattggttccccaaaatccacattctccctgggcccagatgactttgtctccctgggcccagattctttgtctctcttcaaccttcatctcaaattgtctctaagcactaccttccccagagcttgccaggttgggttttgagattagggtcaggtcatgggtatgtggagaatggtttggaggttgaggacaaccacaggtgtctcattgctgccatttctcctgaggacataatcacttggtcaccttggaccctgtcacttcctaaaattactcgttctgtcatgccatagaggtcagttttcctctttcttggcttctacccacaaacattcaccaatcatttattcgttcatttagcaaatatgcagcctccgcaagatgagctctcctgcagacaagcatggtctgaaacattctttgagcaatatttattgagtgcctactatgtgttaggtactgtgccaggcactgataagccagtggtaagggaaacacagctctaacctcacctcattctccaggttacaaaggccatgtgcccctttgaatctggcagagaaagtttcctcgttgtaagtatttgcatctacttcaagccagattcttctgcctctttctcctttccagacccctactctgtgcagtgctgaccacagctagagccaccgccccattgctcaaccagtatttatttccctaaacgacccttcctcatattcccttccctccacctctccttaccaagcacccaaaagaggatttagaactagcagggtggacatcatctggttgtttctacttttctctgcctagcacaaaattgggagaaaactggagcctccatccgcagtcacacgtgtacagatctggggatttggatgtaggctttttctaacttctct

SEQ ID NO: 608 - protein, 505 aa, Homo sapiens
MSSKPEPKDVHQLNGTGPSDCSSDGPGREPLAGTSEFLGPDGAGVEVVIESRANAKGVREEDALLENGSQSNESDDVSTDRGPAPPSPLKETSFSIGLQVLFPFLLAGFGTVAAGMVLDIVQHWEVFQKVTEVFILVPALLGLKGNLEMTLASRLSTAANIGHMDTPKELWRMITGNMALIQVQATVVGFLASIAAVVFGWIPDGHFSIPHAFLLCASSVATAFIASLVLGMIMIGVIIGSRKIGINPDNVATPIAASLGDLITLALLSGISWGLELNHWRYIYPLVCAFFVLPVWVVLARRSPATREVKGWEPVIIAMAISSVGGLILDKTVSDPNFAGMAVFTPVINGVGGNLVAVQASRISTFLHMNGMPGENSEQAPRRCPSPCTTFFSPDVNSRSARVLFLLVVPGHLVFLYTISCMQGGHTTLTLIFIIFYMTAALLQVLILLYIADWMVHWMWGRGLDPDNFSIPYLTALGDLLGTGLLALSFHVLWLIGDRDTDVGD

SEQ ID NO: 609 - DNA, 29510 bp, Mus musculus
  misc_feature (1)...(29510): n = A,T,C or G
ctctttgtccccttagtgcaggaaaaacggctgtgcctctgaaatagctcaatcaaagcctcatagggcagaacagaacattgattcaagcataggacaccagaaagcatgacatgggatgatgacccccacaatttccacacaggtcaatcagagacccatcccaccccaagtctaaatctggatcccaatacagcacagtctagagactgaggagcttgctctggagaaccaaagcagcttgcttgtattctgtctgtctgtctgtcccaccccaccctcattatccccaagatctctctctctctctctctctctctctctctctctctctctctctctctctctctctctctctctctctctctctcttccccctctctctcccatcccagccttattatccctaacccaccatgggctgggtaccctagaggactcctttcttccgccctctgcacctcccacccacccacccaggcacttttgtagacacagcagcagacacggactggctaaatgggcaaaaagaaagtacaatgcagattgtcaaagcttgagcagtgatgttgtgcctccatgtgttccatcagtgatggctgcaggtgatttcatcccagtggtagaaacagctcatgtcagggtgtctttagaccactctctaatgagaggaaagcctgaccatcttgatctggaaaacacttgctctaacagtgccattcgcaaaggattctggtctaagggtcttcagtgaacaacactgctaagcgccaggcttctcatgcccagagaggagtgaagtgggggtataagggtctcctcagcgtgacccaggggcatcaagtggcactccaagtggtgattcaacataccttctctttcctttaaacccacactcttgagaacagggactgtgcccaatttacagagcactcacctaccctaccactcagccttagattccacagtccatctgtaaaaacttgcatggccaaccaggaaagcactcaagaatccaggcttcactccttccttaggggcaggtaaaagtcactccttaacagtgacaacccagtgtgtccagctgtgtcttagccatgcccctcttccagaaggaaaccgtacgccatggtctggcctcactgtacgatgagttgaattacagacttgagagaggttggtttagggccatagccaaaaggggctgaggctcagtgctagagttcacagtcttgagagtgaggaagagctcagaaggagagtggcagggtacagctgtacctgaggccacatcaaggaatctggaaaaccagaattgtcctcttaaagaatgaatgttgtgtgactttttctggagagatgtcaacagctgtttacccaataagggacagtgacaacagactaaggaatcattgcacacaagtctagcttagggcaacactgtgtctatttggggttacctactctgtcctgggttactcaaaggcaactacatcactgagaaagttcaccccagcatgggtgacaacttacaaaaccatacccctggtatggtatcaaaacctgcttcttccccagcaattgccactgcttatgtaactgtggccaaggtcaggagtgacaagactggggagaaaagagcggtgctccaggaggcaagagagacaggccaagggatgacgggcagacagaacagagaggcctggtagggagcaggaagacacagaaggggcggtcaccaagacagcccaggaggagtctctttgatgtcaggggcactactaagttccctcatgtacagcttccatctttccagttgtctgagtactgaggtctgagggagacatgtgttctatgtgtgaatgctccattacttctgcaccaggaaccctcagaaccactgagaacagaatgtgttatctatagagattcaaacctagtgaggccagtttagcacacatagagctcaggggagatgaaaacttaaatccagtcctaactgctgtttcaatgacaaggccagagaatggtacacttggagagatggaggagacagaggattgatctggtatgcagcacacgtgctgggacaaggtaggcactctgtgtgctggaagggggtataacagcatcctttgctcttaatcagtacttaggtaagaataactaacatttatatatgagagatttggcagataagtatggcctaccctagtgtttgactcaatcagagttgtctttcacggacttctttgctctgtctgcccttcctcctgggcctgtccctcctgacttctgtctctcttcccccatcttgtcgctcctggcagtggcacttgtggcctggcatccagtcatgtgtcccttatgctatctttttctcagcttcaagttgaagctcagagccccagaaggttttctcacgtattatatgtccaggaccgtgtcagctatgagggggaggagtaggggaaggaaggggaaagactccagggtagggtcagtgtataaaacagggctgctggcaaaatgtactctgggctgaacacatggggtgtggagaaggctgccttgaccatcttcgtgccagaaaaaataatctgctcagtgaaggcttaaatagaaaggcactagatcccctcttttgaatgaccactcattttgaagtgacaaacctaagaatctattaattgtcactaccctagttagctttaactgtcaacttggcataatctagaattttctaggattaatatcaaggaaataactagatcaaattagcctgtaggcatgtccatcagggcttgtcttaattgttcattgatatagcacagtatagcccactgtgggtagcaccatcccttaggcaggtggttctgaactatataagaaaactaacaatataaacctacctactgttcagcaaaaaacatcttccataattccttctgagcttctttggctgtgaaatgagtgtcccggtggaaataatgctgtgtggaatagcaatcaggacgactttcaggtttctgccttgggttcctcaatgatgatctgtgacctggaattgtaagccaaataaaccctttcctccccccccccccccgcccctgtgatgctccaaggtaccataaacaaggcaactttaaaaagaaaagcatttaatctggaggctcagggttccaaagcgttagaatccctgctcatcatggcaggaagtttggcaataggctggcaagcatggtgctagaggagtagctgagagcttacatgttgagttagcaaatacagggaaggagaggcagggggactggtgtgagcttttgaaactatcaagcccacctccaatgagacacttctttcaacaaggtcacacctcctaatccttcccaaacagtttgaccaagcattcaaacatatgagcctgtgggggtcattctcactcaaacaatcacactttgagttgggtattttttaatcacagaaacctaagtgaaaataaaacagttactaattggaagtctacagcatttccataggatgcgtcttcatgggtcctacacagacaggacttaacaaagacctacaattagcaggtgcatacaagtacccatccttggctggtttgcctgctgggagggcagcagcagaggcaggatttccagcaactgtcagagctaccttagagaggagctgactcagatgcagctggcacctgctctccacacactccagcatcaaggaagtttcttcatggtgggactgggagcctagcagatgccaaattcgtttccagctcatcaaagtggatttgggtgtgcgatttttggctctgaagctgaaccacatcacagcagcaacatagtttggcattaagcacaaaagaaatttgcaatctattgaattcaagctccagaaaaccagacagcccctttgtgagtattctactgatgtttcctgccaagagaaggaaagagtctgcagcctacatagagctttaccatgtaggaaggagcaagcttggtcagaaacgcctaattatttgtatgcagactctcccgttcacagctttgtcacctggagagcctcctggttgacagtacctgtgctggaacccacccccatctgtgtgtgtgtgtgtgtgtgtgtgtgtgtgtgtgtgtgtgtgtgtgtgtgtgtgtgtgcatgtatgtatgtatgtgggtgtatgcatctgtcttctccctccttctttggccctctctacagtgacactcagaacttgacattggctcctctgactctagtcacctgtaaatgttaactcggctcttgtgactctggtctctagcaccttcttacccttcatcactgccatgactttaagaaagatgttctcagggtcctttcagcaaaatcttgctggtgtatgcaatggtatcagcgtttgaaggctgattatgcgatggatccctggatacggcagtctctagtccatccttttgtctcagctccaaactttgtctctctaactccttccatgggagttttgttcccaaaattctaagaaggggcaaagagtccacactttggtcttcattcttcttgagtttcatgtgttttgcaaattgtatcttgggtattctaagtttctgggttaatattcacttatcagtgagtacatatcatgtgagttcttttctgattgggttacctcactcaggatgatgccctccatgtccatccatttgcctaggaatttcataaattcattctttttaatagctgagtagtactccattgtgtaaatgtaccacattttctgtatccattcctctgttgagggacatatgggttctttccagcttctggctattataaataaggctgctatgccggggcctggcaaacacagaagtggatgcttacagtcagctattggatggaacacagggcccccagtggaggagctagagaaagtacccaaggagctaaaggggtctgcaaccctatagatggaacaacattatgaacgaaccagtacccccggagcccgtgtctctagctgcatatgtatcagaagatggcctagtcggccattattgggaagagaggccccttggtcttgcaaactttatatgcctcagtacgggggaacaccagggccaagaagtgagagtgggtgggtaggggagtgagggtgaaagggtctgggggacttttggaatagcatttgaaatgtaaatgaagaaaatacctaaaaagaatgaaagaaagaaagaaagaaagaaagaaagagagagagagagagagagagagagagagagagagagaaggaaggaaggaaggaaggaaggaaggaaggaaggaaggaaggaaggaaggaaggaaggaaggaaggaaggaaggaaggaaggaagatgttctctagcccagcccaggccctagaacccctgccaagagaataagactcacgccttctggaatcctttcagatccactcaccctcacggtgctaagaaccttagtggtagaatgttctagagaataagataatccagatgtgaatgtcattgtccaaactgatggacaggaagccagccagcagtcagtttttctaggaatgactctctagaacagatctaatgtgtgttcccctttggatcccattggctataagaaatggtaacacttctcaccccagctcaaactctctttttcttcacacttttcctgccaaattagagactagtgtggagcacagcatgtgtatgcctttttctcattatactttgtcctttacattccaagttctttctgggagactaagggtcttgcttgaacgtatcacccacagcaaagaccccacaaccactaccacagtctgcttacagtctcatcttctatgggctactttcatgcattcaaatatgtccttcgaccctgctactttagggaatctctgtactcacaaggcagacccatccaccacagaagcagcctgcatcatatagaggaagatgggccaacctgggactctcttcagggacactctactcttagatggcaagtcttggtgatgtgtcttatcgccccgtagcagggagcatgcaaccgtcgccatagcaaagagacacagcatattataccccatgggggaaggtagccacaccaggattgcccctgtgaattctgcccctcagagagatctgttcccattgctcaccctgtcatccaatagcagagaccatgcagtcactcctggcggacttatacccagttctgcttaggcaccaattgtggagacatgaacaaacatggttttgccttagacaaggcatcaacgacaaatcaagaacacttctacccaagtctagcttgggaagcagggagttcatggcagcactaagaggagcacaggcaagggtgtattcataggtacatgggtaacttaacagcagccgcatactgaagagtccattttagcatgaggggtgacacaaaagctgtatccatggagatctttgctaagctagcagacaactctccaggagtcttctgttcctcagtgtcatttatataacctcaggggagcagggatggtagccttaggcttcctcagctgaataaattcattagcttccttagtcttttaaatatatatgtatatattcattatttatttaaataagaataaaattcatatttaaatatataaaaataaatatataaaatgtttatataaataaaattatttatatgtatatatatatatacatatatttttttttttttgcctgcatgcagatctgagtaccacatgcatgccacaccccgagaggccagaagagagtaccctaagaacgaatgaagttataggtggttgtgagccaccatgtaggtactgggaattgaaccagggtcttctaagagcaacaagtgcttcaaactgctctctctccagatttagtgtctttagtctttttttaaatataataatctttatttattatgtatatgagtacactgtagctgtacagatggttgtgggccttcatgtggttgttgggaattaaatttaggacctctgctcacttcagcccaaagatttatttattattataaataagtacactgtagttatcttcagatgcaccagaaagggtcatcagatctcattacaagtggttgtgagccaccatgtagttgctgggatttgaatttaggactttcagaagagcagtcagtgttcttacctgctgcgccatctcgccagcccagtgtctttagtcttaaaagcctctctcctcccttgaagagtggattttgccttatgttccagttgggcattgaacttgtgacaatctttgtgtccacttgccaagtgatgggattatagacatgaaccactacacttggtttctttcctctttcttaggagaagcgtggccacatttcccaatctcctttggtagtcagctgtggcctctcaagttccagccccaggacagatgtgagtgtgactgtgaaggataagtagggtagataccaggacaaaccatggaaccttcccaccaagcatcttcagtgaacaccacatgagacagtcccttaaagcctggtccaaaatgtctgtggtgccactcacttttgttatgtcctcgacaaatgggaattcaaaagtgtggatagttaagaagtagaaacggggacagcaacagtgagctttagagaaagggccctgaaagagctaggacagaaataaatgctgtagtttctttggatcctgtccaaagacaaagcattaagtcaggaggccccaggagtcacccctgacagggcaagcctgctggtggctcttgtgttatcctgcaccataggctgttgtggttggtggcggagcagtaatggttcccctgggacctggaagacctggcaaacctcctcgacctggtggatacacaaacgcgaatagtcagcaatcctcacaggacaccttggctgtgagttttcacccctcctcaagtgcacagaaatagctgggggtttccagtgatctgtgtactccgtgcttatttcttaaacagttcagataacatcagcagatggaggtggggtttttttccctgcagaaacaatgtaagcagaccataactatagatggtctgataaactatttattggaaagatcagaagttgcatactagtcaaagtataaatgataaaagacatcttcacccagttggttccccagctctatttaaggacacaccagtaacaataatgatgtgttgtgcaccatgagaaaacacagccgtgtgtgtgtgtgtgtgtgtgtgtgtgtgtgtgtgtgtgtgttggttttgtactctataaagcaggtttccacccactcagagtgattgttttctatctacttgcctcatatatagtctggtatgcccttaggtgtatacacacacacacaggctagaaggcagctcatgtgtaacatctgccctgttgagcaaaggaatcagagcagctctctgaggctctcaggccaatggaaatgaaatggccatgactttaggccttgaaactgttcagctgagctgtggttccttcatttacatgtgggaaaatgaggcccggacagctcagcccacactccctctccttgcctggaccagcatgaagcataccgttctcctttggttggaatcgagtgagctccaaggctgtcagcagggaaggggcctcattgaaaatcaccacctgggagatgaatctaacatggctgtaggtggctctggaggaagatgaccctgggaggaccctgcagctgcatggaagcagaagagtccatgtggtgagtggtatctggggtgatgcataattcacacatctcctcggttacttcctgtactggtgggctacctgcccttagaaggctcaggctgactcctctgtaccaactgtggcccttgagatgggaatatggaatcccaagtgatgaggagagaaatcaggttccccaacccagattctgagtcctgtgaggccccaggagatgccatgtgcctccaatactccatgttcaacacaaatcacagctatcttctgtgttacacacacacacacacacacacacacacacacacatacacacacacacacacacatacacatacacacacacacacacacacatacacacacacacacacacatacacatacacacacacacacacacagcacacctgtgttacacacacacacacacacacacacacacacacacagagtcttcctgccttaagtactattcaatatttcttctaaccctcttccaacatgaaaaaagaatcaagagaagatgtggattataggagtagagagggcgtgccaaggagaagccagacatctgcagcagcttctactagtcaacgagtgaggcctcctgcattaggaaccaaaacttgactccacccaaggtgtgtgtcttagggttttactgctgtgaacagacaccatgaccaaggcaactcttataaaggacaacatttaattggggctggcttacaggttcagaggttcagtccattatcatcccggtgggagtatggcagcatccaggcaggcatggtacaggcagagatgagagttctacatcttcatctgaaggctgctagtggaagactcacttccaggcagctagggtgagggtcttaagcccacacccatagtaacacccctactccaacaagggcacacctcctaatagtgccactccctgggcaaagcatatttaaaccatcacagtgtgtctgtacttccaaatggccagctgagagcctcagcattcctaggcttaaggccttttggctttggaacctggtaagagcctttgatctcaggggcaacagcagacagacccatagctagcaacactctcggctgagcatatgagtcccggcattgtgacctcagctgttccgcacacaaagaggtggtcaacctgcacttgcctaagcctgtaagttacataagtcggtggcccagtcctaagggactgttgtggggaggttgggaagttgaagaacacctagcccttccatcatgtcagccaagaatgcagaactgaagaaaactaacctggtaaaggaagagtgttgcagggcacggtggggcctctgtgggctcctgctgaatggaggcgggacagagaggctactggaagtcatcctgtgagccttccaactttctgtctttgttcagggcacaaagcatcctcttgcctggaataggtgtgaaactggttcctggccttggcgaggagggaaagaggcccacactgctcccatgtaagagccacggctcttcatgactgcccacagtccaggtccccaccaaggcctgtgtctaactggcggatctaagactcaaaataatcttgatagattagggcccactttatagatgaggaaaatggaggccctggcactaggtaagatggccacattggtcttaaaagagaggacagttgagattagaacccaggtcagtctcttaaaacaaccttctggggctttcctaaacgttattcaaaagcgctttctctgtctgctggaaaggtacaaccattttcattagaaacataagaccaaggtcagtggccagaagtagacggcatgctggtactgtgtgagcctgtactcaggtgcagatcacagcattggttactggacatcttcccccccaatcctgatccgtggccaactgtagcctcttctctctgcagaaaaagaactacaaggctgtttgcatggaaccgaagctgacacaagtaagctgttttgaagttacactagcagccaggccttagatccatggggaggtcattggaggcaaagtcagcttctagtcttggtggccaaagcctatcctacgtgctggggtacctaaaagagataaattccttgtcttcataattcttcaccccagcaaccaaccaatcagatacacaaacagcctagaatgtcagctgcattgcctctgaccctgagaatgactataaggagatagaagtgggttgttctagacacagtgattgggaaaggcctcccctgaagcaagtatgtggggactagatgctagcaaagcagggtctgagaaagaaccctctagatggcaggaagcagctcgactgttcaggggagcagcgggggcaggaagagttgaggcccacggagccaagggaggagcagcacacagaaaagggtggagggctcttctgcacaggcggggccaccagcttgtctttgtgtcctgccttcagagaggcacaggactcagagtggtctctccagcctccgtaactccacccacattcagtttccagggcttctgtgtttctgtttcgacccacagatatatgatttcaaaggatttaaacaagaagggctactcatcagaaaagggatgacgcgggagctgaaggtcggtgcttgggcccccgtggcttggggacaaatcagcttggtgaaggggtggccagccagctaacttctgagtgctggcacctgctggcacctgcagcctggagaccttcactcacaccaggccttgtattttaaacttgttagtttgaaactatttcaattacctccagtttgcaaagaatggcataaaggcttctaggacacatttcacccagctcctgccaatgctgccagtttatcggtcactctattctgtctctgttttcctttctacacagaatcacacacacacacacacacacacaaccctccatgcctttaataaattcaaccaatctgagatttaaaatatttggtaaaacattacagatatttttccatcacgctctaaacaagacggtatattaatcctttgcgtgcatttccttgcattgcgtatttaagtgatccagggatgatttaaagtgtatgggagggtgtgctcgggatggagtggatgtcagcagtggcagatttggatatctgcaggattcctgaagccagttcctctcggataccgaggaactgctgtgggcacctcagccttccccttgctggatagtgggtgggtatctgactgtatctggctcccttccttgtgctctttccttggccttcatcacagagagtcctaatgaggatggattaatcctccatagatgcccagaattgacgaccccatgcatcttctgaaccatttgagaattaagtttacctaaatttttaatgtatactttctaaagtcaagcatgttctctaacacattttcatgtttaattattcaaattaagtcattaacaaagcctttattttggtgttactagctgtctcattactttaacaaaatcaactctaatctctctctctccctctctctccccccctctctctctctttcgcatgtgtatgtgtatatgcatgcatgttttgccagtgtaaagttggagttacaaatagttataagttataaggtgttgggaatggaaaccaggtcctctgatggagcagagagcattcttaacctctaagacatctccagccccattgtgtctctttagtgtgaatcaccctttcagtgattatcttcctggaaatcaacagttttgaagatttattttactgagggaccctttctatttgttatttttaaaaaaataatttttatcctcctgatgtaattgtcatctccaaggcttactgcctctatctggtaacctaggcctggttctggaagcttctagcctccatacacttttatctagacctagaatgttttcagcctctgagacttactgctaagtcagctcagcctctcctaattccttctgaactctggctggttcaactcagctgttctggctcaaactcctctccaagccaacagattcaatctggcttctctctctttcagcctctcctgaattactctgcttagcctcaaactaactctagcaatctgttctaatcttttggctcattctcattctctggcctattctgtctagcttgttctgtctctgcaaccatctctctatcactgtccctgaaaacctgcctcctcctcttctctctgcattgttctcctgagtagcttccctttcctctcttctcctgagagctgatcatagcccattctgtcaaatctttctctgattcgtcactttgtctgccactcaattggctatcactgtgcttccttctacaaactacctttaccttcattgtttgggattaaaggtgtgtactaagggtgcatctgtatttcagccagagggattaaaggtatatgctaagggctgagccacaccacaactagaagcctgtattttcagtaaataacactgtctccagtttcacaatgtgatgatcaaacatcctgcaacagcttgtctgctatttctaggtttaggctgggcgttttgggcaagccttccaaagctatgctcttcaatgtctcctctgcagggcttctacagtcctttccttccctctatttcctagtgcccccaaggacctacccttgtcgaccttaccgtgtgtctctcacatttatttccccagaacgaactcagggaggtgagagaacaactcacggaaaaaatggaagagataaaacaggtaacaggataaggcttcggccagagaagagaagcagagccctgaggcaaatggaagtgctagctctaactagaaatgcaagcaggacttctgtggaaaagcagaaaacctaactcgtacacggtccccatcgtgtttcaaccctggtcagagtagaacagtcttacttcttccatatctaagtccacttttcaattgattaaggactcctccctagtgtgccaaggttggtggtgatgtaacttcaacaataagagtgaagagtggctgactaggaatttagagacagtcacaggttaactaccttctttatgcatcttatctctatgatataatcaccaacagcttactgggggaacagggcataagcaaggaggtattgattcaagctgtggtctgagctccacagtgaagccctgtcaaagctagcggtagcaatggcttggtggtacctgtatcctcagcccttcatagacttctcagaaagaaagtgggttatatagcttattatccatcttttcccaatatccagctgctgtcctttacttaaaatgcccaggaggttctctggctggcttcagtaacccacttcgtgccttgttaaatcatgcttttcttcctcattagataaaggatataatggacaaagatttcgataaactttatgagtttgtggaaattatgaaggtaagctttcactgtatgccttctgtgggttgcctgagaaatgataggagagaggccaggcccctgcccttgaggtatctataacccactagaaagaattggatgctaagttacaggctgtttgttaattaggggttcagaagtcagagtaatgagtgagcatgggggttaggagagaagtccttagagaaaatgtgagccttgaggcttgatgattgtgttgggagcttaatataactgtaaggaaggctcagtgtggctcccctttggctcagaagacaagaaggataatttggaccatggagcaaaggtttgcaaaggttagtctgtttcagaatgacttctaagaagagtgtcttgcaacaacagctgtgagcattcggctagggcctgagttccccataacagaagcttgagagtccccgatgtagatgcacaagcaggcaaagggcaatgacttgagtgtcttcaagatgtctaagggacactaggcttaccagataattaagattcatggtaaacccagtcatcaaatcagggtggttaatgataagcagagatatgaatgtgcatctttttctaggatggctttttttgcatcttaggatggatatcctaagaatcccccccaagagcatattaaaaacatctatacacccaaactccatacagaccaaaaactgaagaaacacttcttcaaggtggagttgtttaagtgccacaaatgattttaaaatgtatatgtgagtgtctatgtgcgtatatgtatgtgtggatgtaggtgcatgtatacttatgaagatagtctttgtagcacatgctagcctccagtctttgatttctcctgcctcacccactgagttctgggactgcaggcccatctcccacacttggcttcttcacacaggatcaaaatgtgtcctctcagatgcaaatcaggttcttcatttttaaaaatgaacatgtccatcgacctgcatattgcaataaggtcagagagtcctgtcctcataccaccccgccccccctcacccaggctctcctcacagcaaacagatcagaatctgagggtgagagtcccagcagcaatgactgagatgtcttcaaggctgagaaccatgtttccataaagttttaaatataataaaggtgattttttttggtggtgcatgggactggatcctggcgtccacaagctaggcagtcagtcatttgactgctgagctggatccagctctgtgacaaaaggtggttctcaaatgtccgtgagaagaaaaaggatatgtaatgacgtatgaacattgcttgactctgtgaggaaaaaccaatccactagcactgtaagctgaactggcctataaagtcaatttaaaaactaaaagccggtaaggaagggttacaaatctaatgaatgaaatgacaaaatattgatatatttacctatataaacattttttaaagaatcgggatggaaaaaaataaccatatacagaattcaaaaacagtttgaggaaatcgatttccataaacgtggtaaggggcaaatggtttttaacctataaaatatagaactcacacaaaacaacatgaaataagtgagaaaatgggcttgaacagacaagccagcaagaacagaacaaaggcacacatcacacaaacagctttgttcccacaatatcagatctatgcaactaagtatcagatagctggggctggagggaaggctgaggcgtcagcccactgctcttgccgtgcacctcagtgtggttccctacacccacactgcgtgtctcacaactgcccataactccagctccgggggatctgatgtgtctgcccttggggggcccctggacaaatgtacacacagacacacagacacacacacacacacacagcagctaaaaagactaagtaatgtaactgtcacactcaaataagcaaagtgtggatttataacaataagctattgataagaatactaacctattaaaagatggaatattaaaaataggtgccactgattcaattctgtttctcaatacttaccccgtgagaatattaaaaactgtcagcataagtatgttcatttcagaattattgataatagcaaataggtgcgacaacaatttccaacagttagaggagtagttgaattatggtctatccatacattactattagggtctattaaagacaaagcttataaagaatgcttatcatgaaatatgagttaagattaataggctaatgtcaactaggtaaaaatgtaagtaaatatataggaaaaagattgggaagaaatatatcaaaaaaatcaaaggtcttgagggagaggcaagaatgttaattttttgaaatattctcctgtgttatccagtgttttttgcaaagggcatgtgctatttctatattaacatgcaaacaccataagcattttatcagtggccagtctggatatggaaaggcacaaagaaagctatttcaggcagggggcagcttgggcacagcagggggatggctgtgtttcccagtccgtggggagaccagccacgggtagggtcatctgggggaaaccgaaaaataaaactgcatagccacacagtgaacaatgacgggcttttagaaacagctgacacacgggcccgaatctcaggagattcctaaagaacactcaggcagcagctgctggcaaggtggcctgggaggtgcgagcagatggggaaggtctggaacctcccccagctgtgatacagggggcacggaaaaggcggcccagggaaggggagagaagtcaacggagatgtggtggttcttggtgacagactcgggatagtgaagtcttaaggagtgtctatggtgacacctgggtttccaccaggatggacaaaggctgtggagaaaaaggacaattgcagcgaggaggattcgggctgatttagaagcggaaggagatgttgggggagactaggaataaagggcgcctgagtgtgctcagcctgaggggcgtgtctgaccggaaggagattttgatgctgttcccatttacaaatgctcacacagctgtcctcagcacaccccgccccctcctgtggcatgagtgcttcatcagcttcctgcatcagaccaagccggttcagtctttttacattaggatcactttcacttggagtaaattatttttttattcatattttatgacaaccagtccacacccagttctgttgacaatgaagactgtcagttacagcttctacacccctagggattctcctgtctattgttatttctatctggcttttcccataggttatttttactttcttagttctcagtgaataataaatgagccgtgttgctttaactactgtcttctatttaatttttgtggcttatttttattattttgaattagtgtgcgtgcatgtgaatctctgtgtgtgtgtgtgtgtgtgtgtgtgtgtgtgtgtgtatgaaactctgaagtcaacaagtctttgaggtcacaacatgttttttgagctgcactgtctcagaagcatcaactcaaagcctcatatctggggtcaggcagaacatcccctggcctttggctggcctagaggccatggtcagtctagtctgcctctgcctgtgctctagtctcatcatgagatggaggtggaaggtgactgtcagggacatgctgcattcaccacctcagccaagtctagagaggactcttaaagtctgaggcagaagtggcttggagggaggagggatctccacgcccttcagaagagggagggatggcttctagccttgggttttctcttgaaggaaatgcagcaggatatggacgaaaagatggatgttttaattaataatcagaagaacaacaagctgtaagtatcctcctcctccctaaagactcctcccttcactttgctcagtgcacaggggtcttagagagggcacccctcaaggaactatcttggcttctgccattaacaatggctggaagctaagatcttccgtgcccatgtgtactggtagaaacagtctccccaaatttctgcctcccccctcccaacccaccagtccctttcaaaaccaagccaaggagcagcagaaattctggcagctaggaaagatggacaaaggctcccaagccatgatcacagaagaacccgatggagcaccattggcttgtgacaagaatgtggtgccaccaaaaccaacgaggaatccactggagtccctccatccatgtcagagttgctgcgtaagtgaactcctgcccaccttcagcacgggttctggagccctgggctgctcctgccctgacttcatctcaagagcccttgcctcaccctattgccagcccttgggatgcagcccttagtctagaaaccgtctgtagttgcctcaccctctaggctatggtgagtcttaagccacaattgttcagtcaacccttggaagtgcctgctcccaagttctgctcagttactctgtgctttcctctagcaaagcctgatgaggtaccctgcaggctggctaacttgaaccaggaaaaaaaaatgatctttcttgtgccgtttctgtcctctgcaggagaaatgtttgttgtgtgccctaaagaccaaccgcaatcaggggtaggtagatccataggagaagtgccttctctcagttgggtgtcttgttatcatcccaaagggagtgtgcttcaacttccttttgcagcaaagcccacctgtagttgtacagggaatagggactgagtggattctgccacccagcataaccacccaggcatagaggatgtggcaccaggaaagaggatttgggtggccaagcctaaggctgctgtccacaagcttgcttggtggggagggtatgcccttagcagcagcctcagcctggccccagatccccacatttcttctacccagcaggagaccttcacaccatgcctgggtgcctttttcacccttgtcgtctggagctgctttctaatttatctgtacttcaacttcgccgaggtggagcatgtgctgccgacctagcacagccatggagcctaccaccagctccaactcatcatctcctgactcctgagctacacagcagacttttctgccctcttaaacaccctccaacccccacccctgcccaggcttccacctggaaattaaagaatctcatttaaagcaaaaaagactgtcaccattttaagtaccagcccaacatttgcgtgcctggagcttcatgttgttgttgctgttgttgttgttgttgttgttgttgctgttgttgttgttgttctaaatcagcatatttcaaaccccaaatcctcttccgctccttgttggctagtggaacattctgagtcatctcaggcttgcctctccctccattccacagggtcctaaagagttccaggtcatagccccacaataaccccaaaatatagagcatcagcctgtatagatgcaagacacagacctgatgccctgcctgctgatcccccacaacctcagctcctgcaatgtttctggatgttgtggggaacagaggcaacctctgagcctcaagtctgacaggactgtgtgcttccctctgaggtgttgtcaccgagcagttctctgcccttcttgagttctggtgaagtttgcctactttcctcctttgacagttttttctgcttccctccctccctacctacccctttccttccgtccttctctccctcccttcctccctctctccctccttccctcccttcctccctacactccaaaggagcagtgtcctttcaaagaccgtcacaaactggagatgagcagacatgatggtgctttctgggatcacttgggagacagaagtaggtgggtttttattagttcaaggccagcctggtctacagagtgattttaggctggcctggaggcctggagtttcatgttgttgttgttgttgttgttgttgttgttgttgttgctgctgctgctgctgctgctgctgctgctgctgctgctgctgctgctgttgggccacaccgtgaggcccttcctcaaacaaacaaacaagttgtgcccacctcaagtccctaagtaaggaaagataaaaccagttgctagcttgggatgagaaaatggtaatttagtgtttatctcacggtgggtctccctctttggctttggtttgacaagctctgtgtccactgcacaccagtccttccatccttttactttgttggatgcttcccctggtagacagttaatcagctggcggctttgtaatgacaacagagtaacacaaacgcatttggtgccaaatcacaacaagggccttgccttgttattccaaggagttcgtagtctgaaaggagctatggtaaacacacaccacaatacatatattatagatcacagtaaccaaatatgagacaacaggagacagtagcggtagccctgtccttgctcccactcttccccattaacttcaccccaactggaatagcttacagcaacaagacatggtgtggctctgctaagaataaagtgtcatcggacttaggttactgctggaaggaagctttggagaagcctcccttctctttcccaggcttaatggtggccttcatttcttagccggtgcctgcctcccatcctcaaagccagctatagctggtggggggtgtctcaagttgtatgatgctgtcttagtcagggtttctattcctgcactaacatcatgaccaagaaccaaattggggaggaaagggtttattcagcttacacttccacattgctgttcatcaccaaagaaagtcaggactggaactcaaacaggtcaggaagcaggagctgatgcagaggtcatggagggatgttccttactggcttgcttcccctggcttgctcagcttgcttttttttttttccattttttattaggtatttagctcatttacatttccaatgctataccaaaagtcccccatagccacccacccccactccaaacccacccactccccctttttggccctggcgttcccctgtactggggcatataaagtttgcgtgtccaatgggcctctctttccagtgatggccgactaggccatcttttgatacatatgcagctagagtcaagagctccggggtactggttagttcataatgttgttccacctatagggttgcagatccctttagctccttggctactttctctagctcctccattgggagccctgtgatccatccattagctgactgtgagcatccacttctgtgtttgctaggccccggcatagtctcacaagagacagctacatctgggtcctttcgataaaatcttgctagtgtatgcaatggtgtcagcttttggatgctgattatggggtggatccctgggtatggcagtctctacatggtccatcctttcatctcagctccaaactttgtctctgtaactccttccaagggtgttttgttcccacttctaaggaggggcatagtgtccacacttcagtcttcatttttttttgagtttcatgtgtttagcaaattgtatcttatatcttgggtatcctaggttttgggctaatatccacttatcagtgagtacatattgtgtgagttcctttgtgaatgtgttacctcactcaggatgatgccctccaggtccatccatttggctagggaatttcataaattcattctttttaatagctgagtagtactcnnnnnnnnnnnnnnnnnnnntacctatcctaaatactataggggactaatatccaacatatataaagaactcaagaaggtagacttcagaaaatcaaataaccccattaaaaaatggggctcagaactgaacaaagaattctcacctgaggaataccgaatggcagagaagcacctgaaaaaatgttcaacatccttaatcatcagggaaatgcaaatcaaaacaaccctgagattccacctcacaccagtcagaatggctaagatcaaaaattcaggtgacagcagatgctggcgtggatgtggagaaagaggaacactcctccattgttggtgggattgcaggcttgtacaaccactctggaaatcagtctggcggttcctcagaaaattggacatagtactaccggaggatccagcaatacctctcctgggcatatatccagaagatgccccaactggtaagaaggacacatgctccactatgttcatagcagccttttttataatagccagaagctggaaagaactcagcttgctttcttatagaaaaacccaggactacgcccagagatggcaccacctgcaaggggccctccccgccttgatcaccaactgagaaaatgccccacagctggatctcatggaggcatttccccaactgaagctcctttctctgtgataactccagcctgtgtcaagttgacacacaaaaccagccagtacagatgctaacacacctcacctgccttcaggtttctcttaaagagcctcgtgatcacattgggcctacccagataacccagactgttctcactgtcctcagtgtttagcaatttcagttcctcattgctacctaaaggaacagaaggctagaacgtgtgtgggtttggagggcacactctgcctaccattgtggcatctcaggacctaacccctgctaaacaaccaaacccatgacgctgtggaatggtccgctgttctttagggtggtggttttaaaagaggcccacacgctccatcgctaccctttcactaaagaaatctaactgtccccctggtgggctagatgtcgccactaatcaacaggatgaggcagagatattgcgggttactttggagatctagcagtttccttccttccaactttctgtcatcggaagccaggtgccatgctttgaggacaccaaagctgtcctatgacaagagattgaagccctctgccaagagccccctaacagaccttatgagaagcaggtactcagactgggaacttagctcagttgactgtaacatgcagaannnnnnnnnnnnnnnnnnnntggcgtggatgtggagaaagaggaacactcctccattgttggtgggattgcaggcttgttcaaccactctggaaatcagtcagtctggtggttcctcagaaaattggacatagtactaccggaggatccagcaatacctctcctgggcatatatccagaagatgccccaactggtaagaaggacacatgctccactatgttcatagcagccttatttataatagccagaagctggaaagaactcagcttgctttcttatagaaaaacccaggactacgcccagagatggcaccacctgcaaggggccctccccgccttgatcaccaactgagaaaatgccccacagctggatctcatggaggcatttccccaattgaagctcctttccctgtgataactccagcctgtgtcaagttgacacacaaaaccagccagtacagatgctaacacacctcacctgccttcaggcttctcttttttttttttttttttttaaagatttatttatttatttattatatgtaagtacactgtagttgtcttcagacactccagaagagggagtcagatcttgttacagatggctgtgagccaccatgtggttgctgggatttgaactctggaccttcggaagaacagtcgggtgctcttacccactgagccatctcaccagcccccttcaggcttctcttaaagagcctcgtgatcacattgggcctacccagataacccagactgttttcactgtcctcagtgtttagcaatttcagttcctcattgctacccaaaggaacagaaggctagaacgtgtgtgggtttggagggcacactctgcctaccattgtggcatctcaggacctaacccctgctaaacaaccaaacccatgacgctgtggaatggtccgctgttctttagggtggtggttttaaaagaggcccacacgctccatcgctaccctttcactaaagaaatctaactgtcccccgggtgggctagatgtcgccactaatcaacaggatgaggcagagatattgcgggttactttggagatctagcagtttccttccttccaactttctgtcatcggaagccaggtgccatgctttgaggacaccaaagctgtcctatgacaagagattgaagccctctgccaagagccccctaacagaccttatgagaagcaggtctcagactgggaacttagctcagttgactgtaacatgcagaaagggctcaggtgctccatgcagcataaagctggccccatgcacctgtgagaatctctctggactcttttataagggcactccattcacaagggctccgtcttttaggcagtttattgcctattacacagtcattggagagctagtcagctccgaaggtatcaccggcacatctaaactacagcatctctctacttccgcactgtggacaacctctaggctctaacccatgacccttcactgttctctacgtacctgtttctcttccttcttgggatactgagggctgagacggagtgtctttctcaaccccgaggctccagaacgaacaccctgctccctaagtgaacatgtggtatttgctcagtattagccttccgaaggtcagaagttaaaattcaaagtaactctgaaagaaatcagactggttctaaagtctgtattaactaacggcagaaaagaaaactggcctgcaacaaaagaaaaagcccccatgaccctacaacgcaaccctccccctgttcatcattaaaaaataaaacagtcttttccctctgaatcaattatctgtctataatcacaactggattaattaggaaatgtttccctagcccttggcttactaacgttcgtctgctagcttattcttcctaggatggctgccgtgggaatataaaatcatctaagaggagccagtgttaacttgactagaagaatgaacttgaaccatgatctcaaatcacagtctctggcaggtaacccgccctgacctgtcccgcaggatctatccacctgtctctgtcacacgccacacagtcccacctgtgtccccaaatctcctcttggcccaaagtcccgacaggggtccttgtctcctctcagctttctgacagccggagtacaggtagatccatccctagccagcaccaggcggtccgtggtcctcagcagggttttcttcagtccatctgttcacctgtctacatgtgccctgggtaagacatccaggagacctggagtgctacagagtgagcaggtgggcccagcactcctgtccagagctctttgggttattctgaggtttcctgagaaggtgactaaagtacaaagcccaaagtgagcttgtaagggagcaatctttcctctgtatcattccatttgcccttttgtctcccccataactgcctgagtccttcacacacacctttgctgaggaccaaacccaggctttcacggatgataagaaagcgctttccgttgagctacgtgccaagcctagtgagctatctctgaaagttctgaaggcttttcctaaaagagctgaaagtaagagaagacaggagcaacacagaatccactggtgactctccacttctgctgtgggttcgttggttggttgtgaatgaatgcatgcatttgcaaagcatcctggcaccacttggtcattcagacttggcattttctttctttctcatcgcaaacaagttccacgggaccccaccccccacccatgctttggttttgagacagtgcctcatgcagctcaaactagccagagagttgctatgcaactgaggctggtcttgaacccctgaccctccttcatccacctcccagatgctgggattgcaggcatgtaccatcatccctgactccatggaatctcttaatatttcatatgtctattgccaaagctccccacctccatattcccatatacaccttaatccaaattctagacatctatattctgaattacaactctctctggtccattcctgtcaagtcagtaatttttacctcaaagcttacaatccttgtacctagtatcacactgcccgatacttcacccctaactgatgctttctgccaagtcaccccctcgctcaaatccctcgagagcctaaggcatatagaacagtggcattcctcataacttccacctcactcccttccatttctgaccttggatttctgcatgtccactcttcaaaccatgtcctcccattcctatcagcaaaccctctggacccttcccactgcctccccattcctgtctgcaagccctctagacccttcccacattcttgctttgctcaccttgtcctcacacccctgtaaaatccttcttggctcccctctgtcttcactcagtatggttatctctggaaggactcatgttgttatcctctgttcccagcaaggaagtcccacccatccttagcaagtgccaagggagtgttgtctgaacttttgctgcctggcttgtgaagttcatgtgtcaactcaactcttcctcctgcacctggagtctgttgcctaaacactgtgggcattcctaaaggaggtctgtacaccagcaaggggccttttacctcagggagccctctagaacttgacaggcttagagaggcttccatcccaacatatagagcagtgtcctgcactcagattggccagtgggatgaggctgtttctcctagatgccagttctaagaattagaggagagccatcaagccagtctgacaatgtgagttcagtctccaggatctgagaggtagaagagaactaactcctgcaagctgttcccggctctccacatataagctgtgtcatgtgtacatctgcaagcacgcacagaaataaatgcaatgaaaatgtttaggggaaaaaaacccctagaggtcattatgggaattgctgccaggggcagcccaggcaccatcgcttctgtgtctctgctgtgtagtccttccagttctgaggatagttagagagcagggaggggctctcctgatcccttgtcctttcccaaacgtcccaaacaaagccctacagcatccagctcaagggcagtgagacaggtttctggtgagaggctacatcatcctggctgtccagcagctgctatgtgtgcctttagggaaagacctgcagggagtcacagtggctattcctggtaacactgtccctgggactcctttgctgattggtgtatgcttttctgtaagtctcaatgtcacctcatgtggagtggagtgacttcttgtaactgtgtagacagtgttttgtaacttcttataactgtgtagactgtgtcttgggggacatctctccaacccacttcctgcttctttgtgctaaaaaatcttgctcttctgaacatatctaggacccagatgatagccaggtggtgtcttagttagggttttactgatgtgaagagacaccatgaccgagacaactctcctacaaggacaacatttaattggggctggctgacaggttcagaggttcagtccattatcatcaaggcagaagcatggcagcatccaggcaggcatggcgcaggaggagctgagagttctacatcttcatctgaaggctgctagcagaatactggcttctaggcagctagaatgagagtcttaaagcccatgcccacagtgacacacctactccaacaaggccacacctcccagtagtgccactccctaggccaagcatattcaaaccatgacaggtggatattgaacccagttgtctacttggatttctttccctgggaatttggaataggatgcagttgactccgttggcctgcagaactgagagctgggaactcagttaaatacatacagaacagaacaagcaaaggctgttgtgataacaacaaagagtcaaggccttccttccattcagtctcaccttcctgtctaaccacagctatgccagggatgcaacaaaaggaactctgttctactctgatttcggagaggaaacaaatgatctgtggctgttcaggggaaacagaaaggctatgtgtgctaagcaacacaatcacacccatgctatagaggatggccactggctagctagtacaggagatagggaggggccccaggtgacagcatctcatgcctataagctcagtgacaatgacaacagagtaaggagtgactgactcgacccaccccacccacggcaacaggtgctgcagccccaggccctgacacaggcatcatcagagacacataagtgagtcatttgagagcagctagagaaaggagggctgggccccagtggggagaggccaaatggtgtcaaccattcctagtcactgcttctgacctggcacaatacctccccctagcaacctctcttctgtcacaaggtgagcgaggatgagctcagactcccaccactgcattctcagcttagacccctctctgtcccaacatgcactccatttctagaagaccaggactccagcctgtagtctcccctcccccagcctgaaacctgcttgctcagggatggagcttcctgctcattcgttctgccacgcccactgctggaacctgcggagccacacacgtgcacctttctactggaccagagattattcggcgggaatcgggtcccctcccccttcctttataactagtgtcgcaacaataaaatttgagctttgatcagaatgaattnnnnnnnnnnnnnnnnnnnnnnnnnnnnnnnnnnnnnnnnnnnnnnnnnnnnnnnnnnnnnnnnnnnnnnnnnnnnnnnnnnnnnnnnnnnnnnnnnnnnnnnnnnnnnnnnnnnnnnnnnnnnnnnnnnnnnnnnnnnnnnnnnnnnnnnnnnnnnnnnnnnnnnnnnnnnnnnnnnnnnnnnnnnnnnnnnnnnnnnnnnnnnnnnnnnnnnnnnnnnnnnnnnnnnnnnnnnnnnnnnnnnnnnnnnnnnnnnnnnnnnnnnnnnnnnnnnnnnnnnnnnnnnnnnnnnnnnnnnnnnnnnnnnnnnnnnnnnnnnnnnnnnnnnnnnnnnnnnnnnnnnnnnnnnnnnnnnnnnnnnnnnnnnnnnnnnagagaggcagagagagagagagagagagagagagagagagagagagagagaga

SEQ ID NO: 610 - DNA, 967 bp, Mus musculus
taagttacataagtcggtggcccagtcctaagggactgttgtggggaggttgggaagttgaagaacacctagcccttccatcatgtcagccaagaatgcagaactgaagaaaactaacctgaaaaagaactacaaggctgtttgcatggaaccgaagctgacacaaatatatgatttcaaaggatttaaacaagaagggctactcatcagaaaagggatgacgcgggagctgaagtgcccccaaggacctacccttgtcgaccttaccgtgtgtctctcacatttatttccccagaacgaactcagggaggtgagagaacaactcacggaaaaaatggaagagataaaacagataaaggatataatggacaaagatttcgataaactttatgagtttgtggaaattatgaaggaaatgcagcaggatatggacgaaaagatggatgttttaattaataatcagaagaacaacaagcttccctttcaaaaccaagccaaggagcagcagaaattctggcagctaggaaagatggacaaaggctcccaagccatgatcacagaagaacccgatggagcaccattggcttgtgacaagaatgtggtgccaccaaaaccaacgaggaatccactggagtccctccatccatgtcagagttgctgcgagaaatgtttgttgtgtgccctaaagaccaaccgcaatcaggggagaccttcacaccatgcctgggtgcctttttcacccttgtcgtctggagctgctttctaatttatctgtacttcaacttcgccgaggtggagcatgtgctgccgacctagcacagccatggagcctaccaccagctccaactcatcatctcctgactcctgagctacacagcagacttttctgccctcttaaacaccctccaacccccacccctgcccaggcttccacctggaaattaaagaatctcatttaaagcaaaaa

SEQ ID NO: 611 - protein, 234 aa, Mus musculus
RTPSPSIMSAKNAELKKTNLKKNYKAVCMEPKLTQIYDFKGFKQEGLLIRKGMTRELKCPQGPTLVDLTVCLSHLFPQNELREVREQLTEKMEEIKQIKDIMDKDFDKLYEFVEIMKEMQQDMDEKMDVLINNQKNNKLPFQNQAKEQQKFWQLGKMDKGSQAMITEEPDGAPLACDKNVVPPKPTRNPLESLHPCQSCCEKCLLCALKTNRNQGRPSHHAWVPFSPLSSGAAF

SEQ ID NO: 612 - DNA, 29584 bp, Homo sapiens
  misc_feature (1)...(29584): n = A,T,C or G
tctactccccaagcaaggaaggtggagggtgtatgcccctcggggaagagtctggggtgcaggtcaaatgtgctggctgtgtagccatggctcccccatttagctgtgacttcagaaaagttaacttctgagttaaacagtttcctcacctgcaaaatgggaatagcagcagtgtttatttcttagggtagtcatgtgggctaaataaacacacacaaggccgggtgtggtggctcacgcctgtaatctcagcactttgggaggccgaggtaggcagattgcctgagctcaggagttcgagaccagcctaggcaacacggtgaaaccccgtctctactaaaatacaaaaaactagccaggcatagcggcgtacacctgtagtcccagctagtcgggaggctggggcaggagaattgcttgaacccaggaggcagaggctgcagtgagctgaaatcatgtcaccacactccacctgggcgacagagcgagactccgtctccaagaaacacgcacatacacacacacaggcacgcacacacacaaaaaaaatgcttgctcaagccactacctggtttgtgacagtggttccctgtatcccagcaggcaaaccattgactctaaggacccacaaggaagaagactggcagggccactgaaacacattgaaacagaggatgcaggccccaagctcctcatcagttgccctttagcaatgggacagatcaacatctctttaagcctgagccatccacccttccatgaggaaatggtgccatgtgtccccggcccctaagctgctctcccatttggcatgaaccaagctgtggaaaccggttgaggagcagcaggaggctgcagaggcggggccaggggcttccccaggaggggccatacatggagctggggtttgcactcttgagaggatgtctgagagtgagctcaggaggggctgtggcaggtgcagctgtggctgaggactgctcaagggaatctgaaaaatgggatattccatcctggaaaaaggggctggtgggggcgtggggtttagacaaatacccttatattagccaggtgccaggggaggaaacaccacgaatgagagcaggaggaggtgggggctttagaatgtgcccattcccattcctatcactgagccaagagagagnnnnnnnnnnnnnnnnnnnnnnnnnnnnnnnnnnnnnnnnnnnnnnnnnnnnnnnnnnnnnnnnnnnnnnnnnnnnnnnnnnnnnnnnnnnnnnnnnnnnnnnnnnnnnnnnnnnnnnnnnnnnnnnnnnnnnnnnnnnnnnnnnnnnnnnnnnnnnnnnnnnnnnnnnnnnnnnnnnnnnnnnnnnnnnnnnnnnnnnnnnnnnnnnnnnnnnnnnnnnnnnnnnnnnnnnnnnnnnnnnnnnnnnnnnnnnnnnnnnnnnnnnnnnnnnnccccagagctcttgctggaactgcctgagaaggaaggtcaagagaggaaggtcctgcagtccacccagtggtcagctaccctgaggctgggccgtaagcgccacagctgagggaggagatgtgctgctgctcaggagatgaagtgacgggtcaagagggaggtaagggtgggacgtccagaggaacagcaggatgaaggccaggtaaggttattgcatcagtgagaggagtctcatgggacaccaggccagcacttcacagtgtccttcctgtggacttactgtggctcccattttctttttttgtttgtttttttgtttttgagacagagtctcactctgttgccaaggctggagtgtagtggtgcaatctcagcttactgcaacctccgcctcctggattcaagcaattctcctgcctcagcctcctgagtagctggattacaggtgcatgcctccatgcccagctaatttttgtatttttagtagagatggggttttgccatgttggccaggctggtctcaaactcctgacctcaggtgatccacccgcctcggcctcccaaagtgctgggattacaagtgtgacccactgtgcccggccggctcccatttttcttattctctgagcactgacagctgaaggagacaatactcagaacccaagggctgctgcgtttatgaatagcccatcatttcctgaggcaggaatgataggacctccaaaaacaagaatatgttagctgcccagacccccatgtggtgaaatgtcagtctgacacacacagctcagagaacaccttgttgttcaacagtcttagaggatgtgtagatttccgtccagtccaaactgctgtgtgcagtgacaaggccaggcaaaggtgctcttgggccagtggagcagacagagggctcatttggtatgcagcatgcctgctgggacaggtgagcatggtctctgctagaagaaagagccatttgatatgacaggggcacactgcccccccagggcccagcatggacaggagctccccatgatgagcggagggggtgtgccgtcttcagaggctcaggcaggcaatgggactggcaaagcctggcattcagtggccctgcctggctcctgcagtggattcagagaagctaggattcagaggagctaggattcagaggagctaggattcagaggagctaggatttaggggagctaggattcaggggagctaggattcagaggagctaggattcagaggagctaggatttaggggagctaggattcaggggagctaggattcagaggagctaggattcaggggagctaggattcagaggagctaggattttggggagctaggattcagaggagctaggattcagaggagctaggattcaggggagttaggattcaggggagctaggattccggggagctaggattcagaggagctaggattcaggggagctaggattcaggggagctaggattcagaggagttaggattttggggagctggggtattgggaagctcaccaggccaggaatgaggtccagatgaacatggcagagacccagccccagtagctgggttgtgctcctcctctgggctccctcagttccctgagcctaccgcaagcatcacacttaccatcttgtgctaaaatggtcaaatgatgcctctgtgagcctcatggatggtgagttcccaggagccagcaccatgtcttaattacctgtgtgcctttggtgccttgcagagtgcttgacgcatggtagatgctcaggaagcctgtgctgaatgaacatgggaatgggtgtggtgtcacctgcatgttgaactagagctgcttgctaagagccagcctggcccggagcctgggcctgccagcgagctgtggggctgagagccaggcaggccccgggatccgtgtttctctggctgggtttctctggatgatcatcatggtctttcgagggatgagggcacaagaaggggatcaatggggtttaatcaataattagatacaaataaattcacatgtgtgtttaggggatttggcaaatgagtgcagcttgctctagcgtttgattcaatccaagttgtctttccctagagggcaattttcacacatgttgccacccagaagagtaatgtcacttatgcctcttcctcagctttaagtcagagtccagggccccagagggttcatcttgaagtgttggtttgtcacatggctcaagaacacctcagagtcccatgtagggaggagccggaagcgtcaggaagcaggcttctgttggctgctcactgcacaagcagggctgctggtgaaagtgcatgctgggtgagcagataagataaggatacctcaaccctctgtgaggaaaaggctgtcccaggtgtctgggtgcagtaaaaggtctgatgtttggctgcagaaaaccagccaagtgagagcatttgtggaaaaaaatcatgagaggcttaaacagaaacacatcgggcttccttttgctcatggccacgagtcgaaattacctaccctgagaattcacgacatggcacgaagtagacatccttgatgtttgcataggaagtgtcctcatgggtcaccaaccaggagttacctctgcacacctgggcatccccaaagatctacaatgaccaggaacatgcggccagctctgtcagttaggttctcagttgcaaagagaatccacattcagctggtttaattgttggaaggactagagaataaggctggactctaagcttccagcaacaatgttcggagccacctcggagatgggctgattcagggagctggctccctcgctccactcacagaggcaaacaggatgcctcgcaggggtttcttcagggcgtgactcagagctaaacacaacccaattttatgtccagcatatcaacgtggatctggatgtatattgtttaactttgttaaacctaaactagagaagaaaaatattttggcattaaatgcgagaggaaaatagaatccattgaattcaagttctagaaaaccacacagcctgtttatgagcattctaccaatgctctttgccaacaagagaaaaaatccacagccctgcacagggctcagtgatgtaacaagaagaaaggagcaaaccaccttggaaactgcctaattcttagtctttaaatgcacccagatgctccctactcaccactcagtcacccaggagaacctcccaggctggctatgtctatgctagcatcagttccctcacttctctcatctcccctgggtctctccaccagagctctcaggatctgcctttggcttctctgtttggagacccacttaaccagttttcttgagcacattgacctcagctctctacgtgactcttggctttacaagttccctcacttttatcaccaccccacagccccaggtaagagatgctctaggccaggcgcagtggctcatgcctataatcccagcactttgggaggccaaggtgggcggatcatctgaggtcaggagttcgagaccagcttggccaacagggtaaaaccccgtctctactaaaaatacaaaaaaaaaattaaccaggcatagtgatggggtcctgtaatcctagctacttgggaggctcaggcaggagaatagcttgaacgtggcaggtggaagttgcagtgagttgagatcatgccactgcactccagcctgggtgaaaagagtgaaactctgtcttaaattaaaaaaaggaaaaaaaaagagagagagagagaaatgctctatctccagcctaggcccaaacccctaccaagagaagaggattcaaactttctgggccaatgttcacatggactcagctctgaggtcctaatgacctcgggggcagaacgttcaagggaaggaggtaaaccagatgtaaaagagtcaatggccaggctgaccccactggatgccaaccagcagtcagtatctccgggttctgaaaaacttggctcaatctgagtcattgccatgttcggtgggtggggcctagcatttggcatctccaggcaggaatcaagttcaggtggcttcatggggctggacacaaaggttcagctgaagaaggttatggattctcagccaagaagacagcagcagggcccacccctcaggaaggggctggcaaagctgaggcaacttggttgggccctagtgctactcagagggcttagaacagcaagagaagtgtagaccagacccacattctgtgctgcagaagggcagaagcctgtggtggggagggaggtttgcagggccttccacagaatgagactgggttagactgggactgggacagactggaactattgcacgggaaagccctggacaaaccagatcattattccagtctctgtctcaatgctccagcccactggccattcaggtgacacagaggtgagtccctaaccctaatcctaactcttccagttcacatttgctaggagatttcattctgtttgagtgtccagtgtaggtttcctcttcttttttgttttttgttttttaattagacagggtctcattctgttgcccagactggagtgcagtggtgtgatcctagctcactgcagccttggcctcctgggctcaagcaatccttccacctcagcctctaaagtagctgggaccacaggcgtgcaccaccaaacccagctactgacttcatggattttggaccttgtaagctacctcccttttaccctaagtgtggaagaactcgaaatcaagttttcttatgaggagacttgttagagtagaataaggaagatgaaatgtgtcaggaaagtatagcggagattagctgcctgccccataagcctgtctcctcttattcttgggagaaacctggccatatttcccagcctcttttgcagtgagatatggccttgtgattatattccagccaaaggaatgtgagtgggagagacgagggctattcccaggactaacccaagaaaccctcccatctgagacgttccactctccatggaccctgtgtgaagcatagtcccccagcaaggccagccccaagaggctactgtgccactcagtttgattgtttcagtgatggatgggaatttgaagctgtcagaggtggagaggaggctattaggggagggaatctcaactgcagagcaccttccggcagggaagctgagagagacaggcgtgaaatcatcactgtactctatttgggttccatccaaagagggtaaagggaactggctaagtaaggaggcctcaggagccctgtttggcaggagcagggagagcctctgctggctggcggtgttgtctttatctcacatggtaggtgccctgtgatggttggttgtgggaagagtagcagtttcccctgggtctcagaaggccctggcaagcataggcctgtcatggtgaacttacagagaagatccttccacaatacatttgctcagacttttcacttgtcattggctgtattgaaatagccagagatttacaatgatctgttcagactgttatgttttgttgctgaaatagaggtaccaggaagttcatatgataaaaactggatataaattttccaaagaaacaacataataggattatgattccagccaaggtctgatacactatgataaaaatgatcagaaattgcatagtaatcagtgtgccaatgataaaagctatttctactctgctcggagtaaagctttccaaggtgtctataaatcagtcaagtaggatgacacaggaatcaatcatatgagatctctaaaaatgtcatgtaagaggatctcatgtaagatcgtctctggctgagggcagccacccagatactgcagcctgttgggatgtaaacagccagggcatcctaagtgtgagtcgtctaggtcacatgtattgagccgtgtctgtttgagtttgactggacagcaaagcctgtgggattctgggtctttgtgaaatgttccaccctaatcaaaggactttagaacattgggcccccagtggtcgaataggcccctcagcacgcatgatgttctcttcatgttctctgggccttgacgcagggagtggctgagcctggacctcatcatgggccagacccagaatcacaaaatgccaaactcagaggcttaaaaccattttaaaattccccccgaccccagcctcccctcacaacactgtatccttaaaactgaaaaaaaaaaagcaggacccttgtaaagaaaatgaaacccaaatgatatcaacttggagaacagagacaggtggctgcttctttctgtctgttgtgaatattccttttcccccaaactccgatggagcagcagtgggctctatgctgcttgccctggtacagaggggttttgccctgaagggggattaggaaaagcgtgtctggcgttcttcaagtaagaacgtcctatggcttacctagaacaaagtcacaccacagcaataccaacactgcaacactgcttcaacctcgtttctcttgcaggtgcaaaagcttcttaaaagaatatgagaatcattattcagactgggcatggtggctcatgcttgcaatcctagcactctgggaggccgaggtgggaggatcccttgagctcaggagttggagatcagcctgagcaacatagtgagaccttgtctccacaaaaaaattttaaaaattagctgggagtggggtggcgcatgcctgtggtcccagctacacaggatgctgaggcaggagaattgcttgagtccaggggttcgagactgcaatgatccatgatcataccactgcactccagcctgggagaaagagcaagatcctgtctcttcataaataaataatcagtattcaggttcgccacgtggattcccccagccccgccagaatatatcgataaaacaatggtgtacaatgtttgagaacatgaatagtaaacgctgtgagaaggcacaagcccagagctgtggctctgtagttaaaattctgcccaaatgataataccatgtgtacttgtgtatatatacatagataattttttactttataatgcagctttgcattgagaccctgatttctcttagaccttctttcctaatagataggccagtgggctcatgtgctatgcttggctagaaggcagctcatttaacaactgctcagccaagcaagggaagctctactgcaggtccaggaggcccccaagccaaaattagcagaaggaggtggggcacattttcacggggctggtggatgttgagatggagtcagtcattttcactgtaattcccttagaggaagggcattcctaccacgaggccatcagatctgagagggctgaattaaaaggtccaaggaaactgaaaagttccagcccctcatttataagtggggaaagtgaagcctgggaagctggtgaccacccccaactccctctccttccgctgatgcagtggcagacacattctcctctggctatggtggagtaagacccacagctgtcaccagtgtcagggctgggaaatcaccacctaggaaatgcatcagaagtgctgcaggtggctccagaagttccagtggcctccaggaaggatagtcccaagcaggtgtgtgaaatgggagggtaagtgtggtcagtagtggcctgcatggggatgtcattcacatgcaatttgcattagttcctgtactcctgtgctgtctgtcctcagatgtccatgttggccttttctgtgcaactagcagttgaaatgagagggaagaaggaagtgaatgaccagtgataagaggaaaagagaaatcaatttcaccaacccagatccccagtgattttttatcccatggggtgccatgttcctctgactgtctactttagcacaaactatggctacccgcagaatggccttttctttagtattcttcatttgcccgaaaagcttcttatctttagcttcttgtcccaaccctcttcccggatgatagaagaactaggaaaagagaatttttaggtgggcaggggtctgggggtggttgtgggacaggggcagtgtgaggtcagaggcatcagaaaccatcctgctgagactggctaccccacctcatacagagtaacccaggttaagtgagacggtgcatgcacgttgaaccagagagacttcatggcatcctccagcccaaggtggcttccggtccgaggtggggtcggttcgcgcgaggagcgcacagcagaggacatgggctgtgcgctcagaggaggagctggctgtccctggaggacgtccttctgagtcagtaggtgagtcctgctgcagaaggagccactgcttctgacgcgtgccttgcacttcgaccgtagcaggccatgatcctcctcagtgtggactttccttctgttgcaagagggaggcctggtgggactctgaaacctggcctgaacccctcatctcagtggccgaagccccccaggcctgaagctgtggtgacgctctggaccaccatgtgggtcctggcattgtgacctcagctgttccgtacacaaaggggtggtcaccctgccctcaccttgacctgtaagttgcctaggacagtggcctggtcccaggggctgttgtggggagttgaagaacaccctggcctcctccatcatgtcggccaagagggcagaattgaagaaaacacatctggtaaaagagagacattgctggacagtgtgggtcctctctgagctcctactgaatggagatggtgtcggggcaagggatacagagaatgctcgcatgaatctctggtttttctttctctgtactgagcataaagcagcctctcagtctggaaggggtgtgggattaatccctagccttgggggtgggaaggaaagaggcctctgctgcctccctctggggatgaggagcactgccaagggagcactccctactccaagaccactcatggttccacggcccatgccaggcctgccaggcccacatctaaccagcagggctaaggctcagaataaccttattagataaatataatcatcacgtcgattttatagatgaggaaatgggggctcagagaggctaagcaactcacccaaaataacagagatagtagagaggtcagctgagactatagtgcaaatctgcctatggccaaagcccttgctctggaaacaacacttccggggcttgcttctagttatcttaaagtgctttctccacgctggcgcctccagcagggagagggctgcctgccaaataggcagacacacgcccataggaagaggacagcacgacaagatgtgagttgttaggaatcggatccgggtgctgcggggtctgtgagcctgagctcaagccagttggacaggcagggttgcatggttgtggggggcagggggcagggttcccgtgcaagggccagatgttctcctccccaatcctgatgtctgccagcctgaatctcagtctcctctttttgcagagcaagaactacaaggcagtttgcctggaattgaagccagagccgaccaaagtaagaagcccttttgagaccatgcaggcagccaggcctgagatccatggggaagtgaccaggagtcaggggtcatttgctgatcctagtggccaagatttgtcccaggtgctgggggatgcactgagagttcttgctctcatagaacttcacactgtaaccaatcagatacataaacgaacaaggactcattcagcagtgttacctgctctgctgggaatcaagacagggagacatgtctgagtggctgccgtggagtgggtggtagggaaaggccttcctttgagctgagagctgaaggacaagactctggctttgcaaaggcagagtaagagccttctaggcagaggaggcagcatgcactgaggcccaaggtgggaatgagcctggctgttcaagggacaaaaggagctgaggccccgtgggccagcaggggagtggaacaagatgagctgaaagagggaggaggatagaggaaccttctgcacaggtggggccaccagctttcctcttgccttagccctaagggaggaacagaaacacagggggatctcttctgcctctgcacttccaccgcccatctgcaattcccaaaggtctgtgttcctgtttcaatccacagacatttgattacaaagcagttaaacaagaagggcggtttaccaaagcaggagtgacacaggacctaaaggtgagtgcgtgaacttggaggcatgtctatattccaaaccacgtgagtgtaagttttccccaaatcctcagtgcctgtttcctaaatacaagaatatcctcttacataggcacagtgcaattatcaaaatccagaagttaacacacagacaatactcatctgtagcccttgttctaatttcaccagttgtcccacacatgtgttgcataacaacagaaaggggacgttttctggtctagggtctgatccaggatcacacattgcctcgaattaccaggtgtcttttctataatctggaacagaacagttctttttctttgggtacactgacatttatttatttttattttattttttgagacaaggtctccctctgtcgcccaggctggagtgcagtggcatgatctaggctcactgcaacctccaactcccaagttcaagcaattctcctgcctcagcctcccgagtatctgggactataggcgtgcaccaccatgcccagctaatttttgtatttttagtagacacagggtttcaccatattggttttgaactcctgacctcagctgatctgtctgccttggcctcctgaagtgctgggattacaggtttgagccactgcacctcgtctggggacattgacatttttacagattacagatcacttatgttgtgggataaccctcaatttggctttgtctgttggattcctcatgatgagattcaggctgtgcattttttggcagagacacatgatgcctgtaggtcccactatcttatagtctttttaaaacattaattaattaattaattttgagatgggggtgggggtctcgctatgttgcccaggctggtttcaaactccttgtttcaagtgatcctcccgccttggcctcccaaagtgctgggattacaggtgtgagccagtgcgcctggtctatcctattgtctcaacaacatcttttctttcctccctattgaaagcttttctctgacagtgtcccaggatctttcctttcctcctgttgatggtttcccctccatcctagatatttctttcctccttctcttctccattttatttcctcagaatgaactcagggaagtgagagaagagctcaaggagaaaatggaggagataaaacaggtaagaagatgaggccttccatatcatggagggaaagtgtagcttcaggaaaaatgcaatccttaagtttgaatagtgaaggaaagcaggaattgcatggaaaaatgtaactcagtcctaatacccagagcacttcagtattaggttattcacttcttacttgtttgatgcctaaacccaatttttgagtgactgaggactccctaaagtgtctctttggtaagggtgggtgatgtcaccttagtgatgaagctgagtaagaggggctgatttggaatatgaatttaggggaagtcagggaccaaccccatcttccttattcacttcccctgagcaagttgcaaagcaggaaacctctcatttctatgatacaaccaaccaaccacctgtagcatccttaggaaaaaagcgaataatcgagcaagaaagtgtaatcgaagctgtggttcaagctccacatgcagtcttgcagtagccagatctaagccgtgccaaggctgatggtggtggtgacttgatggtgcttgcaccctagtcccttcacagactccttgagaagaaagtggctctaacaggccattattagtccatgccagagaagcagccactgccctttgcttaaaatgcctgaaagatgccacaactaacctcaataacatgctctgtgctttgtcaagccatgcctttcttccttgttagataaaggatctaatggacaaggattttgataaacttcacgaatttgtggaaattatgaaggtaagcattacttgagtgccttccatgggccagtaccatactggaaactgtggaagagacaccagcagaccctgccctccaggagcttattatctactagtagtcccatattccattgcaagaaagcattgcaagccaaataattaattcgttgtttgctagttaggggcttagagacatgagaaatgaatgcgggttggagtaagcagcgaagtccttacagagaaagtgagtctcaagttgagccttgaagactgcatgggaagcttaatgcaaatctcatcaagagcccagtaagattcttttttaactcaaaaaattactaggatgatctagattctagagcagtgattgacaacatgtggtgtgtttcagaatcacctggaacactaataaaacagagcctgggctcatgttcagatggtgctgggcccttgtagtttagacaagttcccaggggaaagactgagaagcataagctggcaaaagcaaataggtacccatttttcaagagttgtaaggggacattagccttaccagatattaaaattcacgataaaaacaaagttattaaatcagcccaacgataaccaaacacatgaatgaaatgggatagataacgcctcaacagcctctctgcctgggatgtaatgagaatcagttgtgagaattttaaaactccatttacttagaccctttcccagaggaactgaataaaaatctccagggtgggccggagttgcttaaaactccgtttagattcagatgcttgcctgtggatgagaaccaggtcctaaacactttagcagcagttactaaccttggctgcacattagaatcacctggaaagcctttcacctatgccctccccatccaggctacacctcataacgattaagtcagaagctcttagaatgaggtccagacgccagtgggttttagttgcccaggtgattccagtgtatactcaagttgagaatcacagctctatagaatttacaatatgataaaggtgattttttgatgtcagtcagaaggaaaggattaggtagtaatattagaaacattgcttgactatatgaagaaaaaacttaagccagttaacactgtaaagctaaatagtctatgaagtgattttaaataataaaaaccaataagaagaaatgttaagtaaatatgtaaatagaagttctaaatataaatacaatggaagaaattacaaaggacatattgatatatttaactatgtaagatttttttaaaagaattatgacagaaaaatcacttacatttacagaattaaagaaactgtttgggggaacatttttccaaaaatataagcacagaaaaaaggtttttatccataacatataaagttcacataaatcaataagaactaagtaggaaaatagacaagtgtgaacagacaatccacagaagagaatataactaaaaagcaataaacatattaacaaaggcctgacctcataattaaatacatgcaaatgaacaatcaattattgttacactcaagcaaaattttaatttattacaattacagtataagacatataaatgctcttatactgttaattagagtgcaaatttgtacaaaactggaacattgttagacaatagatataaaaaaatcaacctcttgatttgtcaatttcacttcttagaatttaacctatgagaataatcagaaacgccatcatgggtatacataaaaagatgttcatgacaggattatttgtaataataaaaatttggaaacgacctcaattttcaacagtaggggaatggccaaataaattatgaaatacttatataataaaagttaggaactattaaagacaatgtttagaaagaatatttataataagaactaaaaaagcaagatacaagtaatatacataggctgatctcagctaggttaaaaaaaataagcaaatatatagaaaaaagactggaaagaaatataccaaaggggttcatagcagttatttctggatgagaatattcatacttttatatccctctgtactgtccaaattttctacaaagggcatgcattaattatttctctgttaaaatccaaacaaagttaagtgttttgttggtggggaggctgggtatggaaaggcacaaaggaggcgatttcaggcaggggaaccccttaagcagggcaggaggcaggaggagtatgttgtatatggtggtcagcacggggatcagtcatgaagtgggaccactgggggaaactgtgagggaaaaaaaaaatgaatgggcacaaaggctgtaggtaatgatggcttttgaaagacatgcagacaagctaggacttggttctgtgagcagcaagaggcctctggagattcttaatcaaagaacattctgggaggagcacttcaaaaagcttagcccggcaggttttgtttgcaaggcggcctgggtggggcccggggagcaggtggagatgtctgacagcaagaacaccacagctggaccaggtgtagggaaagaaggaagagataaatctgaaagatgcactgagggaaaaataacagttcctggtgactgattcaatatggagactgaagtcttgagaggcaagcgtccgtgatgacaccaaattttaatctggttgattaaaagaaagtggtgacgatgacaatgacagtggggagatagaggtagcttgggaaaatgaaatcagtttggaacatgatgattttgaaggggtacatgttggtgaaacgtgtaagaatatgggacattttggctctgatgttttggacctaggggacattgacttcaaggatattttgactctatgaatacaaatattttattcaaatttgtactaacatttaaaaatgcttttcaagaaggtattttatgaaatcatctctatgcagatggtgtaatttcttgatcaattttctatagtacatcaattaaactgttaccaaatctttcatttttaatgaaaattactttattggaataaattgtttttatttctgttttatgacaacccaaacctgtttttctctgtgacaaatattgtcagttatagcttctaccatcttagaatttttctcatgtccactatttccattcaatttacccaggtcacattttatagatcaaaactttgtcaagattttattattccttctgttctgagcgaataatacgtgtgatgtatccctttagctgctgtcattttactttttgttgaccatctttgccaggaattaggtaaaagatgaagcaaacataaatatgcaggatctgggtgcatgccaagggtcaaaacattgcagtcaaattgtctttggggtcacaagattggtcttcttggttccatcattttataggcatcaaaccaaggcaagcattggttttatccaaagtgtgagatcagataaaacagtagctggcctctggctcacctagagacttcagaaaagtcccctaatgtctctgcctgtgctttcgtctcattggggaagggggatgaggaaggggagaagctgtacatgtcacggacactccaaaagccacctcacccaagtctagcgaggattcttgaggaagtaagatgcagaatggtttgcagagaggcaggaggaaggtatttccaaagtccttcaaaatgaagatgctagttctgaattctctctcgaaggaaatgcagaaagatatggatgagaagatggacattttaataaatacacagaagaactataagctgtaagtgtaacctgcactcgtctctcctcatccctaaagggtctcctcccttccctttgttggatccctttggggttcagaggacacccagactcttggaggagttgtctttgctcctactgcccctgtgacttggagtcaaggccttccatggccacccgtgtactggttatctccttgtcatgctgcaaaatgtctccccaactctctgcccctccctggccctcctcccccagtccccttagaagagcaccaaaggagcagcaggaactcaggctgatgggaaagactcacagagaaccacagctcaggcccaagaaaatggatggagccagtggagtcaatggagcaccctgtgctcttcacaagaagacgatggcaccacaaaaaacaaaacagggctcactggatccccttcatcactgtgggacctgctgcgtaagtgaaaccctgcccgagcccagcactggtgccagacccctggctccggctccctggtgacttccccgagcttgtgctgtatcatagtgaagggacaggtccgcccgctgctgacttctgggtgccgcccgagcctgcgccctccctgacctgccttgccttctaggcctgtggagcctccttagctgtgaccatgcaggacttgaccctggatgggcctacccgccagctccaccctcttattctgtccttccctttagcaagggcagataaggtgcctagcaggctgcccttcttggaccaggggaaattgatctttcttgtgccgtttctgtcctctgcaggagaaatgtttgttgtgtgctctaaagaacaactacaatcggggtaggtagattcatacaagatgtgccttttctcgatcaggtgccttgttgtccccaaggccatgtgctcccagccgcattcacatcacacccctcctgaggttgtgccaggagtagggactgttagcagatgctgccacccagcatgctcagtcatacaggatgtggcaccaggaaggaggacttgggtcacccagcctagaggctgctgcctggggctcccatggtggggagggtgcaccactagtggcggaactgaccttgcctcaggtcctgccctttctccccatccagtgggaaatattcacaccaggtctgggcacccttttcacccttggcttctggagctgccttctgatttatctgtacctcaaccccggtgacatcgaatatgtgtttccaacctagcgcagctgcagaacctaccagcagttccgattcatcacctccaagctccttaagatgcacagtcagggcttcttgtcctgttaaataccaccccaaccccaggcctccactggagattaaaaaccttcattcaaagccaaaggggatgtcatggttttgagtaccagtccaaaacttgagtgtgtggaggttgattatttttggttctatatcagtgtatttcagactccaacccttccccctgcttcctgatggattggtgggaaattacatcttagtcatcttagggtcctcccaaccaccacctccctccattccacctgggtctgcaaacgtcccaggtcatagcatggggagggcccctgatgatagcggacgccagtctgtgtggtctcaggagagaccctgctgcctggcccatccgctccctccacataatcagcctccacctgtgcatggggccagggtgtcttgggtgatgcagggaacccctcagcctcgagttctgcctgcaccacacccctctgaggtcttgtcaccaagcaggactcaggtccctgctgctcataggaactgggtagctttcttgggttctggggatccacccttctcacccccttgaaggtttcctctccctccctccacccccaaagggaacattccttcagaggcctcaggcctttacaaaggtggagaggagccagtgaccacccaaccttctgtgggccacgctgtgcctgccccaaagtcccagactgagggaaggtgaagcttaactgccagcttgaaatgagagtaaagaagatacagagcaaacagtgtttcagaaactgtcctgccctgggtgtgattctttggcttcaatttgaaggaggaggaatgatgggatttcatattttatttcacaccagttcctccttgtttcatctctttgctaagctggctgcttctaccatctaataaataattggccaagttctttttttttggaattttattattatggttaattttgtgggttcatagtaggtgtatatatttatggggtacatgagatgttttgacaaagttacgcaaggtgaaataagcatgccatggagaatggggtatccatcccttcaagcatttatctttgagttgcaaacaatccagttacgctttaagttatttgaaaatgtacagttattgactgtagtcaccctgttgtgctatcaaatggtaggtctaatttattctattttttgtaccccttaaccatccctaccggcccccaagcccctgactacccttcccagcctctggtaaccatccttctactctatatccatgagtttcattgttttcatttttagatcccacaaataagtgagaacatgcgatgtttgtctttctgtgcccggcttatttcactaaacataatgatttccagttccatccacattgttgcaaacgacaggagttcattctttttatggctgaatagaactcaattgtgtgtgtgtacgatattttcctcattcatctgttgatgacacttaggttgcttccgaatcctggctattgtgaacagtgatgcaacaaatgtgagagtgcagatatctcttcaatatgctgattttctttcttgtaggtatatacgcagcagtgggactgctggatctatggtagctcaatttttagttttttgaggaacaacctccaaactgttctccatagtggctgtactaatttacattcccaccaacagtgtacaaagattcccttttctccgggtcaagttcttaatggctgcaaattaatgagcaatgtatttggtgcttcagataaacatttaaaaaacaaaactcaaaacacatgtaggccttgtttgcaaggagcttatagctttaaaggtgagatggcaaacatgcagaataacaatatggaccgtgtagaaataagtacaataatcataagcatgtgatgaaagcagaaatggatcagaaatagggaaaagaagaagggtgggcagaactctgtattagttccctattgctgctgtcacagatcaccacaaatttaatgacttaagacaacaagaaatgggcctaagatggatcttgttgggctcaaatcaaggtgccagcacaactgcattccttctggaagctctaggggaaaatctgcttcctggcctttccccacttctggaggccacctgccttccttggctgatggtccctccccatcttcaaggccagcaatggccatgggatctttcttgtgcctcatcactctgacattgactcttctgcctcttgctaccacatttaaggacccttgtgattacattgagcccacctgggtaatccagaataatctttttattttaaggttagccagttagcaactctaattccccttttccaggtaacataacatattcacaggctcagggagttagaacatggacatctttgcaggacattattctacccaccacaggggacttcccagaccctgtcccttgactaccaagcctccaaacacttgggaacactgcactattcagttctgtgctgtggtggttttaaactaggcccacaaattctttgatactccttttatactctttccttcaagaggaacccagttcctctcctcttaagtgtgggctacacagagtgacttgcttctaatgaatggaacatagcagaagtgatgtgtattacttctgaggttaagtcgtagaagacatggtggcttccatcttgctctctcttggacactcattctgagtgaagccggctgccatgttgtaaggacacccaagcaatcctgtggagagggccacatggcaagaaactgaggcctcctgccaatagccatttgagtgagccatttgaccaggaagtgaatcctccagccccagtagagccttcagatgatggcaaccctggctgacctcttgcctgcaactgcctgagaagatcctgagccagaaccactcggttaagcttctcctagacacctggcctgcagcaaccatgaaataataaatgcttgttgtttttaagttgctaagtcttgaggtaatttgttgttacttagcaacagataagaatgtgtctatctcctcttcattgttttaaagacttgaaacattgagatttatatggttatgcacacaaatgtacaacttgatgaacttttacatacagatacatgactggaattgttctagaacacttccatcccctcttcccagctcacatttgccccatatccaggttaccactattttaatctctaccattttgtgttattttgcctgttcttaaagttgacataaatgggataatatgttatgtattattttgctcaaaattgtacaactcatgcatattgtttgtatatagcagtaattcattattttttaactgccatgaagtttctatcttgtgtctacctcataatctatttttctattctcctgttggtagtccagattgttctttaaaataatctaagtaaaagccattttcccagttgccctctgtccattcttccctatatttgaacactttccttagtccacagtgcctggtgggttacactgcttcctcttcactgaggagtgtacgaaagggcctgcctgcctccccatgcctactctgcttagccctgaatgcctgtcctctgcctgnnnnnnnnnnnnnnnnnnnnnnnnnnnnnnnnnnnnnnnnnnnnnnnnnnnnnnnnnnnnnnnnnnnnnnnnnnnnnnnnnnnnnnnnnnnnnnnnnnnnnnnnnnnnnnnnnnnnnnnnnnnnnnnnnnnnnnnnnnnnnnnnnnnnnnnnnnnnnnnnnnnnnnnnnnnnnnnnnnnnnnnnnnnnnnnnnnnnnnnnnnnnnnnnnnnnnnnnnnnnnnnnnnnnnnnnnnnnnnnnnnnnnnnnnnnnnnnnnnnnnnnnnnnnnnnnnnnnnnnnnnnnnnnnnnnnnnnnnnnnnnnnnnnnnnnnnnnnnnnnnnnnnnnnnnnnnnnnnnnnnnnnnnnnnnnnnnnnnnnnnnnnnnnnnnnnnnnnnnnnnnnnnnnnnnnnnnnnnnnnnnnnnnnnnnnnnnnnnnnnnnnnnnnnnnnnnnnnnnnnnnnnnnnnnnnnnnnnnnnnnnnnnnnnnnnnnnnnnnnnnnnnnnnnnnnnnnnnnnnnnnnnnnnnnnnnnnnnnnnnnnnnnnnnnnnnnnnnnnnnnnnnnnnnnnnnnnnnnnnnnnnnnnnnnnnnnnnnnnnnnnnnnnnnnnnnnnnnnnnnnnnnnnnnnnnnnnnnnnnnnnnnnnnnnnnnnnnnnnnnnnnnnnnnnnnnnnnnnnnnnnnnnnnnnnnnnnnnnnnnnnnnnnnnnnnnnnnnnnnnnnnnnnnnnnnnnnnnnnnnnnnnnnnnnnnnnnnnnnnnnnnnnnnnnnnnnnnnnnnnnnnnnnnnnnnnnnnnnnnnnnnnnnnnnnnnnnnnnnnnnnnnnnnnnnnnnnnnnnnnnnnnnnnnnnnnnnnnnnnnnnnnnnnnnnnnnnnnnnnnnnnnnnnnnnnnnnnnnnnnnnnnnnnnnnnnnnnnnnnnnnnnnnnnnnnnnnnnnnnnnnnnnnnnnnnnnnnnnnnnnnnnnnnnnnnnnnnnnnnnnnnnnnnnnnnnnnnnnnnnnnnnnnnnnnnnnnnnnnnnnnnnnnnnnnnnnnnnnnnnnnnnnnnnnnnnnnnnnnnnnnnnnnnnnnnnnnnnnnnnnnnnnnnnnnnnnnnnnnnnnnnnnnnnnnnnnnnnnnnnnnnnnnnnnnnnnnnnnnnnnnnnnnnnnnnnnnnnnnnnnnnnnnnnnnnnnnnnnnnnnnnnnnnnnnnnnnnnnnnnnnnnnnnnnnnnnnnnnnnnnnnnnnnnnnnnnnnnnnnnnnnnnnnnnnnnnnnnnnnnnnnnnnnnnnnnnnnnnnnnnnnnnnnnnnnnnnnnnnnnnnnnnnnnnnnnnnnnnnnnnnnnnnnnnnnnnnnnnnnnnnnnnnnnnnnnnnnnnnnnnnnnnnnnnnnnnnnnnnnnnnnnnnnnnnnnnnnnnnnnnnnnnnnnnnnnnnnnnnnnnnnnnnnnnnnnnnnnnnnnnnnnnnnnnnnnnnnnnnnnnnnnnnnnnnnnnnnnnnnnnnnnnnnnnnnnnnnnnnnnnnnnnnnnnnnnnnnnnncttggactcaagccctgacctgtcacccaagcttggtatctacctgttgtttcagggcctcatcatcctgtcaacttcaacacagccaaaaccaaacttccccgtgtccccaaacccttctctgtctgacttgctgatgggagtccttgtctttgctcagttctctgacagctagagcacaggctgatctccagccaaaggttggacctcatccccccacagggctttcaccagcctgtctgtttgcctgtccacttggtgccctggactaaacatccctggaggaaacctggagtgctgtggagctcagagccccctgccctgagcagctggtcccagagctcctttggttattttgaggatttctgagaatacaggtaaagtacctgttacaaagcttcctctttcctcttcgatggcttcctccatgacatatctttgatggcttcttagggccttttccgaagagctgaggatgaaaaaagaggatgtgagtcccttaagggcagagactgtgtagaattcattgattatgccctgcccctgccacttgatggctgcgtggctgtggagagcatgccctttttctgcccttggtaccacgttagtcattaaagcttcacatcttctccatctcccatagcaaatgagcacctgggtcccatggcctttaaccatttcaaatgtttattcctgaattctcccctctcccatacacactctaatccaagctcttagtgtctggatcctgagctatgtccagtagcttctgacccagtcctcttgactccaggagtttcttctcacagcctggaatccattgtccacgccacttccagagatttcctcccgaactactactttactctgcaactcaccgtcttgctcaaaaaccatccccagggctgattactggtgggataacagacacactctttaacctgccgttcaaggccttgcatttcccatattatttttcaccttttctcccccgttcctatctgtaaaccctacactctagggtcccaaatgtgcccttcacattcccatatccttgccttcactccccttcttctctgagctccaggaatctcccatcatccccgctgcactgccctctgctctaacagctcctcattgacccaaggaataggtcactcggccgtgtagaggtgtttcccatcttactgttccaacctgcatatgtctttcctctccatgcagattgtcagtttctagaggcagagcttatgctgtcttcatcttcatcctcagcatggtggtcagaaccctgcacttggcaggggctgaggaaaaattttttggttgaacttttgctgcctagcctgacagattcacatgttggcccttctgacccactcctgccctcttggctctgtggccttgggactgtggacatccccgagggtcctggggtgccaacaggggtctcctgtcacatggagccctccgggactgtgcaggtttgggggcgatcccaagaaaattctccatactatccagtgtccatcccagatcatatctggaaatatacatacatcaccatggtgccaggctggcagacgggatgagcaaggctgcctcccagcctacgtaggtgccagttttaagaacagaagcaaagtcatcagggaaactgagctgccacaatctgctgaggcactaacttctttatggaaatgatgctgcagctctaattcagtgccgaggactggtggcagtggtctctgccttccccatcccttgatctttcccaagccccctcatgccccagtcccatgtcacccaactcacaggcaacaggacatctgtgtgtgtttcagggacaggcttgcctggctgtcaaaaagctgtttcctgtgcccctggggagagacctgcagggagccaccgccagacgttcctgctgacactgcgcacaggccagctttactggcaagcttgtgctttattcgtaggtctcaatgtcacctcctctgggacagaatgatacttaattttgtctcttttcctaaaaatactattcctgtcctgtgtacagagccatggtgggcatctccctgacccaggcccctacttctgtgccatgggaccctgccctcctggacataatcaggagccggttgactggaccggggtggatgccaaacccagctcacccagttggattcctttccctggggatttggaactggaatttggtgagagctcagttggccccagaattgaagatatgtaactgggagctgggttgccatctgccaccgttagctgaagatgcagaaaaagctgatctgttggaaaagaaaaccagttcacagaaagagaagaatgaagtggaggagtggagggaaaggccctgcaatccaaagaggggtctgcaagagccactctccgggtcccaggccctcttggtccagttgtagttcccaccttagctctgagggaccccctggcctcttggactatatcacccattcctgtttaggcagagtgggcttctgttatcaccaaacaagccttagctaaggccacacagaagagatcttggagatggtctggtcaatctcttccatttacaggtgaggggtttgaggtccagaggtgtgtggcgaggcgccctccgctgtggccaggccaggactacagcccaggttttctggctcccggcccagcactttgctccctttgccctgtggccctctggggccagcaactcttttagagatagcaggtgagataggaggagctcagaggtcacagccagccggatccagatacaaattggtggatgctgcagacacgttacttagcctctctgagactcagcatattcctccagaatgtaggggtgataacatctagttaataggagtgttgtgagaattaaatgagtatatatggaggaattagattttttaaaaactgttgtgttgacagtaaccatgaggtcagagttgcctttcctggatcaaaggccttccattcacagacccagttttctgacacattgactaacacttatcatgtcgaggcctgcaatgaaatgaattttgatctaccttaaaaaataaacaaatgacttacagttattttgagaggaggtaggaaataaaataataggaaaacgtgagtgggtggggatcaggactggctattctagaggacaggggtgggtcccttgtaacacagcatctcactcctgtcaacctggtggccaatgacaacagagtgaggggcagttggctcaccccagccctcccataggtaacaggtgcggcagccccaggccttgacgcatgtggtcatcagagaaacatgagggtgagtcatctgggagcaattaagaggggaggcccaggaggaggccagactgtgtcatccatcccatcactgccacagcactggcccagtgcccactcacaacattccttctcctgggtcacaggccacaggccagcccagaaggtggctgaggatgggctcaggcatccaacacttctgactggggcccagatccatctctcttaaactcagcagctctgaggatcccccaattccatggcaacgggctgcctacccaccttcccaaggggtgctactctgacttgccacagtctagtctcagcaaactgaagctgtcctttaaaaacataaattagaacatgtcactcttcagctcagaactttccagtgttttcccacttctctcagagcaaaatgcaaagtcaatggttcacaaagccctacaggatccgccctgctgccttccccatccctaaccctgtacagtatttcacttgcactttctagccatgctggtttctttgtttttcttcaaacacaacacataccctcttgcctcagggcctctgcacttgcaaaccctaccccctctcaccaccctgccaccaccatcactagaattctcagccttccagtcggccagctccctcgcctcaaagttaccttctcagtggcccccagtcccagcattccttatctctcttactgtctgctttatttttctctccagcactcttgtcaccaactcacataccatacagtttacttatttgtttattgtctgtctttttctacgagaatctaagctttttgagtgtggagattttgtttctgtcactgccatatcccagggcccagaacagtgccaggcactagcaggggatcgataagcacctgtcgaaaggccacatggacatcaagagacttaccatctactgggcactgagggttctgggctaagagcttttctaatattatttatttcatttttttttcttttgagacagagtcttgctctgtcccccaggctggagtacagtggcgtgatctccgctcactgcaacctccgcctcccgggttcaagcaattctcctgcctcagcctcccgagtagctgggattacaggtgcctaccaccacacctggctgatttttgtatttttagtagacacagggtttcaccatgttggccaggttggtcttgaactcctgaccttgtgatctgcctgcctcagcctcccaaagtgttgggattacaggcgtgagccaccacgcctggttatttatttcattttatacttatgacaaccctgtgaagtccctctgtcattctatgcagccgttgaaattgtcattcttgccattttatacaggatgaaataaactcagagagaaggtaatgagcataatctgtctgaggtcacaggatacgtggcagagctgaaattcgaatcctagcattctgacttcagaacctgtttcctggacactctggcttctctcgatgtggtccccggcccggcagcatcagcactgtctgggagcttgtgggaggtgcagcatctcaggctctaccccagacctactgaatcagaatctgcattttcacaatacttcctgggtgagcccttccagggcacactaaagtcaccactataagcaatgggatctgctgtatggaaaacagggggcctcgctctgaacaaggggctgcccacggcctgggggtcattcccctgccattaccgccccccgccctacccaggagcgctcccctgtctgctgttgcaatcctgaaagaaggctgagaagggcttggtgcaggtagtgaggctttaggcttcctcttcagctgcccacgggcctctgtcggagggccagatttcgtgttgatcagggaaggctcagcccctgcctgtgtgtgagagccaggcctgtcatggacagggctgttggagaaaacgctccccgttcacttagggagcagcaggctgcacctctcaaaagcaggcagagagccaatttgacatcagaggtacagcgctgagcccgggcaagaagccatttccccttgacacttctcaggcacttggaccaggaaggctgttaaaacaaaaacaaaacctactctcatttaggttattaatgcctgggagccctgacactcattttattaccaggagccacctttggtcttgacattcactaaggagtgggcctggaataaaaccagaaatccccattctcagtctgccccaagccctccaattccgagggcgctgtatgtataagctcgggcaggcaaaagtcgactgtgagaacacgccagcagagggcgctgtggccccatcagtccctgcccactgaactctccagaaggaaaagcggcaaggatgcaaacaagaaaatcagaccagactgggagtctagaccctgcgtcccacgcggtcccaccatggcttcctctttggaattt

SEQ ID NO: 613 - DNA, 833 bp, Homo sapiens
ccgtacacaaaggggtggtcaccctgccctcaccttgacctgtaagttgcctaggacagtggcctggtcccaggggctgttgtggggagttgaagaacaccctggcctcctccatcatgtcggccaagagggcagaattgaagaaaacacatctgagcaagaactacaaggcagtttgcctggaattgaagccagagccgaccaaaacatttgattacaaagcagttaaacaagaagggcggtttaccaaagcaggagtgacacaggacctaaagaatgaactcagggaagtgagagaagagctcaaggagaaaatggaggagataaaacagataaaggatctaatggacaaggattttgataaacttcacgaatttgtggaaattatgaaggaaatgcagaaagatatggatgagaagatggacattttaataaatacacagaagaactataagcttccccttagaagagcaccaaaggagcagcaggaactcaggctgatgggaaagactcacagagaaccacagctcaggcccaagaaaatggatggagccagtggagtcaatggagcaccctgtgctcttcacaagaagacgatggcaccacaaaaaacaaaacagggctcactggatccccttcatcactgtgggacctgctgcgagaaatgtttgttgtgtgctctaaagaacaactacaatcgggcgcagctgcagaacctaccagcagttccgattcatcacctccaagctccttaagatgcacagtcagggcttcttgtcctgttaaataccaccccaaccccaggcctccactggagattaaaaaccttcatt

SEQ ID NO: 614 - protein, 210 aa, Homo sapiens
MSAKRAELKKTHLSKNYKAVCLELKPEPTKTFDYKAVKQEGRFTKAGVTQDLKNELREVREELKEKMEEIKQIKDLMDKDFDKLHEFVEIMKEMQKDMDEKMDILINTQKNYKLPLRRAPKEQQELRLMGKTEPQLRPKKMDGASGVNGAPCALHKKTMAPQKTKQGSLDPLHHCGTCCEKCLLCALKNNYNRAQLQNLPAVPIHHLQAP

SEQ ID NO: 615 - DNA, 1034 bp, Homo sapiens
ccgtacacaaaggggtggtcaccctgccctcaccttgacctgtaagttgcctaggacagtggcctggtcccaggggctgttgtggggagttgaagaacaccctggcctcctccatcatgtcggccaagagggcagaattgaagaaaacacatctgagcaagaactacaaggcagtttgcctggaattgaagccagagccgaccaaaacatttgattacaaagcagttaaacaagaagggcggtttaccaaagcaggagtgacacaggacctaaagaatgaactcagggaagtgagagaagagctcaaggagaaaatggaggagataaaacagataaaggatctaatggacaaggattttgataaacttcacgaatttgtggaaattatgaaggaaatgcagaaagatatggatgagaagatggacattttaataaatacacagaagaactataagcttccccttagaagagcaccaaaggagcagcaggaactcaggctgatgggaaagactcacagagaaccacagctcaggcccaagaaaatggatggagccagtggagtcaatggagcaccctgtgctcttcacaagaagacgatggcaccacaaaaaacaaaacagggctcactggatccccttcatcactgtgggacctgctgcgagaaatgtttgttgtgtgctctaaagaacaactacaatcgggggaacattccttcagaggcctcaggcctttacaaaggtggagaggagccagtgaccacccaaccttctgtgggccacgctgtgcctgccccaaagtcccagactgagggaaggtgaagcttaactgccagcttgaaatgagagtaaagaagatacagagcaaacagtgtttcagaaactgtcctgccctgggtgtgattctttggcttcaatttgaaggaggaggaatgatgggatttcatattttatttcacaccagttcctccttgtttcatctctttgctaagctggctgcttctaccatctaataaataattggccaagttctttttt

SEQ ID NO: 616 - protein, 229 aa, Homo sapiens
MSAKRAELKKTHLSKNYKAVCLELKPEPTKTFDYKAVKQEGRFTKAGVTQDLKNELREVREELKEKMEEIKQIKDLMDKDFDKLHEFVEIMKEMQKDMDEKMDILINTQKNYKLPLRRAPKEQQELRLMGKTEPQLRPKKMDGASGVNGAPCALHKKTMAPQKTKQGSLDPLHHCGTCCEKCLLCALKNNYNRGNIPSEASGKGGEEPVTTQPSVGHAVPAPKSQTEGR

SEQ ID NO: 617 - DNA, 79731 bp, Mus musculus
  misc_feature (1)...(79731): n = A,T,C or G
gctcctccaagagtgttcattggtacttactgtcttgtatttgtttgggaagagagagcnnnnnnnnnnnnnnnnnnnnnnnnnnnnnnnnnnnnnnnnnnnnnnnnnnnnnnnnnnnnnnnnnnnnnnnnnnnnnnnnnnnnnnnnnnnnnnnnnnnnnnnnnnnnnnnnnnnnnnnnnnnnnnnnnnnnnnnnnnnnnnnnnnnnnnnnnnnngactctttcaatttccaacatagaccatgagtctgactactgatgaaagatagtgattgtctctatgaacacaatgaacacgtagaagtcagaggacaacttttctccttatggctttatgtgggctttaaattcaggtcctcaggcttgcatagcaggcactttatctgctcagccatctcccagccctgacacagtcactaagatgagaagatctatgaattacacacacacacacacacacacacacacacacacacacacccctttaatctcccatgtgctgattttaatcctgctatttcctgaactggctttgtgaagatttcatgccacatagtggaccaagttttgttatctgctgttgataacttggagttctgcttttgggggtctgatgtgttgaagatgactatattattgtgcaagtcagagcatatctgaaagtaaaagttggcactgttattaattatgtcagaattattaacggagtgaagcaggcttgccagagcagcagatggcattttagggaatctccattccctggttgtcttcctgcttcaaggttttattcttatggtcccttcacctgatcttccagccttggaacctcatgaattaaaaagcaaaacctatcttctgtagttttgtgtggcttgtgagtagagataattacacaggttcaattaaggcattctttcttccaagcttaatcattgttaacttactttgattccttctaaactgctgcattttaaaaaaatttaaatattcttgtctagtccactagaagatgacatctttaaaatcttcccttgaactaaaatgctttatacaaggtgccccataaatagttgattacagttcaccatcactaagttttcccaaacataaagtaccaaatagggaaactagaattaaaagccatgtgatctagattattgatgttactttttcgtaggttctaaggcttaactgtccccagtgtctaagacactgtgtccttatttctttgaaaatcctctctctcctcccaaccagnnnnnnnnnnnnnnnnnnnnnnnnnnnnnnnnnnnnnnnnnnnnnnnnnnnnnnnnnnnnnnnnnnnnnnnnnnnnnnnnnnnnnnnnnnnnnnnnnnnnnnnnnnnnnnnnnnnnnnnnnnnnnnnnnnnnnnnnnnnnnnnnnnnnnnnnnnnnnnnnnaggccaaagaacaactttggatgtacttaattagattccatagtcattaaaaaaacaacaacaacaaaaaacttctcactggtctgaagatgagtaggccaggctggctagccagtggcctctagtagcacactgcctctgcttttccagtgctggctgacaagccatgccttacaaccagctactttaaaaaacttgtgttctggggggcatagtcatccccatgattgaaggcaagtgagttactgacttcctgtatcttcagctttacctcatttagtaaggactatcttaaatacattatctccttttcccctcaaataaaaaaatgactttacttttcccttaatcttgtggtacctgctattaatatcatttggcctttattcaacatgtcttacacatctcatttctccttctgaagatgctttcacattattttgagtgcaacccataattagacacattcttacactgcaacacaatttcattcatatatatatatatattcatatatatatatatatgaatatatcacacgcacacacacaactgaaataggagtgccaagaaaaaccatccccagtactgagacatactctgatatattttttaaagtgattattttttctttttaaaaatggttttgtatttttgagagtcacttactgtaattccagctggtccagaattcagtatgaagctcaggtgacctcaaactcttgggtgatccttgggcctgaactgtgacagtgcatgttgtggcatgagctaccacgcctgacatcttttactttctaaaagatgctgctgttctccctcaaaactgactcttgaccctctaatgaactgtgacctgacctgttgctctgttgaaaagcttctaaacttgagacacataaacaccacttactggtctaaaaatgtgggtaaaaacacaattacacttttaccttctttaaattcttactaaaatttacaatttcatattctcattatatgaatgtgggtgataattagtctagaagcataactctaatattaaggactcatgttttgatgcttatattccataactgacttctctgttaagctatacattttaatgtctttataaactttctgagacttaacactcttcagaaatatgttaagactccctctctatgagtagctatctgtctcagtacattttacataaggaaagatcagtaaatattttttaaacaatttacttcttccatgttacacaagagtaactagaactcagaacaatcaagtcagacacaagtaatattatacaaataaaacttcctgtggtcaccagtagtgaaagagatagtttgctagcttggggcctctaggaaatagtaacatttgtaacatcttacgacttctaagaattcagcaacagagaagattatactaatttagtgtgattagagtaatgaaatagttaaacaaaaatgacttcttgtgccattgtataaaagttattgtattataaaacccatgatctcataaattaatgtactgtttgtaaagtcagaacacaaacaaatgaacttgaagtaaaggccaagtatttcagggcatggcaagcagtttgctttggtgagaaattgagtcatgaacggaaaaaaaaaaagtagataagtcttgaaccattggatatgctcaatcaaagaaggctttgagtgccaggccaaggaagcaaccctttattagcaaagtatttaaggccgacatgagattgtatttatttttttaattaaagcaagggcgggatggaggcagtgttttaggaagctattacatgacagcattgtacaggagagacacaacacttccacttactcctaatcttatccttcaaagttgatgctagatatttccaccagagccttaaacccaatactgtgcttccaaaacgaaactaatctaaacaaacaaacaaacaaacaaacaaacacaatgattgtcaggaagactctgcactcacgagtggtttcatgtcattactgcaaaatcaagttcctaatagtgggcttgttctctctctctctctctctctctctctctctctctctctctctctctctctctcctcttgctctctctctctctctctctctctctcctcttgctctctctctcctcttgctctctctctctctctctctctctctctctctctctctctctctctctctctcttcatgtcctctctatcccattacctctccaactcctctttctgcctctaccaggctacctcacagcaagaaagacctccttggatcctccctagagtcatggattgagccttggttcctccccgtccccccagagtcccccttcaattgatattggatcctccctagagtcatcaatttatattacatcctcctatcatttgatattacatcctctttagagtcatcaattaatattgcatgctccctagaatcaatagttgatccttgatcctctctagagttatggattgatccttggtctgcctcccctaaactccttaattgatcttggatcctccctagagccatcaattgattttggatcctccttagagttagttatcagttgttcttggatccttcctagagtcatcaattgatcctggatcctccctagagccatcaattgattttggatcctccttagagttagttatcagttgttcttggatccttcctagagtcatcaattgatcctggatcctccctagagccatttattgattttggaccttttctagaaccatcacttgattttggatcctccttagagtcatcagttgttcttagatcctccctagagtcatggattgatccttggtcctccctagagtcatcagttgatcttgggtcctccctagaggattaattttagaattctcagcctagaaatctgtaaaaacaaaaaccaaaaaccaaatgtagacagtaacttaaggatgatagtcttatgcattcccattctagcttctaagtaactgacatagagatttagtaaactttttaataagttttaagcactatgagtgggcaggtgagcatctttctaaccctctaagctatctatttcccagccatatggtcctttatcttcaatctgagtcttaccctgttgctctggcccatatgtgtcctcatgtctgctctctcattgtgacctactcatcacaactcctcctggaccctctgcctcatgctctctccacattgcctctttaccttctttcctcatgatccttctcttacttctctttgtacctgggacccctggttggtgtcagaagttcagccttcctatctcttctgcctagtcataggctgagtcatctctttattgaccaatcagagatgatggaaaataatttttacctaacattgaggctagcgatgcttgagcctgcaatcttccagactgcataccaaatcaggatctgagtacacagtacacaagaccaacccccaacaaacatcttcaatttaagtaaaaagtattaagtataaattatcctgttagagacacaaaattaatgcagataaattggttctggctgatttcatactcataattccccctgcctcagtttcctgggttttaaaatttatagacaggcaccacaattgcaagattttttttccaaggaaggagtgttttgttatttgaaatataaacaggactctacaggatagcatgcccccacccattgagaagataaaatgagttcccagctagctagaaatagaattccttgtcttatccccttctcagttttaccttttcctccccaaatagccagattatacatgatactaagacttgaaaagtaattttctttctttctttctttctttctttctttctttctttctttctttctttctttctttctctctctctctttctttctttctctctctctatttctttctttctttcatttcttcttcttcttcttcttcttcttctttagaaaaagagtagctaaataaaggtacataaggaaaaacattaggtggagaaaaacagcaaattcaggtgcacttactcatactttcaacattttgttaacaataaaagaagcagatacaatttcaagtaaatcaaaatacgtcaatgtctactaatcaaaaaaacacctccttaaattagacaaatagttctcttcttgagtttcttaggtaccatttatatgggagataaaggacaaaagagatggccagaaggtgttggctgctgttctgagatcggtctgttctttcttaccagcagtaaagactttctgatctttatcagggctgggacctaacccctacatagtttctgtgttgttaacctttcaggaatggctgagcttttgttcactgtgcatgatgtccctttgtaacttccagaataacccaaatacctgtagggaacattagttactgtgtgtaggtgtgtggttagaggttcgagattttactgaattgagagagtttttgttatagcagattctttttcaaaaacaaacaaacaaaacaatagataatgcaattaagagccaagtgaaaacctaatagccatatctcaaaagattaccatcacaatttcttagggaaatgcagattaagaaaataacatgtgccgggtgtgatgacgtatgcctttaatcccagcactcgggaggcagaggcaggcgaattcctgagttggaggccagcctggtctacagagtgagttccaggacagccagggatacacagagaaaccctgtcttgaaaaaacaaaaaacaaaaacaaaacaaaacacccccccgcaaaaaaaacaaaaataaaaaaaagaaaagaacatgtaatcttactccagttagaatgactactataaaaaagatccccctgaccccccaaatctgactaaggtaaagaaaaataggaactattctatgctcttcatggggatctaagctaatacagttacacatgtctgagtacgtgaactgagactgtggaaccatataaacttgaaaggctttatattgttataatggtcttcaaatgagatcttgaagataaacaaggaaaagttacggttgacaagtgatgtgtttgtgtgtcaagttgtcaaggaatcagttgtccctgtttttttttgtcagcttgttataagctagagttatctgtgtcaggaaagctcaatgaagaaaacacctccatcagattgcacagagggaagtctgtagggcattttcttaatcattgaggagggggttctcagctcactgtatggggtgcttatcctggcctcgtaatcctaaattgtataagaaacctggctgatggactactgatggattggctcagtagttaagagcatttgctattcttgcaaagaacttgggttcagtttctaacacccagatagcagcttgccacctccacgggcaccaggaacatatatgttgctacacagacatacatgcaggggaaacagtcatatatacaaaataacaaaatacatacatctaggagagaaattaggctgggaaagctacagggagaaaggcagggagcagtgttcttgttcctgcctgcagattcttgtgttgatgcttctgccctgacttctttctatgatggatcgactgtaagccagatacccccttttcttcaccaaattactgttggtcatgattttttattacagcagtaaaaagtaacttagggcccatggaaaacagtatgatttctttgaaaaccaaaccaaaccaaaccaaaactatgggaaagccctgctaattaaggtccaaatctaccattgcccagaaggccttctgggctcagcacaaaatggaggccttcctttactggcagggcttcccccttctctaaccttaaccctccacatacctctacctgcagagtatcacatagccttggttaagattacaggttcaactttcttcctcccaatatgaacctgttcagctagcacctgagatttctggatgcctctacatgttaatgaggcatcctggtaccttaagcctttatccagtgacctttgcccatcctagatgttcctaccctactcccattccccaaagtatataagccttgcatcattccaagtaagttaatctgttttccagaagctggtcctggtgggccattattacctgatgttctcacagggcttctgacactcttccccacccaatccagtctctgctccatcttccctcacaaaccaaaaaaacaaaactaccaaacaattcaacaatcctgctgcttggtgttagcatttctaggctccaccccacagttatgcctgactcactataaaaggggctgcttgcccccttctttctatttttgcttgcctttctactctctcccactctgtcccttctcccttcattttcctctccctctccaagtgttcatggctagcctctactcctctcctctctctctccctttctctgtctctactatcttgtcaactcccctccccatgccctaaataaactctattctatactatacttgtatggctgttcctcaggggtaagggatgcctcagtgtgggcccgcagaagcacagccttctccctgcccccctcccccaactccatactgtgcctccacctaacatatccccggctttttcttttatataaaacataacacctgggtaaatgtcaaggaggaattgcacagtcgccaaaatatggaagcaacctagggatccattgataaagaaaatacagtatatttatttacacattaaactataaaaagaacgaaatcttgtcattagttgtaacacagatgaaattggagaatgttgtgtaaaatcagaggtagaaatacaaatgccgtgtagtctctcttatacatgaaaattaagataatttcaaagatgagaacagaatagtgttcacagatctcaggagttaagggtgggagaagtggaggaggttaatgggtatggcggtgcagatagatgagaggaactgaaaataaaataaaataaaataggaagggaatgactgctcctgggcatggtagaggaggtttatacaagggagacatagccagagacaggggcatctggacgagtccagagtgaatacgaacctgagcaggggccatgtgaggaaagtggaggaggcaaggagagccaggagaccaggagatcaagaggccaggagggtaaagggcagaccaaaagggccaggtaaccaaaatggctggattatatagggaagggtgcatgagggaatggctgcccagcccctgggctggagaagtttggagtaggggctgatgagaagaatcctgcaactaactggtagagactgaagaatgctgggagaacgtggcagccagttctgctttgatatgttaaataggcacacaggagacttagaggaaggaactgctatactaagaggccaaaagtctagtctcttccaactgctgtctttcaggatcagtaagctacttgaagagatgtctggcagtagccacaaagcattctgagattgcacaccaacgctccctaagtaggattctgggcctcagctttttacagattttggggtctccatctgtgaacaccacttctttttttttttcttgttcacagcaagtatgtgtaggagttcgctttctctgcttccagacgccgagagtccgtagtgtcttttctgccttgcagcagcaaacccacagcccgaaattaaaagaacaaaaaagaacactaaagctctatcttaggaatctggcgggcaggtaggaattctcacttaggtgaaagaaaagctcagtccttcccagccaatcatgtgagaggaaacgttgacacgcctctttctaccttccaatcatcatctacctcagtaagcccgacccactgccggtaaaccgacttttaaattgcattagcatgctttctcctgaccctctccagtcattccaggccgttccatgactgtgctccaaggaagaattatagacttaacaatgacaaatgacaaagctagtcagtctgaaggtgagaagtgaaagtgtaaaactcgagaaccaaacccgcgagttctacggaggaaaaaaaaaaaaggcgggttcgggcaggaggactacaagccccagatacccgtgcgcggaggcggcgcgtgccagcgagagtgggcaggccattgaaaggcggaagaccgagggttacaggacttcctgttcgagcgccagcgagtgggtgggacctgcgcaggttgggcggcggttgtggcgttttggagctttgtcagcggagggggcgtggcccgcgctgtgacttgtggagcgcgagccgagagggacgtgggtgacgcgtctccttccacccagctcagtggagtgcgaggtgcgctggcccggccggggattggctgctgagaggcgagtacgcggcggccgttggtcgccggcagcacggagcgagggcccgggcgggcggggcggggatggggaggcagtggcggcgaaggccggaggaggcgggcgcgggcgagcgggcagacagagcggcggcggcggcagtctcccgagcgctcctgtgaagcgtccctattcccgttgccgtgggcctctcggggaggccatccgggacgcgagccgctgcggaaccgctccccaagccccactgctcttcggactctcggtcccatcctcgcgtttctgctccggctcctccatcttggcctcgacagtggctgctgtggggaggatgtgccgcctcctggcagggggaagaaggaggagaagatgaagaagtaccggcgggccttggccctggtctcctgcctctctctctgctctctagtctggtgagtaaggggccggcctctggggacttcccgtggggatgaaagagggagtaggtcgggtcacacccccaaatcatctcggctttttgggttgcttggtgctcctgctcctaagccagggacacagcggccacccagctcttcctcttgtggtttacgagttgtgttttggaatttgcagagttccagcagggagagaaggggatattggggatcactttttgcctttgtactcgggtaccccatcaccgcagttagggcagtttgggtagtgttcagaaagctagtgagtgagttactcagttttgctgtcagttcatttgctttcgttatgaggtaagggcaggggcgagtcaggtgtgatgtgttccggacctgtgattttgaaaacgtgagtcgtcatgagggtaagagtaatgtctaaactgttgttcttctggtcaggtcttgcacaatcttgaccaatagtacttttggggctgctccttgaaaccctgcggcgtggggcgggcgggatccctgatgaagccctttttcggttagcctggtgggagaggattatcacagatgtggagtcagccatagttttggggcatgttctttggcactagaaaggaaacggtttttgcgacccgctctgtccctttctctgaagttctatggagttcaagttaatttcaagcacatctctggatgtccaggagcagacatagcttatgaaccaaaggattgctaaaggtgtacttggaaaagccattctttctgaaggaattcccaaagagccttgagacttggtgactgaaagtgatggcctttgtgttaaagagattttgcttcttatactaaaatctaaacacactttcttatttaccttatgtcttcaaagcgccagtaataattcccttttttttatgggtgtaatggaatccagaggtgctcaagttgtagagttgttgctcacatagaataatatattaatatgggctcaagaaaacacttgtctgagaaaatctgactggaaagactgtatttcttgtcattctgaatcctttaaatactccttaagagaaactggtacctgaaaccagtgtaggattaggtagcaatttcttagagttggtgagcttctcttactagccttttctcccctcattcagaaattatctccagattttgttacccacttctcttttgtagattgagtattctatgttcatataataatcagttctagggtctacccaggacttactctattactattactgcagtttagtttgatcttatactgtcatagttgatagattgtgtgtgatacagccttctgccttttctcttttcctgcctagagtgctatagatttaccttaacagaaaaccaaaatgcatcctatctattcattctggttgctatttttttcttttgcacactgctaatcacaattcttggttaagtagtacagtgtattctaggtgtaattgtagtgtagctacagaagaacagtgatagctaatatttattgttatctgtaccaagcatgtggcatgtgtacgttttagcatctttgtcagcaaggtcctcttaggtagatattattagttgaattctgtattttacagatgaataaatagagaggctaaagttatgcttgcaacagagtaacatggctaagcagctactgcattctaaaatttagatttgaacctaagcagcttgtaatacaggctcctcactacagtggtcctctgactgactataggttaaataaggcctgtgtttttagacagatacagtaccatcacttactagatatgtgtacttggacatgctatataattcctttgaactttagtttttagagcctcagtatgataaaattgatccattcataccaaagttattagaagcaaatgagataacacatgcactttgtaaaacagtaagagcatgctgtctttcattataaaagcattcaaaggtgtttttcttatgtttactgtgtattgaatattgtgaatcttgaaagcttgagtgagtggcctctctcgtttttagtactgaaactatctcaactaagaagcctccttgtaagctcctactgctgctataacaaattaccagaaatccactggcgtacacatagttgttttatagttgtagggtgtgtgtacaggagtccaaaatcagtctcactggggcaagtattaaggtggcatggctgcttcattctggagaccctgagggggagactccagttctttgactttttcagcttctaggtgttgcatagattctctctcctgtctctcatcacttcaacctctcattttggccttcaacatctgcttatgacggcccttgtcttcctccttcaaggacttattatattgtgtttacccttagtcaatatccatgtctcttagtttgctgaagtcttcaaagttttatgatataatatacactattcagaagctgaaggtgcagaactctctcagtcattgacagaggggagttgatcatcacactgaagtggacgatgtgatccaaacctttgaacagttattctgagtatgttccctagtagtaaaacttggtgcatgtgcctttaaaatgtgtctaattatttgtaatttatctacatgtatcaatatggcatcagtattgtacatataattaccaaagttagttgtttaagaaagataaaaaatactttgttaatattaccatttgttttcattaaagtaattttcagtgagaactgtttaatttaagagattattttatatcaaatgtagataaatggtttataatggttactcttcttagccttactattttgttactggtttatgcttgtactattatctttgttagcttttctgtttgtttgtttgttttaaaatacatgtagtaagttgtttagttaaagcagagcaatccctccatcttagatggacatgtatagaaacccagtgagtcatggtatgccggaggtaaaccagagctttactcttcctttacatatctgcctttagttcttaatatgtctgcagctaacccctaagaaccagaactctttacattaatctaaaaaaggctaatttttaaaaatagtaacagatttttttctgtgactcaaaggatgagcttagaggagctaatatttagactaaaaccttgacgttaaaaaactttgatatatttaacatacaataaaggtacttaaaaggacatgaggtgaatctaatgaagggtttgtattttagagtctttcctgtcctccattcatcaatcatatgcctttgggttgttatttctgtgaacattagttctcatctattaatggtttctagggtgaatagaatagtcaaggtgggagacttgtgttacaagcagagggaacattcttgtggggttttctggagtgtttagtaagggtggagaagacttgaaaaggatagagttttgaagaaaattattgcccaggcgaactctgagtttagcaggatagaagatgagcgagtgaaataggttaaataagaaggaaagaggcagccatattgatattttaattagattactatcaaagatagaatggactgcctgacagattctggaggtggtaggtcatggtcataagtggagggaggtgcagtaggggagcactgggagctgtgtaaatcaagatggtgatgttttttgaccttagtctagtttttatagatggaagagatttttccctccttgagttgtgatttctgtattctttgttttttcctctgataatttttccagcttctttttaaaaattttatctacctacctatctatctatctatctatctatctacctacctacctacctacctacctatctaatataagtacatcgtagctgtcatcagaaataacggaagaaggcatcagatcccattacagatggttgtgagccaccacatggttgctgggaattgaacgcaggacctctggaagaaaaaagtcagtgcttttaactgctgagccatctctctagcccctagcttcttttgttaattaatatatgagcagaaaaacaagaagcaaactatataagaaactgctttctttttatatggaattgtcgaaaattcctattctgtcttttacctggaaaatgtttgtgtgtgtgtgtgtttactgcttctgtagagactttttaaaaagtctctgagtctattttctgaataaaatgatattcaaaataaataatgaaataatcatgctctccacatcatttgatgacttttgttgttgttggaacttaatatgaagagactggaaagaattcagatttgctgagatatttattcaaaggatagcatctggtgcctggaaggagtatagatagggtcattatgaatagtgccagatcccttcacataagttgggtgaactaggctgctttagtgtgaagagatccttgaaagaaggtgccttctctttatgaaaatctgtgatgtctgtctatacaccaagaggcagatgattctttataatagtctttgaattattttaggaactggagatgtggctcatgttgccttttaatgtttaatacatttgaagatgttttagaatgcaagtaaaaatagacttagcagacaataaaaaaaagaatcagatattaacagttagctctctttgagcactattatctcataattttgttgtttgtgactagtacatttccacttctctcaatctgagcagagaaataaatatgtatagttaactttacacttctaatgaaaagaaactttaaaaagtatttaattgctttttttgtctctcaggtcattttcagctatgaacattttatacacacacacacacacacacacacacacacatacatacacatacatccatatatacacacacaaacacatatacatacatacacacacatatgctatatacacccctgtttaatagtttgtgtatatatgtgaataaataaaacaccctacttgagccaggcatggtggcgaatgcctttaatcccagcactcaggaggcagaggcaggcggatttctgagttcgaggccagcctggtctacaaagtgagttccaggacagccagggctacacagagaaaccctgtcttgaaaaaccaaaccaaaccaaaccaaacaaacagacaaaaacaccctaattgaaataatgatttatggatttcagatttttctttagtgccagctataaaacacattttttacttgcattccctgttttgtttttcaagaccatataaagtattttcacaaggtataatttcatatgtcacaagggaatgggaaattgcttttgagtatttggatatcccttgggatatacttattttataaattgagtgcttttgaattttttttaagatttgtttgcttttgaaggacttgttttccttccttttttgaatattggatatagaacctagggcttcccaaatgctagacaagtattctactatgagctacactctaaattcagaacatttcttgttttgagactgggtttctctgtgtagccctggatgtcctagcactctgtagaccaggctgctctagagctcacagaggtgcacctgcttctgcttcctgagtgctgggattaaaggcttgtgtcaccaccacccagcttcaaaactttatttttataatgaagtattagttaagtgatttttgtactttatataaatgtatttaatgtatataaatatattcagtcttttatagtgttgatatagttcttaggtactaagctcataatgtatttaagtactattttatatatatgttttgattcattcactctgggtactttaacagcttatagagtaaaataggaaaggttataagggtttataataatatatcatttatttttataaatttatttctaatattatttggttgcccccaatgtatttggtacagagaaggaaacagtaagtgtggaacttgagccttgtgtacaagttccttgtccataatacagatggatatctttattagaaaggacccaatagtcactttatgatcattgtaactcttctgaaaaatacgccccttttaatatatagactcctgtgggactccttcatgtaaagacaaagaaggaagacacatagacactaagcatctttgccaagtttttcacaggaaggatccagaacttaggtagttttttgagcttgtgttctcttaatcactgtgtgttctgcctgtacgccagttgatgtacttgggtagatttcttatttgaaaatggtggggcctgaatgagccaaggaaggatttgacagcaggagttaacaacatgaagctctttttaaaaggacacttttcgaagattcctatctcaaagaaactatatttatggatatttttggtttttgtattcaatttagtgttactggattagatgaagtcaactatttttatacagccaacattctagaaatatgattagaatgctaatgaatcattcagaaaactgagtatcatactacttattaatgaaaaaattggcctggagttgctaggaaggtttgaagtgtaatgtgccagctataaactctccagtgggaacaggtgttgcatgagctgaaataagatgcactgttgctgctaatatgaatgatggctatatccgtatatatgtgtctcactgcctgcagtgagcagattgcacttaattatcaagaggaaagagtatgagaaattaataatgaatggatagaagtgataataagtagttaaacttaagaaaaagttgcagataggagattatggtgaattttataagtgaagtcagagagctagatgataaatatccagcaagggaaattgttttgagaaggttatgttgacatcattgtactagatgtatttctgagaagagagagagatttacagagacaaatacttggaaacagtcagagtaattgagtttgccacaataagaatgtggttttagaaatggagaaagtaagagcattaagcacaaatcttacggaagtaaatgctctggttttataataggttgtgaagttggcctgtagtgcagctgtagtgcaaaggtacagcattgagctagaactcaaaagagctgtttagtttgtctccgacctgctcttgtcagcattgctttctcttactcttcttatgtcaacacatctagcaaggctcttgtgctgtgtggtgcattttttgtagaattctgccaaacaaggaaaggtagatactttcttagaacatatgcagatgagaccatacatccttgtatattaaattaagaatttgggaaattggttcaaagagagagaaaactgtgttcttatcttgtattaatagtgtacaaaaaatgcaagagttataaaaaattgaaaaatgaatgatcttctagttggagggggatggaatatgtaagcccagaattgtatagattgtatacaacttaaaaatgtgggcttgggagataaaaagactggaattttctccacagagggaataatttttgaaggggaatgtttgacttttgaaacagagcactgagtttctgaagataataggaatcaagatgacaaagaaaggaagctttgaaggcctggtatgctactgcattcctgtaatcccagcctttggcaggaggagggagaagcaggaattcaaggccagcctttgctacatagagtgcagcttagctacatgagacccagtaaaaggatagaaaggaggaaactggaaataaagatggaaagctgtttaagattactttgtcaacagtgtagagtctgatagggttgaagcatttgaaaacagaaatactgttttttagagggaagtgttgataagtcattgtaattgaaatagaagtttaggaggtggcaggcatgcattcttgcatggttggttggcatcctggaagaaaaagaatacttataataagaaagttaatggctacagtagccttatactttttaatttttaaaaagatttattctcttaaaatctatatgtctgcatgcccccgtgtggatatgtgtatccaaatgcaggtgcttatgcaggccagaagagaactttggagcccctggatttagaggctgtctgttgtaagctacctcactcaaatgctgggaactgaactctaggacccttgaaaagtagtgtatactcttaaccagtgagccatctctccagccctctacttttgatttttgtcagtcccttaatgaaattcttctaaataaccctgcttgcctaaggataaacatttgaaggctcagtccctaacctacttttgagggatagcttttcattgttcaatatgtggatttctgtttacccagattatatggttagcctacactaatttatttgggaactttatttgtattttgaactgaaaattgctatagaaaaagcaccatgattttattttttttttaggataaatacatcttacacaatttttaaaaatatgccattttaagtatgattagtatataattatttccatcagctttaaaaacagattttattggcaaaattagtaatggtagattaagatacaaaatattacctatgttgctcagtgcttcttcatgatggatcattgaaattattgaccagtttttagtgatcagtcattgaatataatttgatatatggagtatggtggctgagaatatctaagacccagcctatataagtgactagtaatgatctgaactactaaatttaaaggtttggttatcagcaatcaatagggctttctcagtgagaatgaaagaaaggacacattgtgctcttacctagtaagagaccaagcagagcaaagcagcttttaagagctccaattgtaaggttaaaggttgtctttgtttctagctgtggtgtttgaccctcctatctcagtattgctgtaattgtagcttcatataggtttaattggtcccatatacattagaaccatctttactatctctagcctacttttcctccctcccttccttccttccttcttccctccctaacttcctaaattccttcctccctgcatttatctatttatttatttattttcatttttctggatgggtttttctatgtagccttggctgtcctggaacttactatgtagaccaggctggccttaaactcacagagatctgcctgtctctgagttctaggatcaaaggcctgtaccaccactgttcagctctgcttttattttttaaaaaaccaaaaggtggttttcaggtcttccttacacatcagtattttgaaatgtgttaaaatgactttttttttcaagcaaagcaattggctaatattggaagtctcaaatagtttgatttgatagttttcatgttaagtttggatcttttattcattgtaaataaggagttatataacattttataaccagaaatgtaattgttggttttgttttgttttttgagacatggtttctctgtgcagcaaagtcctggctatcctggactcgctttatagatcaggctggcctctaacttacaaagatctgcctgtctcctaagttctgggattaaaaaggcatgtgccatcatgcctggtttaggaatgcaatttttatatctaatttataatagttaatatctttgtattttacacttacgtaagtcatctttactatagataaactcattatttgtaacataattttactgttttacttttccactttgatttttttaattgaaaatagtttttttcacataaaatttctaattatggtttccccttcctcttctccttcccaattccccactcaccttaatccacccctttttctcatttctcattagaatacaatcattcttctaaaaaacaataaagataaaataaaaaacaagcaaaccagaatatgatgaagcaaacaaattaacagaagagtcaaagagaaagcacaagatgcacatacagagacacacatgttcacagacacacacacacacaaagagtgtgagagagaaatcccagaaaagcgtaacaccagaaactgtaatatatatgcagcagacctgtaaggaaataatagtgcccaggcaaagcattatgagacaaagaacctccaaaaatgccattgagttaattttgtgttgattatctactgctgggcatagagtctgtctttaaaagtagtttgtacaactattgagactccattggggaaaacaaagtttccctttacgagcagttatcaaacagaggtactctctagatttggaatggggacttgtgttcacttttctcagtgctgggacccctatcttggcttagatccgtgtaggcccagtatatgctaccactgtctgttgtgttcacatgtgcttcagttgcactggtgtttagaaggccttgtttccttagtattcttcatccctcctctgtttctcagaatcttccaactcctcttccaatagtgttccctgagctctgaagggatggatttgacggagatatctcatttaagactgagtagtccatgatctccttctctgcacattttcctgttgtgggaatccttttttgtctttaatcatcatagcatgtgatactacttaacactagactagtgatgcatgggttatttttttttaattaggtatttatttcatttccatttccaatgctatcccaaaagtcccccacacgctcccccacccactcctccacccacccactcccacttcttggccctggtgttcccctgtactgaggcatatatacatgggttatttttaaagtgacatattgacttttaaactgagtggcacatgtctataatcccagcactgagaaagcagaggcagatggatcactgtgagtttgaggccagcctggtatacaaagtgagtttcagctaaggctacactgagagaaatcctgtctcaaaacaacaacaacaaaaacaacaacaacgagttttaggattatatagcatatgttccacatattgtgtgtatgtgtgtgtgtgtgtgttttattcattagaaggatctttatagctatgtaatttatccagatatcttttagtaggtgtgataatgattttctaggttaccataaaatagatttatcgatagcctgcttttttttattggatattttcttcatttatatttcaaatgctatcccaaaagtcccctataccctcccctgccctgctcccttatccacccactcccacttcttggccctggcattcccctgtactggggcatataaattttacaagaccaaggggcctttcttcccaatgatggctgactaggccatcttctggtacatatgcagctagagacacgagctttgggggtactgattagttcatattgttgttccacctatagggttgcagaccccttcagctccttgggtaatttctctagcttctccattgggggccctgtgttccatcctatagatgactgtgagcatccatttctgtatttgccaggcactggatagcctgctttctaagactgttaatttagaataaaagacacttgagaaatactaggctacaaacttgtggagatttctgttttgttatattatgaggaactactgaggtaattttgacattaaaatagctcacagatatttgtatatttatttttgttgcttgttgttttgagccaaacaatcataaggaattctattcctccctttgttaaacttgcagagaggttttggcctagaagagttacatactggttcagagtactgtcagcctggagtgtttgtgcttgtagagtttgttacttctagctgtcagtgtccttaataaggctagcttacaggttttacttccatgatttgaagtagtctaggcgggttttagaattatctttaaatatttgtaaatggctctggcatctggacactttctcaggaggctaactctgacaactttctgtaccttctgtgataattaccacatactgcttctgttgtttttgttgtaccctccagaagtgtatgtattacttggtgttgatagtaatagaatgattatcaacttcccctcctacgataccaatactctaaagttgtgttcttgagtgttttaggataagaacgggtattttattgcctgaggttgtagcccataaaaggatatttacttaactttccttctcttgttcattgttgctggtggtgggtgtctgcaggcttccgagttggcatgtttgctgtaaagagagttcttcagcttcaacatcatactattctcaagatgataattgtgcaataggaagtgaagacacacagttccagaaaaaggtaccttaaatggaattgacagcttgctttctaagactgtttccatttagaatgaaagtaacctgagaaatgctaggctacagtttctggagatttctgttttaatgttgagggctgcagaggtaattctgatattaagatagctcagaaatactggtatatttttgttgcttatacttcaaatactatgtgttaagtatgatctatattcaataaaaattactcatttattgctgcaaagaaatctgcttttacaaattaaaagttatcagtaatgagtattgcatttttgctgttgggggctttgtagatataattaggtacagcaaatagacataaaacctgatagttttgaaatcatttatagttttgctacttcaaatttgtcttttgtctccaactttctgtattttaatttaaactacagaaataaactttggctgactataaaacaattttctttgcatatacttatcctaagctgagtatggtggcacacgcctttgatcccagcacttgggaggcagaggcaggcggattttcgagttcgaggccagcctggtctacagagtgagttccaggacagccagggctacacagagaaaccctgtctcaaaaaacaaaaacaaaaacaaaacaaaaacaaaacaaaaaagcttcttgtgaatgttcaaatgtttcttgtaggtaaaggtacacttttaactaggaacacaaattaatattttgatttctattacaataaaataaaaatgttctacaagtgattttcttccttctctaagggcatatgcacatggcctttatcatacagatacagcagaatgtatttttccctcatgagatttttttgtgttgttcctcagctctgtgtgcatgtgcatcatgaccaacttttagttacatgtttggaggtttgagatataatatttggactggattatttaatatttgagttgtatagaatttatatctgggatggaagatacaaactttggaaaattaatttctttagaaagaaaacttaaaatgtaatgcttttattcacaatcagaagaatttgtctctaacttcatcttcgaggagatatttacataccaaatgttacaaaaacattttaagtaaacattaagtggggggaattctcagcaaacatttcaatattttgtatgtgctagataagcacaggtttaaaaaaggcgatgtgaactttgtttctatgaaatgtgtattttaggaaacacatttaaagacacaggtatagaaaatattaatgagtgtgtgtcaaaagatagatgaaacaaaaacatatattccaagcaattatggaagtctcccttggtgtctggtatataatacttcatataggatgtgtttattaagttatcagatgagggttttaaagtcatatatttctattttaagtatggtgaaaaggagagggatggaaggagatagaaaataaacatgtaaatgaagttgagaatcaaatgtatataagactggtttatggcaaagaaggagatagttttgctaactgcatttatttatttatttacttacttatttatacaaaataattttaccagtcatttctttgtcaccatgtagaatgaaagagaggaacctagtaatgctgagctatcaggaaaatcaaattcctatttaactatatctccagaaggaaacaaaataaaggatgactacactgtggatgtacaagtaagctatagtctgcctttgcttttaataatataccttatggttttgggttttttgtttttgtttttttctttttgcacagtaatggatacctttgtttagtcaacatgttatatatggttaattttcttcactgtaaagaaccatataatagaatgtaaaattattcacatgttaatagtagtatagattttgtgaagatgtaaaattaaagatttaataataaatacagctattttcttagaggtaaaatttgagtgcaaatatttcttcctaagttctatttttcttggctcattataatatatattttctgacttttagaaactaaatccttttttgatctttattttgcagcagaagtagttgtatgtagcacatagaacattcttgaaaccagtatttaaatttacatagtatatgaagttaaaagaatgcattaaaatggtttctgccattttttcattctaagtattgttttcaaatttatgtacctgaaatatggcagttattaaaatcatgaataaatactataaacctagtagaatgctgatatatttagaaaatgtttaatctatgaggttgaaagaactagggatgtttggtatggagacagaaagattaagaaaaaccaaaacattttacagattaaaaatgttcatcttgggactggagagatggctcagtggttcagatcactgactgctcttccagaggtcctgagttcaattcccagcaaccacatggtggctcacaaccatttgtaatagaacccagtgccctcttctggtgtgtctgaagacagctgcaatgtacttatacacataaaataattctttaaaaaatgttcacctcagaatgaaagagtttcattttattaaattttggaaaatatttgccaaagatttaggtatagactaaaaagctactatctgttgcctttccaattgcacaactatcttaaagctcatgtaattgaagtctagaacagtggttctcagacttgggtgtgattcccccataggggtcacatatcagatatttattatgattcataacagtagtagtaaaataattttatatgaagtagtagtaaaataattttatggttagggggataccaaaacatgaggaactgtattaaagggttgcagcattaggaaggttgagaaccactgctctagtagcttttatctcaaatgttttgaaattttgtggaatctcttattcctgtgttgtttagcatagtagtcattaggtcctttggttattgagcatttgaagtgtggctgattggtaaaatttactgttaagtacaaaatacatgttgaacttgaaggacttaggttttaaaaagaatgcaaaataccactgttttaaaattttaaagcctggcagtttactgttaagtacaaaatacatgttgaacttgaaggacttaggttttaaaaagaatgcaaaataccactgttttaaaattttaaagcctggcagtggtggcgcacacctttagtcccagcacttgggaggcagaggcaggtggatttctgagtttgaggccagcctggtctacaaagtgagttccaggacagccagggctacacagagaaaccctgtctcgggaaaagaaaaagaaaaagaaaaaaaatgaatatatgctgaaataatacagtatttgatgatgtcttttcctgaagattttctatctttaaaaacaagccattgttatttgtaaaacttttactgctactagttctccaaatgaccataatttgatcatactgttgacattgtcttgtgtcttcttctaacccaaactggcttacctacttttcaaggcccatctcatatagtctgtaatagttcatagtttttttctttccttgaccttggtgtgaatttttcttacttgttatcctttgttacacttttaagtgcgttgtgtgctaaatactgggacttaaaatcgagagaacattctccttacttaatacatttatattataattgaaagcaagaggaagatttataataccagttgactgttacggatgctgtgatgagactgaatagagaatagtggaagcagaatgggaaggagcaggcgaattcttttatcactggagctgataaaggttttcagatctaaggggtgaatgacctagaacatttaggattggaagaaaagcaaagtcttatattgtgctgtaatacttgtacatatcttatattgttacttgttgatgcacactttttcataaactctttagggataaaagaactgtatcatatcattttatatatttacatagtcttacttagttactaatagtacagtattaaatagaaatggagttaacttgtaggacctgatacagctgtgtctgctaatgtatgaaaatgtgcaggttctgtattagaatatgaaacaaaattctaagggtagtaatgatggaagaaaggatttgtgtgtgtgtgtaaaagtatttcgtttaagtaatattctttctttagtgctagagaattaaacctatgatagcagtctgtgtatattaagcactttaccattggactaaatactcttagattattaacatcatatagtcatttttcagctttctatgaactttttcccatcagaagtaacttattaatcttaacatttaatataaccttttaaaaaacaggatttggaaacaacgaagttaagcctccctgtggttgaagcactccctacagttgatttgcatgaagagtcttccagtgtagttgtaggcagtgaaaccattgaaaatagttccagttcatctacctcagaaaggactccagtctcagagcttgagtaagtcattatgaaggaggatggagtagggggaggagcaaacacagcaaattaaaaacatttcttaataaaacaccttcgtatactcatatttgatatttgggcagttataatttattgtatcaatgtcttatttgtgtatgttgaatataatcttaatagtgaacttatttattcagctcagtagatgaatagaatagattatagcctagccatgaatttctacgttgcataggttctacttaggagaaattatacatttaaaacaaatgatttgtatagttattcaaaaatcaaatgtcaatttatttccatcaagtgttactagcattccagtaatagtcatgcttttgtgtgactagctacctttttgtaacttaataacatttgaaatatttaagcttatgttatccttagttctctcagttctgtgcttctgagttacttaagttgtaacacagagagcaaagtcaaacaccctctcttaatacccattaagtatttactttattgtgagaattaataatagtaagaaggtaacagagtatttgactcagtaagaataaatgctactttattgccacttttaaaaatctttttactgcaacacagtcaggttttgaatatctgtattcctgcagaatgtaagggactgggctgatggagttttgcacaaagatggtatcatttgagaatgttgctcagttaaggaaaagggaacagaaagcatgttggaaaaagtctagatagtatttcagaaactaattaagatcagaatactatttatcttaacagtatgttcttattctcccattttattaaaaattattgattggaaaaaaattaaattaaattgaaaaaaaatcctgaaaaactgggattaggggctgtcctaaaagctgttacctatacatggaatatgttctactagctgggctgtctggtctggcctcagcaggagaggagaagtatctagctatgcagagacttgaagtgccaagttggaggggttacccaaggggtacccctgctgctcagaggagaagggaattgggaaggaggaagggggaaagattgtgggagggagtggctgagagggggccagtgagtgggatataaagtgaataagtagaattaaaaaaattgattggaaaattataagtaagggaaggaaaatattgaaatattgacacatttttaatagtaaaattgtaaaagtgcagtaaagcgtcactgaagtagctcgaaataattggtagatttttgctaatttcaacagtattgattcaatagctgcagaaatcaaatattaggaagatactcttagaaaaaaagtttttatttttatcaggccaaatattcatttaatattttgttttataaaattctgtagtgttttaggtgaaggaacacccatagatcagtcaacagttgattgttcatggtttaaagtaaatagctcagtctggccttgacctctcagtcctcctgtttggcctcttagatactgggattaaaagcatgtgccattgtgcccaatttaataataattcttgagccgggcagtggtggcgcacgcttttaatcctagcacttgggtggcagaggcaggcagattctgagttccaggccagcctggtctacagagtgagtttcaggacagccagggctacacagagaaaccctgtctcgaaaaacaaaaaacaacaacaacaacaacaacaacaacaacaaaatccttgaaaacattctgtaggtcttcaaacattcttttttcttgggcttaggttatgtttcaccattgttattagaatttaaatgtatattaagtattaaatcactggattatcatcttttctttcctcatttagtgaagtagaaaagtctggtactttatctatagccaagccaggtgaagtggagcagcctgaagctgactgtgatgctggggaggctcctgatgcagatgctccagtggaacaacctgcttttgtcagtccaccagagaggtgggtatcgatagttcttttaactgtggttctttttgcttttttatcatgacagtgtctttttgtgtagaccacccaggctaacgtggaactttatgggtaacccaggctgcctcaatcataggctcctcagccttccaaatgctggaattagaggcctgcactaccacatcggattagtgataagattctgtaataaccacaatgtgattttttttaaagttgtttggtgcaagcttcattccaattttattactggaattttatctctttgtgcttttgtttaggtgttccttgtgtgtggtaatcatattgtatgaaaatttgctatccagctaaaatatgtttaatatatcttttgcttttatatagccttgttggccagcatatagagaatgtgtcatcttcacacggcaaagaaaaagtaacaaaatcagaatttgaatcaaaagtttcagtgagtgagcaagacggtggtgatccgaagtctgcattaaacacttcagatactttaaaaaatgaggttagtgtgtgactttggctgactagtgtatgttatgtaacttactttaatagtgcaatcttgaaaataaaacgctaaacatatttcttataaaattagggactttagtcataaaactgatgtactctgcgtctatgtatagcaggtagtcacttcatgctattctgacttgtgtttatgtataaaggcgttctgggatggattctcctgggttttatatataattacatgactttctgcccaccatcagctctttgggacaatataagtaaaatcctacttaagcagtgttattgatctgtatagatgctacaaccattaaattgaagaatagtatttaattcagtgagaacaaatatatgctgctcagctagaatattttaagggcacatttttggtttctttacttacatgcaaggtacaactgaatgctaaactactatcttgaaactattcttccaataaagatggactttattatagtgaagcagttgtctttattctttgtgaagagcttggtaaaaaaaaagttcccaaggaaccttttatccagcaatttaggatccccctctggtaagaaataactaagtgaaagatgtttttcatcaagttgaaagcaaaataaatagaatgaaagagtaatgtaaaacgccaagcacacctttttattcattccttttagtttgagatgttccgttctttttaatgaattttcacttgaccttcctaacttaaattgcagagctttatatattcataggactagctttgtgtgtttgtggcttcctagaaacacaggaactcagtgttttctagtctggtattataaaagaactcattttaattttcccagtagaaccagatcaagagctgttaaggttcaattgtcagatatcacacccataagtaaaagtaggcaaacattaaagcatgtctcctttggcagccagctgtcttaaatttacttgttctcaactgttaaccaactacagtacccaaggccttcgactgtgagcctgtgataataggtagaagaatgaaattttaattaaaatgtaattacttcctgaacaaattaatatcctaaaaaggttgtcagaaataacacatgagtatccagttcagaataattctgcctagttacgttcatgtaaaccagtttgctttctaatacaattagatctttgcagcatccattatttaaaagatttagttttgttttgtttttgtaatgtacagatagttgaaccatgaaatgactaggcaagtaaattacaactcctcttcagataatgctatcatgcatttggtgattttaataatgttcatttcaggacagtctgtgatgacattccatgccttcatttagttttttttttttatgataatagatattttctttatttacatttcaaatgttatcccctttcctggcttctcttccaaaaaccccctatccccaccccctccccctgttcctcaacccacccacccactcctacttcctggccctggcattcccctaaactggggcatagagccttcacaggaccaagggcctctcctcccattgatgaccaattaggccatcttctgctgcatagctagagccatgagccctactttgtgtactctggttggtggttcattcagctttttatttgtcttgttagtgcttgatatagttattttctttcaatttttcatttgaaggatattcatttttctgattaccctattagaagtagtggtgcactatgcaattatacacatttttgctgacattgcacatggtgaggaattagtaggtatgtacatcttgctaatactttttggttttttgagacagggtttctctgtatagccctggctggcctggaactcactctgtagaccaggctggcctcgaactcctcgaactcctgcctctgcctctcaagtgctgggattaaagatgtgtgccaccactgcccggctttgtatttattgttttatgtaagtacactgtagctgtcttcagacacaccagaagagggcatcagatctcattacggatggttgtgagcaagcatgtggtcgctgggatttgaactcaggaccttcagaagagcagtcagtgctcttaaccgctcagccatctctcctgtcccgctaatactgtattttaagactccttcagcaatctgatagaatccccatgatgcattagatatgtaacactttgcccagactatcacactataaccgccatcaaattggtattatttatgtctctgattttcatagcttcttgtgagcattttatgactgcatcttctttttgttaatttattgcttctactccttttgctgcttattgattttcagttaatttttatacccactcgtttgttcgttgaatgcactcaaggattgtttcccccagctcactgtcttcattttatttttacattttgtataacaagtgcaccccagtttgaaaagtgcagtccagacgtccattttttttcttttgtaaattcttttgcccgcatgtaacacaatttctgtatgcttttaaagcgtaaggtcttggggcttttaaaataacattttaaatatcaactttaaagcttgtatgcataggatacttgttacttattttgtaaaagcaatatgctacacctgaaattactattttaataagtaagtatatttaaggtggttgtactgcaagtgtacacacactttctctctggttgagtagtcagtttaagatacagcattctgtttgttttgtttttaaaataagttatgtttatattactaacataattttatagtgcttaaagttagtttttatgttaccttgaattttaaataaatcactatttcattttaaatagtattcattataaaattaaatttttatttagtgttaaagaagcatgtgtgctcaccttcgttattattattatttttgtgcgggggcatttctttcagagctctgattatacaaaaccaggagaaactgaccctacatctgtcacaagtcccaaagatccagaagatataccaacatttgatgagtggaagaagaaagttatggaagtagaaaaagaaaaaagtaagaaagcagtgggattcttttaattaaaaaaaaattatttggggcagggggtggtttaaatatgtgttttctctttctaattataaaacaacctttctaaaaacttgttcaaagatataccacattgctgctgattacactaccatttactggtggtatacagttttaatattaattaaaatctattgttagaagttatctactgatagtaaaataagaaagagtaaaatatcactcccaatatatggagaaaaaacttggacatggaaaggtcagttagaaagctttaaaccgtctgcataataattctgaaataagaattcttgatgttgggattcaaagaaaaaaagaataaaacataaaaccaacaaggctatattctcatggtaaatctttatgttctgttattagacgtacctcaggaaatgtgaatttttattccagatgttttaaaacattttgaatttctagtttgttagttttgagatagaatctctgtatgtaactttggttggccttaatgtaactgtgactacaaggctggcttcaaactcatgccaatcctctttgtgcggcatctcaaacgctgggattatgagcatgtgccaccatgtctgccttggatttctcatgtattttaaagctgtgtttttaggaattaaaacctgttcctttctggaaagtgcctgttacttttgagatgattgtgttgctggggccaaggatgtattttcgatcataatcatctatgtgtttataataaggtttgtctacaggtcagtcgttgcatccgtcttctaatggaggtccacatgccacaaaaaaggtccagaaaaatagaaataattatgcctctgtggagtgtggtgccaaaattttggcagctaatccggaagccaaggtactttttttttttttttttttttaaagaaaatataagaaactagtgactttattaaaagcagacagtggttgacagtaactgttacaatgtgaattattttttaactttattaattaatatgagattatgcttttaaatattttatagtgtcaaatttttgttacattagttgatcacattacagctttaaaaatcatttaataatctatgcagctttaaaaatagctcctgaaaagttattttcctttataataaagttttaaaaggacaaattgataataaggctaatttaatgctgcagccttaactggtaaattttaactatttagtttattccccccctcccccccccccacacacacacataggctcattttaaaagtcaaagtacaggaattccacaaaattttagaattgaaatatttttaaactgcttctctttattttctttgcctcttgaaatagagcacatctgctattcttatagaaaatatggacctttatatgctgaatccttgcagcactaaaatttggtaagtaaataaaactttacaaagtatattttatatatgaacatctttattggggtaacattaatatatctgtgtaatttaataagcatttatgtttgatcaatattgatattgcccctaaattaagaacaagatgccttttcttttaaggagatagaaatgttaatagtgacaggtctggtcaaaagtactgttggatgggttgtctacaaaaagaatataaaggagaattcttagaagaggttgtttctgggctggatcttaaagggcccatgggaagtagcagatgatggagtcaccgcgttttaataggagcatatctcttctggatgactatgtagcagcagtttagttgtgacaagaaggtgcagttagagtagtgaggtgatgaggctggagcattaatctagctgtctagctacaattagaccatttagtactgcatgtactcagcttgacagtgtgcatgcatctctctctctctctctctctctctctacttccctccctccctccctctctccctctacacacacacacacacacacacacacacacacacacacaaacacacacatttgcatgatgtgcttgtatgtgggagtacatgttttcttgtgcagatgaaggcctgctgtgtcttctttgatcactcttctcctcactttccatgttgaggcaggtctctcacctgagcccagagtttgctgatcccactagtctagttagctggcttgctccaggagttttctgggatcactggcagctgttgccctcactcagcttttacctttgtgctggggatctaaaccattgtcctcaaacttgcctagcaagcactttcttgctgagcattctccagttttacagtttgcaagttttgttttaaagacaggtaggctaacatttataaagacatgacattatctcattagcatttcaagaaagcttatcttcaaagaatggcctctccaagagcattcagttaaagcagagaaatgaggtgggagactattgtcatagcttcagtttgaagtcatagccttgagctaaataatttcagtttgagtatggaggagaggaatctatctgaaagaggtttaaacgggaaaatgacagtgctcagtaattacaaatatagaagagaaagacatctaagaaatactctcttacttcggtttcactgctttataaatcttttatgaatactatagacaggaacaatttatgggggagttaatacacttttattacactgttttgtgttcaaaagttcatgtttaaaagccagttgagggagctggcaagctagctcagaggttaggagtgcttactgtattttcagaaaacccaggtttggtttccacaattcagtcttacagatcttcatatctaatagggcaaatttttgtacattaggacttgtgttttttttttttttttggtacctctgattgattactattatttttagacttttcttatttcattcctgatttcaatatggagattttatttgagattgttttgaatctttaaatgacagatactgagtttcattaccagtaaaacaaggttcatccttattgtttaatgtacttaacctttttccgtggatcctttctgaaatgtgttcctcagcaggttttttattactattgtaagcacctccttcaaactgttatataaagaggtgcatttgacttatacatttatatgtatttatatatatgtaatgcagagagagagacacatctacctccttgtattttttattgataatttagaaaccaaggggcttctctatgtgggaattctatatagtgttcctataaaataatacttcaaaaatttctaattctccttatcacatttcacctttttatcaacatggtgattcatccttgaaaattgtcaaataaaagaatgacatttccaactcgtgtattttaaaggcggtgcttctaactttgcacctttattattattattattacgtttttgacgtcttagtagtgttctgcctgcatttgtgtctttgtaccacatatgtactaggtgtcctaagtgaggccagaagaggcattagatctcctggaactggagttaacctgaaagttatagttgacagttgtggttacaacccattatctaaaaccataaaacataaagtctgtgatagaaagccatattgtagctacagcttaggaggttctattattaaaagaagaaaaaatgtgaaatgctcaattagtacctgttaagtgattgtgtagagacaatgtcttttgcagtttggtgtgaggacagatggaactgtctaatctgagccagagtaagcatttcataaatgttacttggctttcttcttcacctttctctgaagcctgattgtttgtttgtttgtttgttttaccttttcctggaacttagttctgtttttctccaaaattagacagttacttttatgtctttaatttcattcggctctggcagtatcactcaacatgtcaagaaagcacgtatcaagcatgataacctgagttcagactcaagggccaacatagcgagcgaaaggggagacctacctctccttcctgcaagttgcctttgaactgccacacacatatgcacactgaatgaatgaatgagtgaaaattaaattacatttgatgaaaaagttatttaaaacagattggaatgttatccatgagtttcttttttcataaatgtgatgctatatgcagtttttgtaacatactattattatgatacttttttcctgagtggtcatactgtgatgacaccttaccatcagtagggctcgcacataattttcttttccttccttccttccttccttccttccttccttccttccttccttccttccccccctcctcccctcctccctccctccctccctccctccccccccagatcatctatctctctctctctttctttctttctttctttctttctttctttctttctttctttctttctttctttctttctttctttctttctttctttcttgtctttaagtgataggaattgaaccatgagccttaatcttaaacggcattagttgcttcattgtctggaaagacaatttttaatccttttggataaatatttaaattgacctttttgctttttcttagtaacctttgcaaaatgttaatacagggtggtcatttgggacagttgttgccatcagataattttaaagagatattttatagtagctatgtataaagattcttatacacaggatacaggatacttttagtaaaactatttcattaaagaaaagaacatcataggagcaaacatcaatgttctttcttctcactgggaaatgcctgtcccaatcaaggcgttttatcagtggatacattagattgcaaacactattcctgttacattttggtaatttttaaatgcctaatttatacagatgttttaatatgaactgctttggttagcttatgtaaataattgtcttattttctttttgaaggtttgttattgaactctgtgagccaattcaagtgaaacaatttgatattgcaaattatgaattattttcttctactcccaaagactttctggtttctatcagtgacaggtaaattcttaaaactattttctataaagcccatgatagaatttcagagtaaaaattaagctcacatgccaatctgttgtcttctgttgttttagtttttaatagcagtttgtgatgacatttggattatgggcttttgttaatcacttagctcttgtaatacttaaacatcacaagtatgctatgttattcccttataaactgaagacacaggggattagcttgtataagtcacatggtttagtatttgggaggaacaagattccaatctagaattatgtggcttcacagttattttaatcattatgcttgttgctttctgagagttctttgaaatgcattaaaaatatgcacatattatgtaagtgcttcattttatatcacaacgtatgtttttggtgaagtgttttaaaaactttttacttgcatgattatggaagaagtaaatatctaaggaagtcagaaagagaaccaaccatattctgttcttggcaaccctaaatttatcattcttagcattttaataatattcttttcagcttttcctgtttatttttttattctactaaaaatgagtatccttttatttcttatatcctgagaatattttgcctaaagcatagcagttttaattataatttaattttatcccacaatggaggtgtttacttgtatattagtgtgtcctagaggatgctgtgactcccctgtgctgctgtcaattgatggcaattccagtggtctttcagtggtcttcctctccctcagagtcatcttcatatctgtatggcttttgaaaccagttctcaaaatgtattgagaattccatctagtattttgatactaacctttttttccagaatatccccctaatattgtacatgttagatggtaatatctggcactgaaaattaaagtacgcatgttttttaaagagaagggataactcattaatttgggctctttaactattacaaacaataacaggcttagagttgaatcctagattttcttttaaaggacttagctatagaagatgtctatttaaatatggtaatgtgttttctaacctgctttctgctagtgctgtattcatgcctttcctcatcaccttcccctcactgcttgcatgcaacagtctcccggtgtctcatgggtcacttttccccctaaacccttgacactgctttgctcctgcttctctctttccctgtcttctgtttgttaatgtgatttttcaagtaattctttcccagtgaagtggaactcaaggcctgtcttatttaaatgagaagaaaaactacatgataaatttatttttacatttttagatatcccacaaataaatggattaagctgggtactttccatggtagagatgagcggaatgtccaaagttttcccctggatgaacagatgtatgcaaaatacgtgaaggtaatctttatacatataggactatgttctgtaatgaaactattctagttatctaccctgctcacttaggaattagagaaactaagagtcctagcataacactaattaaatattttttactgggctattttattttatagacaacttttattctgacatttttctattcttggtaatctagaccaaactattttaacaagctccaagttacaagtcttgtttttgagttttgctttttttttcttttgaggcagagtctcatgtagcccaccctggcctaactcaccaggtgctggtgcctctgtgtgaagtacagtcatgcagtaccatgctcagcatgccttagacctgtaaattgtcatccacctggtattgtgttctattttgaaactttaaacattgttgctgttgaaatcttttaagtaggtgtgatttttttttttaattttttaaaaatcttattcctagattattgattcatttttattatagctttctgtttttataattaaatgaaacaggcccatttagcagtttcagataaaactttagacactttaaatatttccattgcttactttaccaactgttactcgagttgaatttaaataatctatggaagtttctgtgcctctttcctgaaccttttttctttaatagaaaataatggacacatcttaaagtaccatgctgtcaattataagaccttttgaaattgcagaacttctaatttctgtgctttctttaagttgtaagaacttatacctacttgattttgtcttctgggattttactctctctttttaaagcatgaattaaattgatttctacaaatgggtaaacttgtagtattcctaatttcagtatgaaagtgctggattctatattgaaaatgcagttggcattctcagtgtaaaactgccacgtaaagctcctgctcgcttgctttgtggacagaaaccataaaatgtttattaactgcttttttttttttttgaaaaaccctctttcgtatagacatgtctaaaagccacttacttatagtaatgaatgctatatatgcatacaatttcttacctgggtatctgttcacctaaagtaactaaataccaataatacaaatgactttttaaagcttgcattttataagtaaagcatcttgtatcagttgtatttgaaatactagaataccagaacttatgccttccctgaaacacattggatacaatattttaaaaccaccagaaaaacttaattattttgtttattaatatatacatttatctgtatacacggcagtaatacttaacaaaagacctggtttctaaaaaccatcaattaggaatccttttttatttaacagatggaaaacaactgcatttaaagattattctactttattagcttaaagctaatctattacatgtatttaggttgtgcttttcagttgttatggtaaaaatggaaattagggcttttggacctacaaagaattaggagtgctacaatcttcccacccgcgctgcttccacactgcggactgtgggtgcagatacttgttacctatgcatgtgatccggactttgcaactgattcctttttcttttcctttctcctgcttcagatgttcatcaagtacataaaggttagcaaccttctcttttgcaatattgaataacagaccatggcatattaatgcattacaaagataaaaagcagttccaatgctttataagtattgattttgggggcagtgattgtgtttttagaaacgctgtactgagaagcctgagggtgctcaccttagggtccccgcggcctccggctcacggcttctgtttttcaggtggagctgctatcacattttggatcagagcacttttgtcctttaagcctaataaggtaatacaaaacgaatattttctgctgcttatcttacaagggatatagaaaaccttaatgtttttaaggtgaagagagaattttctcgtatgtgaagttattgttgtggaatgtgttttgaaaaaaatgtcaagatagtctgaaacataaaccttttattttttatgttcttgttagcttactttgttttattgtgttaataatacatagaagcacagattgataggaaatcagacattatatttctaaattctttaagttaattatatttatggaagtagtgaatgaataaatgtaagaaatattattttgaagggcaaaagctagtggcccataaaacattaccctgattgtgacaattttgctcatgcattgtgaagagatgagccttagtaacttgtactgtaatgaactgttgttagggtttttggtactagcatggtggaagaatatgaagaaattgctgactcccagtatcagtcagaacgtcaggaactatttgatgaggactatggtaagtgatgtaaacaggtgactatcaggaatttatttatttaggtactctagtagtaatgggtgaattacagatggtttaacctgttttaaaaatgtattttctagagtgagtgctttgtaacttaaattgtttcccaaacctacctgtgagttctttgtaactggaactcttgtaataccaatgctataaattatgagtatatctcaattctgggcccaaaatctgttcaactcagaagatactgtaacaacagaagaaaatatttgttcaattgatttgccttgagccttggagcaagtacatgaagacctgagtcttttaaaagctcctttaagtcagaagggaggggcaaagttttatgctggtttctttatttgatcaaaatggtataaaccataactttaagaattaaaggtggttttgtgtgtgtgtgtgtgtgtgtgtgtgtgtgtgtgattttcctaccaaaaatacaaagatatttgctaaagtttgggaaaatgtttagtttaataattttggttagcattactatattgtccttgattcacacctgtaaggcttctgaccctctttatgtaaatgtcttctaggcttatagttaatatttactatacagtgttttatatgtcaattacctgacaaaacacaggaacttttaaatactgttattggaaattgtttttattaaaaattgttttcttctcttaaaacagattatcccctggattataatactgtggaggataaatcttcaaaaaatcttcttggttctgctacaagtgagtatttgggggtttcctatttatgccgctaaagtcccagtctcgcttgctctctttctgacaggctatttgttatagtatagtttaggatgcttgtgctcccaatcttgacctgtgttagctttgaaaggtgcttatgtggaagtggactacagttggtaaaaaggagggaaatctaagcatgggatggaatcagatttgtacggtataatctctttcagtaaagataggcctatgaatttcttcaggaaaaatgaaggcagcatcacaagtaaattcgttgtgaatgaaggcttggtaatctgtgtctatgcctagttttctgtttaacggtaaaatatcacatctgtttccagaatgcaccaataacagtatcaatatattacgctgttgaaaatgacaaggtgactaagatacctacttggtggtttagttgttctcccaaactagtgtgaatataggggtagactggctaaagataattctggaaaagtactacccaactggaacattatttttctgttaatacaaaattaactaagagcactttctttgtatttagagattaataactagataactagaggtcatataagtgtgtgaatacaaactgtctctcaccgtggatatgcatgtttagttgagtcactttctttttattgtttcttttctccatctcttttcttctccatggagaagaaggtttcccagggatgagaataagtgtgttaagaatacctgctagaggagaacccgatatataatgctcacttcttattagtttattatacttcatttatagtcactgacttagttttctttcatatgtcaggaaagcactgtagcactcagctacaacccaatcccctgtgctaatttttggctttttaaatatgagcaatgctttcagttaggatctgttgttatttttattgctgatataaaatagtgctgtgggacaagatgagattgtatgttatgtatctgggttttgctattattaagtatgtatttttgtatgttgtataataatcattattcttaatgatattgagctagttctaaggaaacagctttttcttttctttttttatacatggaattagattcagactaaaatatctttaacttctgatggctaccagaaaggaaaggacacaaaagggaggtagtttcttactatagatttagataagaaaaagtcctattaatattctgcattttactttttctttctatgggattacttgttagatgccattaaaacataattacatgccagtgtaggacatttccctacttgcagtctcttttctgaccatatatttttatataatatatacaaaggattactctggtcccaatatttttttgtctctcaccttgagaaatatgtttcttgctaacacttttttcttctatttttcttttatggggtttgatgggcatattgaaagaatttgcatagttaaatgatagggacagggagatgttacttgctctatagtatggaaaatagattttgaaatgacatatacctcgtttttatgatacatttttccatttatttatttacttatttattgatatacctcataaggcttcaaaacaataggtggtgagaaggaagcattactttgctgtcatgacgtttactgatctgatctatatagtcttctgaaaaattaatggttgcttttgaacctgacttagccacattttctaagataggatagctaatagtgtaaggagtgcatacatgtgtagaattagtctaaataaccaatgtttggacatagaatgtccaagtttggcagttcaaaatggtcttgagattgggctcctttggaacccagcattttagttctggaaagcagatctagggcttttcatatgctaggcaagcactctgctactgcactgttctgttcccactgtttagatgtttgaaacatctgtgcaggtcaggtagcttcagacttatcctcttgcctctacttcccaagtgttgtgattagaagtgtgtaccaaaacaaacttttccctttttaaaattgtgtgcatagtctctacaaaacagaattttgtagttttaatcttaataaaaacttcttttccctttttctattgggaatgtatttagtatctcctaattcatattcttggagccagaagtatttgacagtatgtatttcagaatagtgcagatgcataatgaggcaccgtgagaatgagatacaagtttaaacatgaaattctcttgtttcataatgtatatatatagcttgaaggtgtgtttaaattttattttattttttacttattgactttgcatgcttgaagataattatatactgtatttttagtgtgcctgaattttgacttgtgatttatcctatgaagtcatatttacaattttctacttgtggaactgttagtgctcaaaaagtatattttggagcattttggctttcatgtcaggcgttagagttatgtagatttttaaagtagtttttttagagttttatagcttaacctatagttagtattcacaggaagtttatatcaccagatatatatacaccagatatatatacagtacatacatactctgtacctagacatgcttattcctgtgtaatttaactatcactgaaggagatatggctgtcttacaacagcagcatatgtgcagcctgttcagtcttctgactcctgcttagattcttgaactaaaacatgtaaatctcttttgtcaataggaattctctgtcccatttctatttcacttgaattttgtcttgtggatttttcagatggctatctactttgatattcttataagtttgtcttttctcttagttacatgtttaagacaaaatgcagtttttaaatcaacatatttttagaaaaataatatatatgtagtatgtggtcctacaaatagaaagcagaaaagattatccagggggagccaagagcacatagaagaggtggtattttggttggtttatcttggtatattgaaacatggccaaaatctccatctcagcatcctagacaacttgtgttttctgtagccaaagtgccattggtgtactgaaagactcaactataatgtaaagatgtttggtccctaggagtctttcattccagaggaataatgtgagatgagtaactttctccactcagagtaatgagggaatatttaatccagtgtggagctgtgtctgacattactgctttactcattaggactttagttactgtgctgacaagctgacccacgtttagctgtgcatgtacaacagtcagaacagactgccacaaagttgccttgtctcaaaacatcaaaagaaatgttctatgaacataaggaaattgtttcttttcattaaatgaactgagaaaatagaaatctttcaaattttgcctttgttaccaaaccatcacctaaaatgacaacaaacaggtttttaagagaacattgtgtcttcttactgtggagctagtaataaaattaagtttcaaataacacaaaagacaaattctttatacagattaacataggtttcggttaattaaataacaatgacttaaattggaaatccgaagaacaggtttactttgaatacaagagaatataaactatagattaaaatttttgatatttttaaagcaggcatctttgcctgaactttatttgatggtagtgtaagcagaagatcatgtccaatagggcggtattgtttggcattcagagcagacttataaagaagcagtttccattcctgacttggggtttgtgaattgatggccattactgtcattacctcagagaaacacctcagcctgagtaaaaatccagggctgtacttctctgttcatcagattgtcacatctaagggcaagacgtttcaaagtggcagcttttctgttattctgatgtctctaaacgaagtactaaaattatattcagataaaaccacagttacgtgcattccataattactgtacttggagtcctctttaaaccagtgaaatttttccctaccctacacacacatttacagaactgggcctgtgtgaccatgctgagtggcgcagccttctttatgtgccttcccttagagctttgtgtttcacatcttggattttcattgaaagtgtcatgcaaagtctgtgagacacttttatctggagactaagacaggggtaacttgggagccttgcagcacagcctctgcacattcttactgctttgatgcaaatgtgtgataatgaaaattgatatcaaatgacagttcaaggtagactgaggaaattcctctgaaattatgtattagaagaccccctcaactcccatcaccagtttctcatagatttctaccattctgtgattcttatgtattcatagatgtctttatatagaaatggaggcttgtacctttattagctaaatgtctccactaggtgcaaaaaacaaataaaaacaaacaactcacaacaaccaaattgcaagttgttctacctattaaccttagttttgacctttaaaaaatcttacccacaaaaagatattgggggttatataacccacaatatactgcttgcctagttagttttaaacatcatcagggaaatttaattatgcatattaccagtttatttgactgatatagtactataaaattaataatagaatttttctacttttctttggatactaatcttcccattttattttttatctataaccattcatttagaaaattgctttgttgatataagttgattttttttttaaactgtagaacctttttagacgtttgaaataggaattttgatcatctcatgtcctccatattccagtccaggctatagttgaattttgtaatgtgttaacaacagtacttagttataggtaggatgaagttttatttaaaaaaaaaaaaaaaaagaagaagaactattcaaaattccctctgaaccttaaaatttcagcttactttggctaaaatctatatcctgtattagactttgataggaaataaaagatatatagtcaaaagaaaatggctaaaagacctttataggccttttaaaaattatcttaagattgtaatgacactctttaggtatattggtattattttctgattgaattttgttttagatgccattctaaatatggtgaatattgctgctaatattctgggagcaaaaactgaagacttgacagaaggtacctaatcattttgtgggtctttaaaatagttggtacttcatggatcctttaagttagaaaaaggaagtaataaactaacaaagtagaattttcatttagaaatgaagagaccattggaaagaacttagccatcttgtattagcttttgtttattgaattttacacttttgttttaaatgaaagaacttcatttcatacatttcattaattgatccctgcccctctagaagcctcttctgccctggtagaattgtttaacccaggatatcctatgtgctatacaagtgctcttttttattttcaatcaaggtctcatgaagttgctggactggccttgaacttaacagtgctcctatcttagtcttgttagtatctgggtgggagcaggtgctccctccctgcccaactgaattgatatttgattcttcctagccatgacagtaatgattctataccctcatctctttattgagaattcctagtggtactttatattagctttccttttgtgtagcaaatatattaatatattagaccattttattttcttttaagaatggcaaatatcaattagtaaagagtaacaaatgatgccttttagtttttgaagaacactaagctaactgttaacttcaaagttagccattttacttcctcattttccaataactttttggtctagaagcatattaatcatgtaatattatgcaaaatttataatatcaaataaggaataatgttcattctttatagttgtgatcatgtgcagtcatgtctttcaaagaaaacttagatttaaaagaaaaaactcctcattagcaaatgtatttgaccttttccttctgccctgagagactacaactctttatttgttacagtaaaatattttatggtatagtttttaaacattgaactcaatgtgggcatctttcttaaaataggaaataaaagtatatctgagaatgccactgccacaactgaacctaaaatgactgaatcaactcgtgtttcaactcctgttccatcacctgagtaagttatgctacgacagtagatttctgttaaaacagtggagtgtattagaaagagaaagaaaagagcttgtcatctgtatacagtcatcatctgtaagagagcccaagtcacaggacagacattcctacagctactgtggacactttgcagttgcttcttctcttttgtgtatatgcatattaaaaacacactattccagaccacacatttgttgctttagaattatctattactttcactcattgaatcttttctaaagaaaagtacttacttccttactgagggtgattactctaggcttgaggacagatttcaaaggattcttactgagtttaggtttgaaagtattgcatatgtatatatgaagtccctaataagccacagagggtacccaaaatacctaatgcagtagttcttgagttgtatttgtcacacagcaaactaacttgttccctgtctcaaaatgatttgtatagaggttttgtttttgtttttttttttgtttttgtcttggcacatattgagcagtgttttgcatataggtaaaataacataaaatatcttcattttgtgggtattttcttaacaaaggcatttacatcatagatatatgttatctataatagaccataaactcagtgatttggctcatgggttatggttattgtgtaaaatttttaaatcttttttgtctctgaggaactctaataggatatatgaatgtgaactatttcacaatagtaggaaatcagaattgcagtaagtatgctttaaactgtaattcccaactagcatactaattaaaaagtaattttgtgctttcaaaagtagagtgagatatttatattctgaaagagactataaagatacttactgagtgattggatgagaaatatggcatatatgttactgattcttaagaggacttaaaatatgtattagtgatgaagacattcttagtggttctaattatctggatgtgtaatagctatttttgatttcataactaggctgcttcttcagttaacataggtttggttttttttttttttaaagcaagctaagcaagctaattttatttatgcacacagacaaatgtgagtattttgaaagatgacttcattgagacagaatctccctatagagtctagcctggccctaaacttgtgatcctcctgtctttttctcccaagtactggacttacaggcacatgccaccacattggcaaaatcattgaacaatttttactctaagtgtctttgtttactttaagtttttaaaataattatatagcagtcatttggtaaaataacaaaaatgtactccgtattcaaaattaatactcaatttatagaaagctgttactttcttttcctaagtctgttttaactagaatagactagagtatgtacaacagcatataacttcatatttaccagatttttattttctccttcttcagacattgctcctatttactgtcacagtttattcagtaactaatagttgacatgccacgtgaatatgtaagaaagataattaggttctaaatggatctatgtggttatagataagctttttgttaagagaagcatgacttaattgtttttgttttgttttgttttgttgtcagcaaaaatgaaaatctgcttagatactctttgactttgcttttgtcattgtggcagacgtctctacttagaaatattttctggtggtaacttttaagtaggaaattttgcatataaagataattcaattttgatgttcatattacctgagtttttcattcaggtttttctttgtcctttaaggttgtatttagaaattgtctttatctcagacagaaccataggcatcgtaatttgtaacccagtttttactactacaccctatctaggccctatcacacagaccttctgtagatccactgatgagacagacaggtttatgatgcatcagtactttttttaaagtggtcaggcatttgtcttttagtaagagaactagctcagatgatgttaagattgtatttccttaaaagtagatagtctgctgtgtaggaattcctcacaacatatacagaaatagtctttagaactttagctgccttctgcagatgatactaggaatcctgggttctagttctagctcttggttatctttaatttctaatctgaaagacttgtaatgagttagtaaatgttatagaaacaaaggtacaatgtacatataaggaagagaagtgttcggaaatttgatgtaaaatacagtggtttgagctatttggttggttgcttggtaagtggactttgtgctgccatttctggcttaagtactctatataaaatggaaaaatgtctatagggaaaactgatcaaatatatttgtatacagctttgtactcagcatttcttcataatcccaatctttatgttgttcctaatacattttccttaagcttattttaacattagatttctaccttaagtgatatgtaatcgtgtatatgtatttctagatatgtaatcaaggaagtccatacacatgatagagaaccatcaacctcagatcctccaaaagagagtccgattgtacaactggttcaggaggaagaagaggaagcgagtccatctacagtgacccttttgggcagtggtgaacaagaggatgagtcgtcatcctggtttgagtctgagacacacatactttgtagtgagctgacttcaatttgttgtatttctagtttttcggagtacatatataaatggtgctcagttagaattgctctttatcgacaacgcagcaggactgtgagtaaaggaaaagattttgtgccacctcagccatcactactacttcctgtagaatcagtagaggtttcagtaccgcagcctcccagtggcgatgtggatagcgagaacatggaaagagaagctgaaactgttgatctggatgatttaagtagtgtgcaccaggggcatttgataaatcacacagtggacacaattgaacttgaaccaagctaccctcaaactctttctcagtctcttctcttagatgttactccagaaatgaattcactgtctaaagtagaaggatctgagtctgttaaatctgaaggaggatatattccatcacaattgatgacccaagagagttctgttgagtttgatgataaaacagaaaaaaagaccgagagctttagttctgctgagaagctctctgttatttatgaaacaagtaaagttaatgaggtgatggacaatactgtgaaagaagacatactctccacagaagttgtcaccaagttccctgaaacagtagtaccaccacctatgaacacagccactgtgccagagggtgaaagtgtggaaaccaaacctagtatagctgatacactaaagcatacagtgactccagttatggatccttcattgcctgaagtgaaagaggatgaacagtctccagaggatgcccttttaagagggttacagaggacagctacagatttctatgctgaattacaaaattctactgatctgggatatggtaatggaaatcttgtgcatggatcaaatcagaaggagtcagtatttatgaggcttaataatcgtattaaagccttagaagttaacatgtctctcagtggtcgctatctggaggagcttagtcaaaggtaagtacaacgcattttacaccataagtttagtagctgaatatgatctacaaagacattgtgatgatgtaagaagcacaattttcactggaaaaagggaaagccatttaaatgatgttcaaagcttcccagaattgttatctttgttatcttttccgtttttataaatatttatagtgacatgcaattattattgggctaataaattttctgtgtcttattttctcctttataattgttgtgttcttaccatgttgctgagattagtcatgagctcttgtgcttaatgtgacctccttgtcagcagcttaactggtagtgtagttctgtgctagcgtgcccaacttcatttccaggatccttgatgtccaggatctctctatttggttataccttttatgtgtgttactggattgcacagtcctgaatcggtcatttaagaaaaagcaggattgttcagtctcaaaatcagaatgattttccagtacataatgaacgagaaagtggattgaaagcaactcttactttgtaggtaccgcaaacaaatggaagaaatgcagaaggctttcaataagacaatagttaagcttcagaatacttcacggatagcagaagagcaggttggtttcttccttattgtatatgtacttttcaccctgcaacatgatactcatttctgtggagtattgtaattaatgtgcatctatagtgtgtaataggtagtaagtcatttcagccattgttagtattctctgatttcaagtagatcataatttttttagatgataataaaaatcaattttatcttacttttcttatttctgatttttgttaatcaatgaagactacaacaaaattcttttttaatgacacttagtacttagataatgtagttttaaggatattttacattttttagacagtactgtagctgaaatgtagcttctccaatgtcatgtatgctcatttcatacatttaatatagactggtggtttgcttcatgtgaatatttaatatttactttatggtaactatataaatatttttatgtgtgagtacacatgtattttgtggaatacaattatttcttctctctttagttactcacaaaagtatgtctgcagttgctcttttctatgtaattattggtaattttctctagttttctcatcggatttctagagagctagcccatacatttcctagtgtcttgacaacataactaacttctcatttccctggtgtcacttctgtggccagcctgtatcttcctactccaacataattaatgcctctgtcagcctgatcatccttctgtttggacacttttttgtataaaatttgatgttactggaattttttaaaacatactttatttattacatttcaacctttgctctcctcttccagttcccccctcccacagttcctcatccaactcctcctccttgcctccaagagggtaccctctaccatgcctcctctccctctcctctctcccttcttccctctttccctccctctccctctcctacttttccctcctcctttccctccctctccctcccccaatcctccctccttccccccctcctagattaggtgcatcttcttccactgaagccagaccaggcagtcctctgctatgtatgtgcctgggaccttggaccatcctgtataagctgcctggttggtggctcagtctctggtagctccctggggtctgggttagttgagattgctggtcttcctgtgagactggcctcttcttcagcttcttaaatccgttcccttattcaaccatagtggtccccaacttcagttcaatggttggatgtaagtatgtgcatctgtctcagtcagctgtttgctggtagagtctctcagaggtcagccatgctaggctctaagtctcttctccatttttgtccctgcagttcttttagacagaaacagttctaggtcagaaattttgacttagttaacccatccctccactttaggccctgtctatctgctggaggtggactcttcgatttccattgttggccatttttgctaaggtcacccccattgagttctgagagtctctcacctcccggtctctggtactttctagatggttcccccatctcccaccccctaggctgcatattttcattcattctcctgtccctctgagcttcccttctgtcctgccccccatacctattctgcttttcccttccctctccccctcttccatccaggtagaatggatccctccctttgcctcctgtgattattttcttgctcctcctagtggggttgaaacttcctctcttgggcctttctgcttgttacacttcttctggtctgtgggttttatcctaggtattctgtactttttggctaatatccacttatcagtgagtatataccatacatgtcctctgggatctgggttaattcactcaggatgatattttctagttccatctatttgtctgcaaaatgcatgatgtccttgttctgtatccatgcttcagttgagggacatctgggttatttccagcttctggttattatgaataaggctgctgtgagcatagtggaacatgtgtccttgtagtgtggtggatcatcttttgggtatatgcccaagagtggtatagctgggtcttcaagtagaacaatattttttgagcaactgccagattgatttccagagtgattgtaccagtttgcagtcctaccagcaatggaggagttttaaccgtactagagaagaaatagaaaatgttcttgcactctattgtggtgccctttattgaacttcttttcatcttttcaccttgccgtccttcttcatagattgacataatagttttctgcaaatgggtgagaatatatggtccatgtctttctgtgtgtggttcatttcacttgaagtaatagccttgatattaatccacattgctacaaaagcaataatattttattcatttttttatggcaaaatagtatccattgtgtaaatgtaccactgtttttggttcttgtccattccttcactgaaaggtataggaattgatgacataatttatctattgtgaataattccgccataaatattggacattgttttatctcctttgattatttacccagcagtgaaattgctgggtgataagcaaagttggttgtaacgtttagagtaatttaatactgttctgcgtgatggctcatctgctttacatgttactctggagttaaatagttactgattttgtaaaatgtaagttgcaaaagtaatgcttattcacacttttctgcaatagctaatgatggagcttggatatgatctcatgctttggaagttagctattggtgtcatatctagaaaaatatttaacattgcattgtgtgtagacaacctttctacaactcagtaaaactgcaggatgttttgtggtttttctctgaagtactcttgttgattatagaaaagaatggctttatttctttttgatcctcccacccttttctgtttatttattgcttgtccagatgtaggtaatgataatggtatgactagtaataaaagttcactcctctgtcttaataaaaaaaattccagtattacactttaaatatgatttgtgtgctcttacaatcaagaaatattttgagatttaatctgatatcttttattttctctatgctttatatatagtttctgtatcttatgtctcaaagacctatataagtacttttcatgttcttataatcttaacaaaaataaatgtattgattaaaagtatcaaccagtttaagcttgtctttagttgtttataactatcacaggcaaatcagtattgtgtcttggcttttaaaaggagtgatttaataaatcattaacttagtatttttaaatggtaaactgtattagaaagagccaaaggttttcagtaatgaaccccactgttagttttatatgcccttctttcctcacagacagttgaggcttgaagccttttttgagcttagatctagactaataaagggttatgtagtttctgtcaagtcttaagttagagttttcaagttcttagacttcttcctgctttttttttcttccttccttccttagatttattaactcatttgcctaatacccaatgaaagtgactttgttggccttcttttcattggtagtagtgtaacgtcaattagatgacataggtatgacttcctgcattccattgtattttgctatgaaaggaaagattataatttttttatattaaaataccttatatccagaaactaacttcaaaaaaaatttcagcatgtctttctactggctgctttgctttaaaaacacttggtcagagtagcgtgtatgtatctggtgatacactagttcaataccaagttgaaaagcagtttattagtctctattaacatgatactctacatcctgcaggaaatggcagaatagttccttttgaggggaggattgagcacaatcccagattcttatgtattttatttttttaaaaacatttaatcgaagtttgtgtttctcttttaagatcgttgcaaaaatacattttgaaagaacttagtggattttccaaattacatgtttcacttaaatttataatttaataaacagatgaaatataaagaaaaacaatcttttgttataggatcagcggcaaactgaagccatccacttgctccaggcacaactgaccaacatgacacagcttgtttcaaacctatcagcaactgtagcagaattaaagcgggaggtaattgcttagttaccttgtaagacagtcttcctaggaagattgtaggaagggcaagcttgtaactgagcatgatggttcaaagcttaaaccaaacaaaactgatatttaggtagaacttgctttaaacaccaaaatgcattcattattttattgtttgggagctgggttgagagtttggtaaggcatggctgtcatgatttggtcttcctataaggcaggtattacgttaattctgtcaggtcttttgaaaaaagcagtttagtttgatttttattctgaacattgcaaatcattggaaattactaagtaaagaaattatctggatcatttcaataatgtttaccatgttgagaaattccttgtttgctaccttgctgagaattagctgtttaaggacaagagcagaaacaagaaggaaacttcttaggaggaggcagttgcagtaacttgggtgaagttaactaagattttagaagtagaaaatagtaggatgttaattgaattaagtatatatttaaagaggtagaaaataagccttaatgaaataccaggtatgtgaggataagaaatttaggttgaatctgaggggtttgataattgagtagttgagttgtatatgtgttagcatactatctctaagggagagagtgcagatggaaagacagactagatatcaacagaatgttaagtggtgagcttaagtctaaggcataaatgtacttactgtactgcttttatatttcaagaaagagttaaatggggagagaacagaaaaagagcaaatgtctgtagtttgttttcaagcaccatgctctgtatttatgatttcagagcaccttgactgtttaaaaataacttgtttgaattttaggtcccacggtccattctttaaagtagtttataattatgtttatcttttcaggtttcagatcgtcagagttaccttgtcatgtctttggttttatgtgttgtcttgggactgatgctctgtatgcaacgctgtcgaactacttctcaatttgatggagattacatttcaaaacttcccaaaagtaatcagtatccaagccctaaaaggtaaggttaacaatatactccacaattttcttctttttgtttttctcaaagaaatgctgagcagataaagggacatgaaactaaaatactaaaaatatcattgtagcaagatggtaactgtacatggagataatgctattgaataatcgagagaaactaataatatatatattaagcctttgaattattttggttgagaaagatgttaaaatgtggcattcaagggtggaagagaagtaagataagatctttggagaagatttgttttatattagcaataatggttttgctaatttaggcttgttccatatgttatgcaggtctcaaatcctccatttaaataggctacacagtaagttagatcccgtataatcactcatgtgtgtaatgttttcttaatatattaggtgtttctcttcctatgatgacatgaatttgaaaagaagaacatcatttcccctcatcagatccaaatctctgcagtttactggcaaagaaggtagatttttatggatatgatctacatatataaactggcttctggaataagtataatgtacatgctgtgttttcatctgcatccaaacaatgaatcagttatctttgtgtttgtgctagtcaaagccactttatcattttcatgctttaaaactctttgttcctttgaaagcccaaagggtggggagggggtcttagtgttaattagcaatgagtagttttgtttgcacatgctcctgtttagaagtatttctttttagaaagggatgtttgagaaagttcaacagctatggaaaccctgaatgctcaatgtgctctcatagcatcctgtgcttttctgcctcctcttcttgtgcaggtaggacctttttttatctctagtttaggacgttcaaggcactttcatagcccagagtttattttcctattttagttcctttgtaattagtgcttattaagaaacttaaaaatttattcttatagcaatagtaaaataattataatcatttaagggtgctttctaaataatgagctgttttccctttttttttagaattttagttattaagccaagtgtttctgttattatgtccttcaaatagtctttcctgagttttactagtgtaagttttcactccgtgtgcctttattaagcttagagaatttttataaacgcaatatgcctgtgtaacctacatcctaattaaaaagtagaatgcagtctagcacctcaaaaactgctttctttgttctcctctcccagtgtaggcagcattttaacatctaattattgtgagtcatcatgccatttactctaattctagtgcagtattccactgtacaaatgctgcacattaacacatttacctatggactattttcatttaggcttttacatgtctttaagatatgcatgcatctgccaacaggaatggaaatgggcattctgggtcttagcatgtatggcagccttagtgaatactaacacagggtttgctgtggatgaccccgtcagctttgggtgcttcccctagctttgtcaggtgttcacatcctagtaaacatgttagtaattgggtcttgtagtcattcggattggtgtatatgcgtttcttctttgaggtatattcatatagctgtgagatatgttgagattgtttttgtatttataagttctactcttattttaaattaagtgaactaacattatttttcctctaactctttaaaggcaaatagaataggcttttccccccaataatagaattgcttctgttttagacagtgatgtaatcttgacttaaccttgcttttaaagaaagctgaggacagtaggtggggacagtaggtaggaagaaactgacatcagtcctgattctgtccctccctcctctcctctcttctcctccctccctccctccctccttcccgctctctctctctctctctcttttttttccctccctccctccctcccttcctccctccctccctcgtttctttcttccttccctctttctctctttcctttaaaattaaagctcttcttggaacattttttcggtctgccttaaattttcccaccttgttggtattttcagttcttaatttagaaagaaccatgtcagattgttttctttttttaagcaacaacttaaaattttaaaaaaggtagcagttgccttttccccagtgagccatctcattggccttctgtttgtcttttaatcagatttaagtagcatcctcttttttgttgttgttttttttttcgagacagggtttctctgtgtactcttggctgtcctggaactcactttgtagaccaggctggcctcaaactcagaaatctgcctgcctctgtctcccaagtgctgggattaaaggtgtgcgccaccacgcctggctaagtagcatcctcttatatataatggaaaatgggatagataagtcatgtgacagtattgttttactctgaataatctccattgtttccaaattactgtattgctttacaagcctagcaacagtgttccattgttcccatatccacatttatggtagtttctgcttttccttctaatgatagctattctaatgtctgtggattagcctactgtgaaatttgcatttctttaattcattgtgtgtgtgtatgtgtgtgtatacatgtgggtgtatatacatacatatatagatgcacacatgtacatataaataaacatatacacatatgctagtatataaaagtaaaagtaatgcatgagtcacagagcttcctttcttcatgtgcattttcactatccatcttgttttgtttgcactttctgtgttctatctaggcagtctttatgaagtccagagtcctaaaacttagtttttttcttctagttttataagtttagatctgtactatatttggagttaatttttatatatgacataagggtccattatctctgtacaatttattgactagattacctatttttcattgagagtagtctaagcatccttgtaaaagaaaaaaaaaatcacttgaccatatctccacatagtgtaatgccctattgttaaatatgttaaatttgtatgaatttatgatcattatgttttcttggagtattgtagtccaatagtcattatgtaattttgtttaaagtctcctctgtctcaaatgaatgtagctgttctttcttttgcatttaaatgaatttttttaggtgatatatagttgaatttcattacctgattgactggttagactactgattttaaaaattgttttgatgtagttagcttattatcataatattttctatttgttaatttttgtttctgtttttgtcctccatattacttacttttactctgactatagttattttacatgatttttgttagtatatccaacatagttctttatagagttaatctaatgattgcttgtttaccatatacgttctcaagaacctacctccactttcaaacaaagccataccttttcacaagtttggttatagcagcaaaataattaatactacatcctgcctctcattgcatgcaaaattgcaatcatttattctgcttatgcatacacatacatagcttatacacacatacaaaatcatgtggatattaatttgaatatacttatctgttaaccagttaaggataagaaaaaaaattgtttttttttcttattttttctttttgaattattatttttttttttgcaaggcagatctgtggacaacagcactccctcaattttgcttatttatgaaagtctattctcttttgaagaatacataagcaagataagaattatatctggttttttcccctcaaaacctgaactttaagaagaaatttacatcttaatgtttcagatctcactcctggttttttgtttttgttttttcttgtcatattctgctcttagtaagtttatgtttcatcctatcaagatatgccatagttatggaccatggactttcttttaaattagtaaaactacatgtgtatagcgttttctttataagagtagtttaagtctttactgtaagttgtaggaatgaagttttctggtaatgttttgttacaattccaaaaattacccattttcccttaaatgctagtctgtattaacacacacttcgtcggtcatctgagctttgcagggtgagcatttggtgtcgcagcagcctgctgtgctctccttcttcattgtcttgtttgaggctttttgtttggatgaaggggatattcatttccctattgttacacttagttgggagttatgcacagtcattggtctttattggtcacttaaggaaggtacaattacttactaacctaaagaagcttttttgtctctttcagaaccaatacaatgatcttatgaaagcctttgcttatcctgtttaatttatatattttccttattataatcatttttatgttgttttacctcaattgtagtttttctgcttaattctatctcaaggtgttatattttttatttattgtatctttaaatttgtctgcatatgtactgagttctttggtatgtcttaaatcttttttctaagatttttcatttgtcatatttctaaacctctgaattacgggtttttttgttttgttttttttattgttgttgttgttttttttttttttttttgctttgttttgttttgttttttcttgagacaagatctctctgtggtcctggctgtcctggaactcactgtgtcactgtgtagatcaggctggtctcatgactcacagagatccacctgtctttgctgggattagaggtgtgtgctaccataccggttccttgaactactatttttctttttctttaatcctgtgttagatttgttgggctcttagatctctagataggtatcttctttttttttaatacatttaataaaaataatccatagttttacatattttacatctgtagaatatttataagttctcttctatagtatttaatattccccattttttctattatttgcctttggatcatttctttcagcagtggaactgtccattgttcactggaactaaaaacatagcttcttgggcaatattccttgttctaaggcctctgtcttttctgttttgttgccatggttggattggacggttcctttaatgcttccactgaacagtttggtcttggaagctggcatccaggtgttggccctggacagtttctgaagtccttggtcttcaatgcctgtgaggctgtgatcctagtacacgggttaaagaagaacaagccttggatgagatccagcaagtcgtccccagctgcagtgaagatgtgttgtagtgggaccccagggaaactcttaaatgtcacagaatctggaaggctacacatgtcaggccactgttcttcagttggtgtacccaaagtttcaaatattcttgttagctgatcaaggtctgactctccaggcaaaaaaggaacccttagaagcaattctgctaataaacaacaaacagcccacatgtccattcccacatcatacatcctagttccaaacaataactcccttcatggcttctgcatcagctcctgcttcctgccctgcttgaattccagtcctgacttccctggtgatgaacagcaatgtggaagtgtaagccgaataaaccctttcctccccaacttgcttcttggtcatgatgtttgtgcaggaatagaaaccctgactaacacaggggcccaataccatctggtcacaacttgatgtgtgtaagtcctgctggggctcccaaatgatttgaccaggacaaagtctgccagtttcagaactccattcttatctaacaagaagtcctttggtttcagatccctgtgtagaatccaatgctgatgcaaatattctaagccctgaaaagccatcaacatgtaggcttgaatgtgggatggtgtcagcacaagactgttatcctttattataacctctaggtcagtttccataacatccaagacaaggctaatgttagacttatgtccaaatgtgtcaaggagaccaattgtgttcggatgacttagtttctgtaagagctttatctcccttaaggctgttctatttataccacctttagcttctgacctgtgtccaagtttgattttcttaatggtgacgatttggttggtgttcttatctctggccttataggctgtagcaaaatgtccctgtccgaagaagtccagtttttcatagcgtttcgcttgagattttacgtccacagccatgagagtgagaaaccagactctagcatcttagcacctaagctaagtcctccacccctcaggaatttaaagcatctctagataggtatcttttaagtaatggaaaattgtagctgatagtttcccctagatatattacctatcttgattcctccatctcttaaatctcaaatttcataaatgtattaatccatcttcatgtatcctctttatcttgtaaagtttctgtcttcttttaaaatcatgtgtgtgtggctgtgcctttggaagccaactcactcctgagctgtgatctctgagctgcctggcatgggtgctagaactcagccctctgcatgaccaacatatgtcgttaatccaatccgcctttgcttccttaaatatttttcagtatttgtttttccctaagccacagagtctaaagctatatctaatctgttcttaaatttgtccatcgagtcttttgttttacttaccacatttttttgttcctaggagatctttgtgttttttttaaaagtctcgttttatatttcttgaggtatttttctgctttttagtatttaaacacacttaaacatagtgtctttattacccatgtttgagattggaataataatacaagttgtaattgatggggtcatgttattaataagtttctggtatgtatagctttatgataaattagtgtgtgtcagaatacaagttgtttttaacaagttgcattggggtgcagtttagtagctctgtggagagatctgtgcttatcattggagcagaaggtgctctgaatgtgcttttgagtaacagaatttttgaaacttaggggtgaatctatagatgatttcctcatcatgtcggaaagtttttttcaagagcttgtggtcacatgtaccgtgttcaaactctttctatattttagagttaatagtttaaatcagagctataaaagattagagaaaaaggattcctaaatctcactttatgttcttctgacatctatgattccaacacgtcattaatgtgcctgtctgactctatccatcttttgggttacctgtatgctgcgtgtaggtttgtccagtaatgccatttttctcgtcaggtggggaatgaatctggtcccagagaacaacccttactgtatcatttgatacttgttcattcaaaatgtaaaatggaaatagacttatgtaaatgttggttgtcttcagggttgatgaccaattttcaaatatctttgaccaagttcaaattcagagcgcactactctggcttactaattttcagtgtagaaataatagttatcctgatacctttcatccatttcactaataatcactaatgttgttttgggtgtattttgtcatagcataatccacttttcattttataccccttttctttacttatagtagatccgaatgatttgtacatcgtagaacccctcaagttctctccagagaaaaaggtaatactctttttcttttcaagcctattttaagctgtgtggtagtaaatgaattgaaattggcattttattttattttattttattttattttattttttattttagttgatttgggtaattgttgatgtttttgcatttattgtgtcagtgccgaaagggtaacttgtaggagttacttctccaccctgtgagtttagcaccaagtgtcttcctgctaagccatcctgctttttgatttacttattcattcattcattcattcattcattcattcattcatttaaagacaaggtctcacatacactactgtactctgattggtatcaaactctctgaagtcttcctgcctcaaccttccaaaggctaggataataggtgggagacatcatacccaaccagaatgttgggtttctccccaccccttgtttttgtttgttggagataaagtctgacgtatgccaggatgcctcctgagaatggctttgagcctgtgtttgtaccttctgagtgcaggggctaggattgcaggcagacgttccccatgcagttttatgcagcactcagggtcaagcctggggcttcatacctatggtacaagccctttcctaactgatttgcattcccagttcccatatgttcattttcagcggtcatacggtataagtaaatgtttagaggggtcatcaaacctttgtctaagaagtatattcctatatttaaaggtttacaaaataaaactaagaattctttaaagaaatacttatgaggcctgcaaaaccttaaatattatccaaccctttaaagaaaaaaaatgtgcagatacttggatgatagtcattatttactgagctgctcatgcatgccaggcacagttcaagcactgtttatataatcctcttacaacctagcagtggtaataatctctttttaaaaaatgaagactcagacagagtctgtacttagatgtcccagcagatagtaggcactgctgtgtatcttcctaggattcccccccccccctttgcctataaagtctgattttcttttttacctctcaatttacataatatttattttgactagcagtaattgtctgtagtagaatttcagattagtgcaaagtagcattggatttaatcctaacttcagtatttactattttgtaatttaggtagtaagccaaatctctaaagtttgatttttttttttttcatgtaggagccaagggcaaacaaacctctcagggttaacatatatgaaagtaaccagtataacatctgacacatagaggtatttagatattagctgtctctacttaactctatatgcacaagttgctataacttgagttgagtagcatttacaaaggggatgtcagagatactatctattcacagcagaatgtgtgtgtgtgtgtgtgtgtgtgtgtgtgtgtgtgagagagagagagagagagagagagagaatgagagaatacttgttttacttttcataggcaatgctactttcctcttacatctcttatctaataaggaggagtaatttctatgcttttatttctgttatagaagaaacgttgcaagtacaaaactgaaaaaattgagacaataaagcctgcagatccattgcaccctatagcaaatggagatataaaaggaagaaagccctttacgaaccagagagatttttctaacatgggagaagtttatcactcttcttacaagggccctccgtctgagggcagctcggaaacttcatcacagtcagaagagtcctatttttgtggcatttcagcttgtacaagtctgtgcaatggacagacccaaaagacaaaaactgagaagagggctttaaaacgaaggcgatctaaagtccaagaccaaggaaagttaataaaagctcttatacagactaagtcggggtcattgccgagcctgcatgacataatcaaaggaaacaaggagatcaccgtgggagcatttggggttacagcagtctcgggacatatctaaaaggagctgaacatttatactgaaaacttttttgttctttgaagaacagcctgtggtatttgaagggttcagggggagggataaaatattggggaaagtattcagaaattatgggtttttttattttgccttttaaaaaagtagacaggattgtgtcaatcttggctgatgagctacagttttacaaggctgatctcttcctagaaggatggtgataggcattttataaagatgtgttttcacagataattactgggacaaaagtaatttggaagcccagttccttgggtggataggaacgaaagcctaaacctctccttcagcttggttcccgtttcttgcaccttcccatatttatgtgccttttgtctatttataatgccactggaagaggagggagaactttttctgtcatttgatttgttttgtaactttattaggtttttgaagctgcaaacactacaaagctttaaggtggtccatgcctgaagctcagcaatgtgggtcatttgcataaagatcctaaagacttccaacttagaaccgctcagtagtctcactgaaataaacactttctcaagttttctaaaggcctttcagataaaaaggtgatgatttcacccttggtttcatttaatttagttggattgggttttttttccccctgagttattattaactcagtaaaatggtaagatattttcttggaaatgacaggtatttggaataaatttattataaattcacctttaaacacacttaactatttgtgatgatttctctacattgctctcaatgttcacagtaaacactaatcctccaaattttcacatcaccaagaccaggttttccatggtcctgtcactgcctttgtacatagtcacagaaccagccagtgagcacgtcaggcctgattcagtctaattggtaaagtctaatgggattgtgattccttcatgtttgctttcgttggctacaatgtgcagatatgtatgtatgtgatgtcagcatctgtcttcacttgtttttttgttttgttttggttttttccttaagtaattggcagtgtctgagtaaattgatttcttgatgtgtgattgtacagggatgagtgaaagtgatatgtgttttagagagagaattgaccattttgtgttgtaaaattttaagttataatttattgagcacttttgttaataattgtttataaatttgtctaatgccttttttggtattgtttgtaatgtgatttatttaaggcctttttgtttaagttgctgctttaggttaacagtatgttttaggaaatgaatttcccctctcccagtctgcacaattagccattcagagcaatatggcctggtggtacacagcaggcccttgagaagtccagatgtgagccgagctagagtggggagtcactgtgtgctgtgaaaggagggtttttaatatgtaactacagagctgtagtaccattagaaactgtgaatttccaaataaatctgaacacttgtctttattaatcactggctcttctgtcctttaaaagattgcaaaaatttattactaacttttgatcatagatttaagggtgttttggtttttggtttttgttttgttggggttttttttgttttgtttagttttttttttttttacatctttcaggctaaatatgacagcattgctcaaatttcaggcaaccacagtctactctttcacctaagcattatgttcgttaataatcatagtttacctttgcagactctaagcagacagttctgatatttagtaagatgcagatctacctagagaactatagctttagtctgagttttatttctgcagattataactacatgtaagagggaagaaaactaagcggcaaagtctcagacctttaatgagagaagattcttgccaggagcaaatttgtgtttctaaaaggtaacaatcaaactccaagggttgtaaaatcctgaacttctgaattactgctcaggtttttttttagaggatttggatttttagaggatagcacttttggattttagattttggaactaaggatgcctacccagcaaatataattaacagaatccgaaagtcttcaaacacttctcaagtgtttcagataagacatactcaaaccagtatgtaaatctgatttttcaatattccgtggtagccaaccttatattatttgtagtgttaaggtactaaaccagaatgaaataaaacttactcaactcaagcaaatcttcgtgtatctgtggaggtttatatatgcgtatgatttgggaattaaatagtttttacaaagcttgtacacagataggtttcctccctcacgctgctacacacatgcaccctacccccacacctctcactgtccaccatatccacccccagcagcattcattttcaattctgtatttcaagtttccgtgcttaccttgggccttatgttgacagttttagttctggatgcatatccaatttggacacagacggacataaaccatgcttttatttaactgataaaatgagagattcaaacttatggagaagtcaaacattcatgcaccattacctgtattgaccagctgttaactttgtttatttatatatgtttatatagatgtctgcatatacatacatatatacatatatatgtgtgtgtgtgtagtgtatattatgggtatatagaattatgtgtacatataagacatttggtagatgaatatggtaggacatcatgacccttccaccttgaataaattcatgttaattttatagaataaagatatttaccttacatccttacatgactatattagggttctctaacaacttaccaaatgaatctctctttctttctctctgtattttggggatttcttagaatgacttacaggctgaagactagctaatctaacaatggctgcctatgaacagaaggttctagaatctagcaattcctcagtccacaaagctggatatcttagctgctcttcagtaaacactggaatcctgacaaagtagactctattgccagtaaaggagtggacttgctagtgagtcaaaagcaaacaggcaaagagcaaaagcttttttcttccatatcctaagtttccagcagaaggcatggcccaaattagaggtaggtcttcctaggccaaatgatctagtttaaaagagatgtcttccctccttaaagatccagattagaagtgaatcttcccacttcaaattagaaaatccctcacaaatgtgcccctccatttatgggttatatttaatttcagatgtaatcaagttgacatccaagaatagctatcattaagttcaccttgtctactctttttgtcatgattatcaatttccaaataaaagcaatagctatgtcattattacacctaaacatgatagaactaccccacatacagtttcagacattggtatatatttaaccaagtcataattacacctaatgatataactatccttcataaaaccacaacacattataaatttagactaggtggcaatgtcccttgaagaattcttttagtatctcaaacttaaatatgataaccattgatattctcctaattgatgttacatcacatgataaattgaggagagaaaacacaaatatctattacaatgcattcttaacaaaatacaccagaaacactcatcagttttaagccacatgtctacaacggatcaaatggccttagctagtatttataaccacctttctctacaacttgggcttatgcagcctagaccacatttcttaagctttcatggtatccatgattgtactaatacagtagctacagctggacacaaccgggtgtgacaagtgtggtgtggctcaagtatgaataggatctattgggttttgtttggttttaagatttatttgtgtgtgtgtgtgtgtgtgagagagagagagagagagagagagagagagagagagagagagcaaaggccagaagaggcattggattctttggtactggagttacaggcagctatgagccatgcagtgtgtgagctgggaacgaaacctgggtcctgtgacagagctgcacgtgcttaactgctgagccacctctcaagcccatctgacctagaatgtatttctctgtgctcactttcttaatgactgctgtgtaactatggctaactatggctaaaaatgtttgtgatagtctgtagatccaaatgaatatattatatgaacatatatgaatatacatatatatatgatatatatatatatatatcatatatatatggaaattacttttagtcaaattcctaagacttccctttgaacttttaagatgtcaaaatcaatatgtagtgaagtgtttattttgaaatgttggtccttttgtttgtttggtttttttattacgtattttcctcatttacatttccaatgctatcctaaaagtccccccacaccctcccccccccacactcccctacccacccattcccattttttggccctggcgttcccctgtactggggcatataaagtttgcctgaccaatgggcctctctttccattgatggccgactaggccatcttttgatacatatgcagctagagtcaagagctctggcggcgcacgccggtaagatttgctgaaggaggcagaggcaggaggatgtttgtccttttgaaactaagtctcttcttaggaatgctgtaatttgcaattctcacatttttatatattgttggtattatgggtacacggtacttctaatattttctaataactttttgataatatgacaaaagacatgtttttcttaaacattttatcattttaccttactggattccatttattttttttttctcagttgattctttgccaggaatttgacccacatcacatctcatttcatatttcttctacctttatttcgaatttaccaggacttcccaaatagtgctaagtaggaaggatgctagcaggcatcattttcctttatataaactagaaattgtacaatggttataattaataatagtgattagttctagatggatactaagttggctgcagtggctatgatagaatcgtagcacttgataaactgatagagaatttctgtgagtttgaggtgagtggactatatagagaccctatcaaaaagcaaaactataaacatcttcatagtaattatttcgctgaaagttttttcttagtttggaatacatagattttattaaaatattttcagcaacaaatgagtttaatgtgatttgtgttgtgagatgaattatttaacaataggttattcagtattaaatcctccaaattatttggaggaatcaacttagcttttgaatctattattatgtattggctctgtactagttggctagggtaagctatattttttcaaaacaaatcaaatctgaaagttaacatgaaatttactgtcacttacgtaatctctgatagagcctgttggcctttatctgttgtcttagactatttgggacacacagtcccaaatagtcagggggaaaaaatcagagatagcataccttttggaacacctcaaatatggaatgaaatgttatttgttttgtttctttgatgctgaagccagtgacattaccccaggctaagcagacttgggaggtctttctgtgtctctgcctaatatcttttaccataatttttaatagtagggggaaaaggatgaggtttgatttaaacattttgaacaatttaaccttactgaattctattcagtgggaggatcctgaaccatctaaaaaaaagaagataggctgagtgcagacagacatctgttgttctcctcttccgcatggaaacagtgtaaccagctcctttaacctccgcctggctttgacttcccaactatgatggactgtgtgccttgagctgtaagctaaaggtgtaagcttttgtatgttgtttttattgttgatgtgacccaagaggcaacttggggaaagaagaattggttttggctcatagtttcacagaagtttggtagcatagaagggatgtggcagaagcttggttatagagcagctgtgcaccaggaaatggagtgggactggaatctgtcagggtacagccctcaaatccacccctagtggctcattgccattagccagaatccgtgtcacaaaggttctacagcttctgcaaacagtaccaccacatgaggccagggttttaaatacatgagcctgtgagggacattttatacccaaaacacatttatatagacataaaagctatctgtatatatatatgtaactatttctgtattatgtttggtcagaaactacttactcccatagctcaaagtcttcgtgtatctctcgcatttcccaaaaatatctacaaaactataaatatatatgtatagtttttgtttatagtttatatataaactgtatgtgtatatatttatatagtttttctataaactatatatacacatataaactgtatatatgtgtatacgtagttttatatttgtagtttttttacaaactatatatatgtagtttttatatacttagttcttttatgaactatgtttatatacacatataaaaatatatatgtatatatgttttttatatttatagttgatatataaactatgtatatacagtttttatatttgtcattttatagctatttttgggaaatgcatatatatgcacactagtttatgtgtgtgtgtatatatatatatgtatatatatatatataaactatacttgaggtttgagtattaatatccatatatattacatacatacatacatacatacatacatacatacatacatatattcatacatacatatatacatacacacatagtttttacatttgtagttttatagatattttggggaaatgcggaaacagaaaacacttacctccataagtgttaaagaattaaaccctaagtctcataaaaggatactttggagttttctagaagaaatggtaaactgacctctttaagtgatccataggaaagtgtggacctgtaaaaaaggtcttttctgccatttcttgtgaagttagaaatttaagtagcatatttaacaagtggaactagaaatgcactatcagctgatcactagcctcttggtgggactagttctgcttgtatttctgtactatgtatgatcagaactctgttgttatgggtaccataagctataaaagagctcaaccatgtagagcatccagtcctaaataaaaggtaaattctgttttattgtgctactctcttcccttgccaggactgagatgggttagaacctgagttccagagctcacagcatgtcttggccattggttgtcctgtccttttctccctttgttggatgagttgcaaacatctgtagagtggaatgggagggcagggtaaagagaacaaaaaagtttaacctggtgctatagcaagttaggctctgggtctggcatgcattgaaagatgcgcataaaggttttcgtgcataccgttgagttttgagaggaagctcaagctcgattttcctcatctttgtttcgggaagaaactggtaacatatcatattcagcttattcctgtccagcttcaaggatctagctctgctgtattgtctggcttccctgggggaaacagaaccaacagagtgcctatagattaaagtgtgatttattagacggccttaccagatactgtctgggtaaccctgcaatggctcacttaatgctggaaaggccaagaacctgtagttgcatagtccatgaggctggacatgtcagtagtcaaaatatcggcctaaacccttggaggatttctggaaactgaagaaatgcagcagtggcagtaatagcatagatgaacttatcagaatgagagaaggcaggcaggcaaaaagcaagcttccattttgcttctatctgatttgtcactggaaggtgtcattcatatttagggtgggtctttctacttcaaataatctaatcaaggaacgaggaagcacagaatccctggtggccttcctttcagttcattccagatccagtcaacggcctctagcctttccctgttcctttgggcagcgtagttggagagtgccaactcaacccctgccaaaaagctcttatgtggaattgacattttgatactataaggacttagacttaagagtcttcctggagtctctgggactttttaaaaatgtattaatttttttgtatgttggaacttaaaaactatttttactttctaaaattaaaatataacaatatttccccttccctttcctccaaattcagaaaatataccttatgcccctcattccctttcaaatgtatgacatgcttttctttgttgttgttacatatatgtataaatttttaaacataaactattgcatctgtttaatgttgcttgtatgtatgtgatgtaagggcttttggagttggatggtcaattaggggattcatccctgaacacaactaagtctccctctcttggctatcattggctaaggatggtttcctgtgagacttctccctttgatgataacaaccatatagtcaaggtatcatgagtatggctccgctgtcgtttctaagagatctgatctcatccgacttcctggtctgctggctctgaggagcattcggccccctcttctgtggtgctccctgccccctcttctgtggcactccctgagcttgggctccaggatcagttgctctctgtattgggccagtgtggttttctgtaatggtctctgtctgctgcaaagagaaacttctttgatgaggcataagcgctgtgctggtctttgggtatgctttgaaactaagcacttagagtgcagttaggaatcgtgctggtttagaaagtggtggtataaggtttcctctagaatatattcaagagtctggatcagtgggtgaagtatctggacacatttgtcagcaggaaaggcattgatggtgtagctcaccattcctgccgcatgcccttcagggttttcctttcagaaaggctgtgaaaagaacaagaaaaaaaaatcgagataaaaataatattgaaagagctttagaaagtgaaactagaggttcatgacaaaaggacaggccttgtgacaatctccagctgcttcctagaacgtgtactttggtttcttaaacgtttgaccataggcgtctggcatgaccaattacagtttacccagaagctcacgattcatatcaagaggtcactggacacttgttttatgacatttccctgtttatatacagtgttggtcttaaaccttctaccagttacttgttcctgtctttttaacatttcattaagagtttcctacaaagaaatcaattatctctataggttgctttatttggagtaattactgaaagataccctgaactgtatatgatgtcacttcaagtgatatgagttaggagtgagcagatttcaatgatactgtggccagatccttccctcatagcccacagcctggggaaaaaaatcataagaataaggttctaattactagtcaaaggaaagggacccatatcatatctctcatccttgaagatgtgggatactgaaagtcattaatggatggcttagcccagctctaagagccctaaatctataagtactgtataagtactgtatagtgggatgctttctgaaatgaatgcatacagaattggttccagggcccctcacatccttaatactcttatgaaatagcatattgtctgcaggtagcgtatgctttcagtcacctcatacttacagtcacttgtaatatcagtgatgtaaatgctgtgtgaaatgcattgtattgtttggggatagcataaaggaaaactatctgtacattttcagtacaccatgacatttttgttttcaagtatttttgagatggggttagttgactgataagttgttatttctaaatccctatttcttatatatatctttctgtctgtccatcatccatccatccatccatccatctatctatcggcccacctacctacctatctatctctattgatgagttgtcatctacctgttgactctatttaaaatatttatcaacatgtattttattctaattctaggcacatgggttgctcacacatgcacttgccctttaccttgctctagcttgtgaatcaggaggagaagggacaccttctgggtttgtagaagcatttaaaagcaaatcactgtacttctatcttgtcttctctttgcagtgactagcagtgtaaatggtggggcctcagctgttcggggtcccctgatgaagactccataatttacctactgtagacttcgtaggaacaaaaatacacacttactgtggtaagccagtgaggttttgtgattgttcctcacttagcctaatttaagcttattaatacactgtcttgccttgttccaaaacagtttctaagaactattagcacaataggataagagagtgaatcagtgcccaacagggttatgtatacacctctcagcactgagagctggaggccagaggcccaggagtttgatgccaggttggtttacgatagtatccaggccagccttggctatgtagtgagacccagttttataagacaacaataaaaatgaataaggttagtgtataatgacatttgccttagtgagttattggggagaaatacactgtgtgaatggaagccagtatagataataacagcctttggatcttggctcctcagtttgtacaagtgatgctttctactcagacagctctcctctttgtgtaacagggaaagccttcctcagcttaccttcctacaattacagcctggctccctctagtcatgcccacttccaccgtgatttttgtttccttatcacacctaccaccttggaccaaaactctacattttatttccttttatgtctgttccctaacactagatcagaagcttcataaaaggcgtgagcatctttatttattgcttcatctccagcagagagaacactacatgttgtgtctgtccatcagtgttccacacatagttttaaataaattgtgggttaataaattatgatttggtaggggatcttagtacaggataccaatggagtgagtagctacttgcctggaacctgactctgagatatagaaacatgcacaccatatgaagaacctaaccttgctgaatcttctgtttttatcctcccctcccccatgaatcctggatttagataccagtagataaccttcaacaaccacaataataagaatcacataaaagaatggcaattgtggagcattgtgacttattggccatggcttcaaggctctttccactcatgatctaatatgaattttaataatccctgtagtcagtgctattatgattggtccttatctgtatggaaaatgtgcacagagg

SEQ ID NO: 618 - DNA, 5128 bp, Mus musculus
cggcggcggcggcagtctcccgagcgctcctgtgaagcgtccctattcccgttgccgtgggcctctcggggaggccatccgggacgcgagccgctgcggaaccgctccccaagccccactgctcttcggactctcggtcccatcctcgcgtttctgctccggctcctccatcttggcctcgacagtggctgctgtggggaggatgtgccgcctcctggcagggggaagaaggaggagaagatgaagaagtaccggcgggccttggccctggtctcctgcctctctctctgctctctagtctggcttccgagttggcatgtttgctgtaaagagagttcttcagcttcaacatcatactattctcaagatgataattgtgcaataggaagtgaagacacacagttccagaaaaaggatttggaaacaacgaagttaagcctccctgtggttgaagcactccctacagttgatttgcatgaagagtcttccagtgtagttgtaggcagtgaaaccattgaaaatagttccagttcatctacctcagaaaggactccagtctcagagcttgatgaagtagaaaagtctggtactttatctatagccaagccaggtgaagtggagcagcctgaagctgactgtgatgctggggaggctcctgatgcagatgctccagtggaacaacctgcttttgtcagtccaccagagagccttgttggccagcatatagagaatgtgtcatcttcacacggcaaagaaaaagtaacaaaatcagaatttgaatcaaaagtttcagtgagtgagcaagacggtggtgatccgaagtctgcattaaacacttcagatactttaaaaaatgagagctctgattatacaaaaccaggagaaactgaccctacatctgtcacaagtcccaaagatccagaagatataccaacatttgatgagtggaagaagaaagttatggaagtagaaaaagaaaaaagtcagtcgttgcatccgtcttctaatggaggtccacatgccacaaaaaaggtccagaaaaatagaaataattatgcctctgtggagtgtggtgccaaaattttggcagctaatccggaagccaagagcacatctgctattcttatagaaaatatggacctttatatgctgaatccttgcagcactaaaatttggtttgttattgaactctgtgagccaattcaagtgaaacaatttgatattgcaaattatgaattattttcttctactcccaaagactttctggtttctatcagtgacagcatggtggaagaatatgaagaaattgctgactcccagtatcagtcagaacgtcaggaactatttgatgaggactatgattatcccctggattataatactgtggaggataaatcttcaaaaaatcttcttggttctgctacaagaaataaaagtatatctgagaatgccactgccacaactgaacctaaaatgactgaatcaactcgtgtttcaactcctgttccatcacctgaatatgtaatcaaggaagtccatacacatgatagagaaccatcaacctcagatcctccaaaagagagtccgattgtacaactggttcaggaggaagaagaggaagcgagtccatctacagtgacccttttgggcagtggtgaacaagaggatgagtcgtcatcctggtttgagtctgagacacacatactttgtagtgagctgacttcaatttgttgtatttctagtttttcggagtacatatataaatggtgctcagttagaattgctctttatcgacaacgcagcaggactgtgagtaaaggaaaagattttgtgccacctcagccatcactactacttcctgtagaatcagtagaggtttcagtaccgcagcctcccagtggcgatgtggatagcgagaacatggaaagagaagctgaaactgttgatctggatgatttaagtagtgtgcaccaggggcatttgataaatcacacagtggacacaattgaacttgaaccaagctaccctcaaactctttctcagtctcttctcttagatgttactccagaaatgaattcactgtctaaagtagaaggatctgagtctgttaaatctgaaggaggatatattccatcacaattgatgacccaagagagttctgttgagtttgatgataaaacagaaaaaaagaccgagagctttagttctgctgagaagctctctgttatttatgaaacaagtaaagttaatgaggtgatggacaatactgtgaaagaagacatactctccacagaagttgtcaccaagttccctgaaacagtagtaccaccacctatgaacacagccactgtgccagagggtgaaagtgtggaaaccaaacctagtatagctgatacactaaagcatacagtgactccagttatggatccttcattgcctgaagtgaaagaggatgaacagtctccagaggatgcccttttaagagggttacagaggacagctacagatttctatgctgaattacaaaattctactgatctgggatatggtaatggaaatcttgtgcatggatcaaatcagaaggagtcagtatttatgaggcttaataatcgtattaaagccttagaagttaacatgtctctcagtggtcgctatctggaggagcttagtcaaaggtaccgcaaacaaatggaagaaatgcagaaggctttcaataagacaatagttaagcttcagaatacttcacggatagcagaagagcaggatcagcggcaaactgaagccatccacttgctccaggcacaactgaccaacatgacacagcttgtttcaaacctatcagcaactgtagcagaattaaagcgggaggtttcagatcgtcagagttaccttgtcatgtctttggttttatgtgttgtcttgggactgatgctctgtatgcaacgctgtcgaactacttctcaatttgatggagattacatttcaaaacttcccaaaagtaatcagtatccaagccctaaaaggtgtttctcttcctatgatgacatgaatttgaaaagaagaacatcatttcccctcatcagatccaaatctctgcagtttactggcaaagaagtagatccgaatgatttgtacatcgtagaacccctcaagttctctccagagaaaaagaagaaacgttgcaagtacaaaactgaaaaaattgagacaataaagcctgcagatccattgcaccctatagcaaatggagatataaaaggaagaaagccctttacgaaccagagagatttttctaacatgggagaagtttatcactcttcttacaagggccctccgtctgagggcagctcggaaacttcatcacagtcagaagagtcctatttttgtggcatttcagcttgtacaagtctgtgcaatggacagacccaaaagacaaaaactgagaagagggctttaaaacgaaggcgatctaaagtccaagaccaaggaaagttaataaaagctcttatacagactaagtcggggtcattgccgagcctgcatgacataatcaaaggaaacaaggagatcaccgtgggagcatttggggttacagcagtctcgggacatatctaaaaggagctgaacatttatactgaaaacttttttgttctttgaagaacagcctgtggtatttgaagggttcagggggagggataaaatattggggaaagtattcagaaattatgggtttttttattttgccttttaaaaaagtagacaggattgtgtcaatcttggctgatgagctacagttttacaaggctgatctcttcctagaaggatggtgataggcattttataaagatgtgttttcacagataattactgggacaaaagtaatttggaagcccagttccttgggtggataggaacgaaagcctaaacctctccttcagcttggttcccgtttcttgcaccttcccatatttatgtgccttttgtctatttataatgccactggaagaggagggagaactttttctgtcatttgatttgttttgtaactttattaggtttttgaagctgcaaacactacaaagctttaaggtggtccatgcctgaagctcagcaatgtgggtcatttgcataaagatcctaaagacttccaacttagaaccgctcagtagtctcactgaaataaacactttctcaagttttctaaaggcctttcagataaaaaggtgatgatttcacccttggtttcatttaatttagttggattgggttttttttccccctgagttattattaactcagtaaaatggtaagatattttcttggaaatgacaggtatttggaataaatttattataaattcacctttaaacacacttaactatttgtgatgatttctctacattgctctcaatgttcacagtaaacactaatcctccaaattttcacatcaccaagaccaggttttccatggtcctgtcactgcctttgtacatagtcacagaaccagccagtgagcacgtcaggcctgattcagtctaattggtaaagtctaatgggattgtgattccttcatgtttgctttcgttggctacaatgtgcagatatgtatgtatgtgatgtcagcatctgtcttcacttgtttttttgttttgttttggttttttccttaagtaattggcagtgtctgagtaaattgatttcttgatgtgtgattgtacagggatgagtgaaagtgatatgtgttttagagagagaattgaccattttgtgttgtaaaattttaagttataatttattgagcacttttgttaataattgtttataaatttgtctaatgccttttttggtattgtttgtaatgtgatttatttaaggcctttttgtttaagttgctgctttaggttaacagtatgttttaggaaatgaatttcccctctcccagtctgcacaattagccattcagagcaatatggcctggtggtacacagcaggcccttgagaagtccagatgtgagccgagctagagtggggagtcactgtgtgctgtgaaaggagggtttttaatatgtaactacagagctgtagtaccattagaaactgtgaatttccaaataaatctgaacacttg

SEQ ID NO: 619 - protein, 1196 aa, Mus musculus
RRRRQSPERSCEASLFPLPWASRGGHPGREPLRNRSPSPTALRTLGPILAFLLRLLHLGLDSGCCGEDVPPPGRGKKEEKMKKYRRALVSCLSLCSLVWLPSWHVCCKESSSASTSYYSQDDNCAIGSEDTQFQKKDLETTKLSLPVVEALPTVDLHEESSSVVVGSETIENSSSSSTSTPVSELDEVEKSGTLSIAKPGEVEQPEADCDAGEAPDADAPVEQPAFVSPPESLVGQHIENVSSSHGKEKVTKSEFESKVSVSEQDGGDPKSALNTSDTLKNESSDYTKPGETDPTSVTSPKDPEDIPTFDEWKKKVMEVEKEKSQSLHPSSNGGPHATKKVQKNRNNYASVECGAKILAANPEAKSTSAILIENMDLYMLNPCSTKIWFVIELCEPIQVKQFDIANYELFSSTPKDFLVSISDSMVEEYEEIADSQYQSQELFDEDYDYPLDYNTVEDKSSKNLLGSATRNKSISENATATTEPKMTESTRVSTPVPSPEYVIKEVHTHDREPSTSDPPKESPIVQLVQEEEEEDSTVTLLGSGEQEDESSSWFESETHILCSELTSICCISSFSEYIYKWCSVRIALYRQRSRTVSKGKDFVPPQPSLLLPVESVEVSVPQPPSGDVDSENMEREAETVDLDDLSSVHQGHLINHTVDTIELEPSYPQTLSQSLLLDVTPEMNSLSKVEGSESVKSEGGYIPSQLMTQESSVEFDDKTEKKTESFSSAEKLSVIYETSKVNEVMDNTVKEDILSTEVVTKFPETVVPPPMNTATVPEGESVETKPSIADTLKHTVTPVMDPSLPEVKEDEQSPEDALLRGLQRTATDFYAELQNSTDLGYGNGNLVHGSNQKESVFMRLNNRIKALEVNMSLSGRYLEELSQRYRKQMEEMQKAFNKTIVKLQNTSRIAEEQDQRQTEAIHLLQAQLTNMTQLVSNLSATVAELKREVSDRQSYLVMSLVLCVVLGLMLCMQRCRTTSQFDGDYISKLPKSNQYPSPKRCFSSYDDMNLKRRTSFPLIRSKSLQFTGKEVDPNDLYIVEPLKFSPEKKKKRCKYKTEKIETIKPADPLHPIANGDIKGRKPFTNQRDFSNMGEVYHSSYKGPPSEGSSETSSQSEESYFCGISACTSLCNGQTQKTKTEKRALKRRRSKVQDQGKLIKALIQTKSGSLPSLHDIIKGNKEITVGAFGVTAVSGHI

SEQ ID NO: 620 - DNA, 100137 bp, Homo sapiens
  misc_feature (1)...(100137): n = A,T,C or G
tttgcattttttaattttaggcattagtgacattctgctatggaagttgagattttgctttttctccttttctctgaccaataaccccaaccagagacttataatctttcctatcccctcatcttcctgattatgattttacataatgattttgattaattttcagtgtatatattatgaagattatgtaaataccattcacagatgagcttttcttgcatagctctgttttctaaattatttttgttttttcttagttttctaagtgcttgctgctaaggtctgaatgtttgtgttcccccaaatttatatgtcaaaatcttacccttcaaagtggtagtatttggggatggggtctttgggatgtgattacatcatgagctcaaagccctcataagtaaggttagtatccttataaaagaggcccaagcccaagagagacttttcaccccttccaccctataacgacacagcaagaaagtgctgtctatgcatgagaaagtgggctctcatcacagtggtgagatattagactgatgccttgatcttagacctcccagcctccagaactgtcagaaataaatatctgttgtttataatctacccagtttatggtattttattatagcagcccaaacagactaagacagtatttctcacgaattctagtaacttttcacaattctgtacattagccctcgatatactcagatgcagtaggtattctattgatgtgattttcctgaagaggtctctcccagtgtcttccactgctgcaatcaggctgcctcctatgcctgatattcagttattatgctgggttcttcgttcactatcaccccagggattctcatcacctcttttctctgtattggattgcctgtttcctgtatcacatgactttctcttttttggattcttcccttgttttcgtagagcaagatctcctttcatgagaaatggcccacagcaggtaaatttcttgaggtcttgcttgtctcacaatgtctttattgtccctgacgattgatagtttagttgagcataaaattcttggttggaaataatcttcctacagtgtttgaaagacattattactccactatctttcgacttcctgtgtaaatgagaggtctgaaatggttctgattcctggttctttgtgtgtgtgatctatctttttctgctaattctaaaacttctgtgatctctttctctagtgtttccaaaatatcacagtgatgtgccttaatgtcgactgaggcacagtcccactgtgctaggcatttagactaggatgtataagtttcagtttggaaacttagatttttcaaatctaagaaaatatctggaaaaatatttattttctcacctctgttttctctcttttctttctagtgtatgtatactagacctcctggattagtctcctgtctttttggccactttctgatgatttctttgactttattttctaattcttctattgaattttttctttcttctttcatagctttgctttacaagaacttttttgatgattgttgctgttctcgacaggtccctttcttatagtatcctgctcctattacagggtggcagtatctggcaatgttagaattttttgtttctctctcaatgtatagtttttattattctccaaattgttttttgttttgttttcctatttatgaatattcatctccatctgtcatgtaagagcattttctcatgcctggtaatcattagttacctgttcctttttaagagtggagcactaaaatgctgactggatactctgagtacatggtaagggcttgactatgatcttccctgtagggtgaactagctgggaaaagtcagatatcagtcatcttttatttatttcctctggaatgatcagatttctcagagaagattcttccaatcctctccctagagagagagactggctgctgatgcagaaagacgcctgaggtctcagcttcaaatgtgtcctcattcatttcttcccgcaaaattgccattataaaaacttcaaacatacagaagagttgaaagaacagcacaacaactacccctgtatcctccatctatattcaacaattgttaacagtttgccatatctgttttcttcctctctaaacttttgaagctagggtgtcatcgtggacttcactcttaaatatttcggcatatatctcctcaaaaataagaacatttcctacataaccacatgtagtattgtcatatctaagaaaaaaataacaataatttttatcacttaatgcccagttcttattcaaatctccagttgtcacaaaaacgcacttacttttttgcatggtacccatgccgtaaactatgcttggcattcccaagtccagactttatctttttctcccctgataataaatctatagtcttttgctggggatggggtagggacagtcatctagccatgtagagttggggagggtatctgatagttcttaacttgcaatcacttcctaccaccacaagcaccaaacacacatacctttatattatttattattatattattattattattattattattattattattattgagacagggtcttgctctgttgcccaggctggagtgcagtggtgtgatctcagctcattgcaacctccacctcctgggctccagcgattgtcgtgcctcagcccctggagtagctgggtctacaggtgtgtgccactacgcctggctaatttttatattgttagtagagacggggttttgccatgttggccaggctggtctcgaactcttgaactcaagtgatccacccagcttggcctcccaaagtgctaggattacaggtgtcagccactgtgctgggccccaaacacatatacctttaatctcactgccagctggacttggtgctgctatttcctgaatgagctttttggggattctgcatgtcatattgaatcaattttgccatttctcattgctaaattaaggttcagttttctcatgtctgtctgtgttgaggttaaccatgttatttattgttcaaactaaaacacatttgaaggtactggggctcaggaaatgataccctaaagtatgaagccttggcatgctgagtattttgaactaaaggagattggaaggactcagaagcaaagtctctctgtgccctcctgtctcttgcctctccttccctgaggcaggtcatgaaaactagagctcctcttccccaaagctagtcataaaacccagaaatattactctaatcttctcctgcttttttgtgtagcagctggccataaagaagttatctgacctaccatgtctgatagtagattataggcctaccgtgtctgattgtagattataagactatcattccaaaagaggtcatgccctatacccagaaggaagaaatgctacacagagaggccaagaagaatctgaacagacagtctttgttgggttttcccctctcattttattaccattagacatgatcataccattagacaatatctactatcattatcataccctttttgtccagttacatttctacatggctgtccattcttcattgaatttaagcataaaaatggacagttttacctaggtctttgtgtgttcatttctgaagtttcctgtgtcaagtaaaactttttgattaagtaaatttgttatgcttctcctttgttaaccagtcttttgctataggagtgtcagccgtgactcttttttttttttttttgagacagagtctcgctctgtcgcccaggctggagtgcagtggcgcgatctcggctcactgcaagctccgcctcccgggttcacgccattctcctgcctcagcctcccgagtagctgggactacaggcgcccgccaccatgcccggctaattttttgtatttttagtagaggcggggtttcaccgtgttagccaggatggtctcgatctcctgacctcatgatccgcccgcctctgcctcccaaagtgctgggattacaggcgtgagccaccgcgcccagccccgtgactcttatgatgggtaaaaatatcacatcttttccacttctacaaaagtaaaagttggtactattattaattatgccaggattattaaaggtggtaaactaggcttgtcagatcagcatatcatcatgttaggaagcatttcttacttatctgctttccagcttcaagttttttttcttatggccctctcacctgatctcccatccttgcagcctgggtattaacaaacaaacagactcttttctgttgttttatggggttttgtgagtaaaagtaattgcatgtgtgcaatgaatatattatctttaccccaacttaattatcttgaactttgatcactttgtatttgtaccacattttgttattttaatgttcttgaatactttgtttcatagaaaataatatctctaatgctttttaaaaaaatccccacagtacctatagtgaagtattttatgtgtttaaaaaatacctgtttattttatttgattagagctcaccttcactatttcaaacacagaataccaaataagtgtcaagttattgacacttttagacaaaattagaaggcacataagggttgtaaaatagttttgaattcgattctagtgcttactgttccctatagctgaaataccttctcttcatatctctatgaaaatcatactcatttttaaagaaccacattatatctgcctcttttaagtctttgataatttcctcacaaaaaggtaatttccttttcctctaaaatcttgtgatactcacaattcatattatttgaggcatttattccatatatcttatgtatttcatttcccctagagcagtggctttcacattattttgactgtaactcactttaagacatatatttggcagggagtggtggctcactcctgtaatcccagcactttgggaggtagaggcaggcagatcacttgaggtcaggagttcaagaccagcctggccaacatggcaaaaccctgtctgtactaaaaatacaaaaatttgccaggcgtggtgatgtgtacctgtaagctactcctgccagctactccggaggctgaggcaggagaattgcttgaacctgggaggcagaggttgcagtgagccaagatcgtgccactgcactgcagcctgggtgacagagcaagaatctgtctcaaaacaaacaaacaaacaaacaaaaaacaaacaaaacaaaaaaatcccagacatatattttacattgcaacctagtatgcatatatgtatataacagtacacacacacgtatacacacatcacatatattactgaaataagattgccccacaaaaatacttcctcttgctgagacacactctgatattttctaaattattgtcttttagtttttaaaaagtgctgctggattccctcaagattcatttcttgactctctaatgaattgtgaccccacagtttaaaaaacattgctcttttgcaggacttcttagttgggatccatgtatataattcacaggtccatggagggaataataattatatctccattctcctaacctctactgaaatttagaatttgattttattgtgaatgtaggtaacaaactgtggtagtactggctgtatctacaactttgtcaccaatattaatcacagatgttttcatatcacattatgcatattgtaggtatcttggaatgtctcttatactcatcaccattttggaattattgacattaggagacctgctgttagaccttgttatttatgcattaatgaaaaagcacaccttattagatcacaaatttgctttgtaatattttaataactgtatttccctacaattagtttccttggtaatctatgtgttttattttatacctttataaacattctgaaaagggttttaccagactaccaaaagggttcagttcagaagattaagactccctgctagaacgctaaacttttcctggagcaaatttctgtctcagcatctttaatacaaaaaaggctcaataaatatttactgaacactttatttctccaggttacttagggtaactagaacctaggaaaatctattcagacataagtcaaataatgttatgctaaaaagctaatttggtaatttatagagaaagaaatagttggctaggtgctctagactagtcaactgcataaaacgttctcatcctaagggcttgctacttctaggaatttaaattataaggcaaattgtaatttaaggtgattagacaaagaaataagtaaaaagtaaaaaattatttcttgggcctctgtaataaaaaaagtcactgtgtgatatatatcaataaaacacgtgacctctctgcaataaggaatttattcactgcttggggagacaaatgactattaaataaaaacagtgtcatgagggcaggcacaggtgtttcaggtcataataaacagtgtggtctggtgagaaggttgagttatgaaagaaaacagtgggaaataaagcttgaactacatcaactgggtttgattatggaaagctttgaatgccaggccaaggaggcaggactttatttcacaaatacgtcagacctgtaggagatttttgcatcaaagaaaggacatgatgaagataatgttttaggaagcttcatctgagagcgttatacaggaggtactaaaggacgcatcagttacaatccccaacatgctgcttcagttgctactttctctccctattttgaatcttgtacttgtaaattcttgctagatacttccaccagaacctcaatactgtgcttccaaaaccatactagtctcttaaattgtaaatctgcaactcctgactttcctactcatataatggcacatacgttcttagaaattggaccatctttgatgtctccttctctgtcacccacatgtaatcattcccttcctctagttgattccattatgagcctattcaattcatgtatcttcaaaataaacatatgttaacgcagtgatagaagactgaatttgggatcacaaagtagaatttttaaaaagggaaatcttaccttttgttatttgcagtaaaaacagaaccgtgcatgccaacattgcactctgtgatcttcccgccctcagatcttcccgccctcaagagactgagttctcagactgtactaataaagcaatctatgtcttcttctgatttctacctttacctcctgaagtggccaaattaccagtgctctgttaaggtagattaggctaagtagttaaggctcttttcaggtaggtagtaactaaataaagaaggtatatgctattctacacacatatttatatatataaagaagatgatcggggggacagttttaaaagttctgtttatactttttatgcggttaaaatgttaagtgctgattgccacattcaccatttttccatcttatttagtctcttttattgtccatttgtctgttttccattccccaacctttctttgactgatttccaggaaacttctgttttaactgacttttactctggaagcatctaaatgtcattggtctctaagatcctttggagacatataggatctcagcattttgtaatattgaaaggagcaggtaatttttcaactaaatcaaaatacataaaagcttgctcatgaaataccaccatcttagacaacacagttctcttgggtgtcttaaatatgatttgtatatgagataaagaacaaacgagatagccagaaggggttggttccttttctaaggtctgcttgttctcttttaccataagcaaacagagtatctgatctttatcaaggcagggacttgagctgcccagagtttctggtttagtcacccttttaggaatgggagaactcatgttcattgtgcagtttaggccctagtgacttgctgaataatccaaggatctgcagggcaaacgagttatcctgtgtgtggtcagtgctttatagattttattgaattgggagattctgttacagcagggtttctcaaccttggcacttttgactttttggccaaataatttttgttgtggagggctttcttgtgcaccgtaggatgtgaaacagcatccctggcctctactcactagatgccagtagtacttctccaatgtgacaagcaaaaaatgtgttcacacaatgccaatttcaccctggggggaagtctgccccaggttgagaattactgtattatagttaaggggtggttgatagtggttacttagcctaagccttaaaagattatatatataattaaatattatatatgaaagattatacattatacatgctctttttctatattctttcttgccatttttggcatatgttatacttttaagtatggtgacattcatctatactagttttattttatataactattactcactttcttatacttgtctattgagttgtaagaaaattttctctgttctttttctcattatatttaacagatatgtggaaaaatgtctaccagttctttaaaggtcagctctatggaacttctatttatttcatctgaagtcttagaataggaaagaatcaacacaaatatagaaagtcacgtgaagaagctaatttatggggaaaatgagttcaattttgtgcaggtaaaattggaagtgatagaataatatgtccagcaactacttgaaaagaggatgggatataggtttaggagtcaacagtatagttgaaaattaaaattgctcaagagaaaaatggaaaaagctcggagtagtgaaggattaaaccttaacatgaaaccatggaaatgaagctgcaaaaagagaaaagaacatttatagattgaaatagtaaaagctaataattggatgataattaggtgaatggaaagcctaccacgggggtattaataaagctccaactgcaggagaaggaaggaaggaagggaggaaggcaggcaggcagtcaaggaaggaatgaaagagaaagaaaaaagtaaaattatttgtacttgcatgtttcaaaaaatcattgcagggacttggtggaaaataagtggatgggtttgtgagtttgggatgagagggttaggagatgtaacttgataacttcctagatttgagataagcacgtattctaatataacttctttggctgtgatgcactgaggatcagctgagggatacctcagctgtttcctatcctgaataaaagttcctggagtaagaggaaaagagtgtccaacatggtaaagaatgtcaatttatccctaccctttcattgcccctactttcttttaaacttgcatattaatcatttgatactgtttttgggtgagataaatacttgcttcccgcaataggtgacagatgaaaggattttattgtcatatactaagagtggcatcagcagataagtggaactgtacctaattactgccagaaaaggcagttcagggtgaactcctttaaaacaaaaattatcaccctttgtataatttctctaacatcaaattgacttatatccaagaatcacagagcggatcaaatcattcagttctttgggactataattaacatccaattcaacttagaaggttcataaggaaattccgcggctcaaaattaggcgttaggtgggcattttactgagggttttttccctacggccacatgaacaataagtaacccgtcctttaaacatttttcacactaaacattatgccatgttccaaggcacagaccattgcagcctccgtcccctcagcggcgtaaacacttggaatgggcatgctgccccgttacttagtattgagaagtggtcactttttgctcttcttaggtgagtgtaagcgactgccttccccactttaggtgaaccccaggacttggagcgtctgtgggtgctcctctaatggggacaactcctcccttccgactccatcgcagagaacccaaagttcgaaaccaacagaacgaaaagcaacgaagcacacttaaagtgaggaacccggcaagcggcgaaattcttgctgaagagaagaaaaagcgaaaggttttccgctgcaaccaatcagatgagaggattcttggcacgcccctttctatctaccaatcaacatctagctcaatggggcagtccattgccacagggaaagggcttggtgcagcttccctcacaacacacacgtcattctaggccattccacgaactgtgctcaaaagaggaaaacagtgcaacagttccaaagctgatcagtctcgtggtgagcagcgaaactatagacttctctaacaaaaccatggattctaggagggactgggaaagagaaaaacgaattctggaaggcaaactacaactcccaaaggcccttgcgcggactcagcgcgcgagggacgaagggcggtccactgtaaggggaaatgctgaggatcactgggctcctcccggctttctgaacgcaagccagcaagtgggcgggacctggggcgggcggagcggcgagagcatctgctcctgcgctttgtggtctcctgcctccggcttctccgcctgcgacgtcgaagggggcgtggcctgcgcagaggctggtgggggtgcgggcgccgcgggacttgggtgacgcgtccctttccagctcagcggtgtgtgaggtgtcgcggccccgccggcgattggctgttgagaggcgagtacgcggcggccgttggtcgctggcctcacggagcaaggcccccggcgggcggggaggatatggggcggcagtggcggctgcaggaggcgggcgtggacgagccggtggctgcagcggcggcggtccccggagtcctgtgaagcgcccctgtccgcgcctctgtggggccctcagagagggctgccaggacgcgagccactgaggagccgctcagccagcgccatagcccttaggactatcggtcacatcctcgcgctcctgctccggctcctccatcttggcctcggcagtggcggctgccgggaggatgtgccgccttctggcagggggaagaaggaggagaagatgaagaagcaccggcgggccttggccctggtctcctgcctctttctgtgctctctggtctggtgagtagccgcgacgacaagggagttcccgtgaggggagtaaatgggagggagcagcccaggtcacaccccctggtcattttggcttttagggtccgggtttccaaggcccccgtggaagggacaaaccgattacttctcgactctccatctgactggtctggtagtgctctgtgcggagattttcatggtgtattttggaatttacagagactcagtgggagagagagaggtgccaaggtagagggaaccaccaagtgcctttgtactcagttcctctaccccttggagacggtgcagggtttggggtgggtgttcagattgatggtaagtaagttgctccgatttgccgccagtctttgcgttcttagtgtggtaaggggataaagcacgtcggatgtgatgcgttccggacgtgcgattttaaaacgtgagtggtcatgaaggtaagagtaatgtataagcagtagttctcctggacatttctcgcacagcgtttgatcccaagtacactcgggccgctgtttttggaaacttggggggcgtgtgtgtatgtgtgttatgaagcactttttcaattggtttggtggagagggtgtcttagatgtagtgtgtgtagtagtttttggtaatgccccttagtgacgggaaggtaaatgctgtattttcaaggcgggaagagtgctttgtccctaaagcactccttaagttttacggagtttctgttaatcccaggcacttctggagttttttgaggagcagagaaagcttgtaagtcgagggactgctgtcaccgtacttggaaaagccattctttcctcccagggaatttcttcaaagatgtgtgacaattgatgactgaaaagatgcttcttcagtctaggcgatttgctgtttgttatattaaaatagaaattaagtttcctgttttgcttatttctgcaaagcaccaacactattttcatttttatggatgccttatggattccagaagcactgaaattgtagagttgttgctcacataaaataatacataaacaaggggaagagaaaacactcgcctggctgagggatttttattggaagaatgatagaagtttttgagaacaaaaacaattgacttattacctttcattctgaatccttttaatacccgtctcctgtttttaataaaatcctcccctttctacttactgtgttgggtacggagaagtgcctgtaagagataaatccactcacctcattttaaatttaaatttgtagatactgaagcttgtattcatttccatctctttctggggctgcctagttatatttgtagactgtgtattttctttcctctttcttcttggtcttgcccatctttaaaccatgttattcatcatcaaaagtttctgaaatggctaataaggaaaaggtgaacactttcattcaagtttaaaaacacaccagtatctctggcttttttaaattttttaattggatggtgtaaacgaaatcaagcaatagaatgtgattcttacaatcatttgtaaatttaagttaactctgcttctatttcttttgggaatttctggctatcttttgattaagctaaccctcagtatgttttctcaccttcaatcattagctctagtgaagagctaatgaatttccctgttagggaacaaatcggttggcctggtattgaaagtagtagtaataaacttctgtcaagttttttaactcctagtgaggaaaatggatgtggagagtttaagagtgtgaacattttaagaaactttagcttaagaaactattgggttagtatattttgagatttgtttagactgccaaatttagagacattttaattattctttagcaaaacgattaaaaggcattaaaataggacattaaggcttaaagggttttttaaagggtgatgatgatgaatgagattggggaagagaagtggtacctggtgctgattggcaaagggtatgttttttctttgaagcctctgcttttgtgccaagttggaattaatggcacttaatggatttctaacttttgctgcaatctggtgtggtatttcttttcccaacaacctcattccctttaacagaaatggctaccaacaagtcctagggttagataaaacgtttgcaagagttgatgagtgccttttagtagccacttttgtctcttttgttattcacaaattgtctcaaaattttgtgatccgtttctgttttgtacattgagtgctgtatgtctgttctacagtattctagtttctgaggtttcccctctcatgctaccaatattactgtgttatgtttactatcataattttgtagatcttgattatgtctcccctctgcttttgtcttgtagccttgagtactaaccttagattatgtttacagaaaaaccatttcatctatgtcattattaatttttgttgctgttttttccttttgcatagtttataatttttgatcaagtagtatagagtattctaggcataaatgcactatagctgcagcacagagcaatgatagctaatatttgctgacagctgtgtgtcagacacatgatgtttacttgacaataacacctttaatctttataagaaccctataagataggtattattattaacttccttttgcattttacatgtgaggaagtagagaggttaacttggctaagtttaagcagctgttaagcttcggagcttaaatttgaacctaggcagcacaggctcctgagtactttataggtcagaggcctgtattttatatatgtggctccatcatttactagatatgtgttctttgacttgttatgtaacttctttgaaccttagttgttatatcctcagaatggggaaattgatccattcatacttcacagggttgttaggaggatgaaataatacaaatgacagatctttgtaacacagtaacagcgtattatgtaaatatttcatcataacattattcaaccacattttgttctcatacctactgtgccagatgtttttatgagcaccgaaaatccaagatagagggtcaccagcttgtcttggttttaacactggaagtcgcataacctaggaattccctgcattagtttcttatgcctgctgtagcaaattgacacaaatttagtggcttgaacaacacacatttattaccttacaattctgtggatgagaagtccaagatatgtctcacagggctaaataaagttaagatgtcaactgggctcgttctttttggaggctctgaggggagaatctttttctagaggccacctgtattctgtggccccttcctcacatcagcactccaacccttttttcagtccttatgtctactaatgactggtcctcctgcctcttcctcttataaggactattgtgattacattgggtccagccagacattccaggataatctccctatctcataatccttaatttaatcacatctgcaaaatctcttttactatgtaaggtaacatatttagggattaggatgcagacatctttgaggggggcgcattattcagcctataccctataccatactccctcagtcctgggcaaactgggaaagctgcatcaccctaaagaggaaaaaaacataattagtggatattctgagtgtgtcccttaattagtaaaaccttgtgcatccaccttaattgtctataagttatgtacatgtgccaatatagtaatagtatattagtgtatgtaattaatgcaagttagatatttaagaaaaatgagaaaaaaataataatttctgttaacggtaccttttgttctcattaaaataataatttttagtgagagctatgtgattgacctactagattattttatgtcatagtatagaagaggaatagcttcaactacttaggagtcagccctgtcattttcttgttggctgtgcttgcattattaaattctttgcagtaatttttttaaaagctgcttcccgatgttgtgagggtcaattcagttaaaactgaataattcctaagtctacctaactggggaaacataaaccacagtgaatcatggtgtgctgtaagtaaaacccattgtttgtgggacttccactctttccctgggtttctgtatgaatccttacattaatcttagtaaaacttattttttaaaactaaacaaatctattcttccttcaccccaaaggatcatcttggagaagcttatatttagactttcgggaagagcttgacatttaaacaagtctcatacatttggcaaatataacaggtacttacaaaggtttttaggaacagcaaaggaagaattcatatcctacttgtggttctgtcactaactgtatgtctttggacaagttacttctgtgaacctcagctctcatccataaaatggtctgcaggatggatagttcacaatgagcgaattttgttgtaggcagagagaacacttacccagttatctagagcgtgagtgtatgtgaggagagatgggaagggaggctagagctaggttttgaaaggatttgattatcatgcagatgaattctaattctaaccacctgacagaggatgagtaagtgaagtggtttaaactggagaacaggagcatgaggtcacatggatcttttaattagattgctgtggagggtaaagtggaatgtaggggacgtactttggaggcacgaggtcctaagtcgtggtcccactagaagagagttgatatctaaatcaagatgttggcctttttgtccttagtagtaatttttctgagtatgtcagaccagtttttatcagtttaagaggtttatttcctggtttgtgattacatttctgtacccttttgctttttctctcatgattgctggtctattaatatacataagtgagcagaaaaaaatttaaaaactagaacaatatataagctgttttttcttttttgaggtgatgaatagagcatattggaaacatatcgataaaacattttgaaaattccccaggaaatctggaggaatttttttgcttgtttctgcttctgtctctaaactttaaaggtacggaatctatttcttttctgaataatatttgaaataaataaaataataaaacaatcccacttctccaaatcatttgatgccttttttttctttccttgaataaaccaatgaaagatgacctttacaaaaatgatttttttagtggaacttaatgtgaaagactgaggaaaaaaagtttatctttgctctaggatatatattctgaagaaagcacctggtatttttatttataagaggtgtcgggtcatacagtgtcagatcccttcagacaagttagatgaagccacttaataggaaaaggtctgtgaaagaaggtgtgtgacatctttgcataacacttgaacactgtgtccaataaaagacggcaaatgacgtgtttcatgttggtcctttatgttattaaacatttgaggatatactggaatggaagcaggcagtagggttgacaggcaatggaaaaaataaaaggtatcagctcttttgagtattggttatttcatttttcgtttgttcatgaacttgtacatcactctttcacttttctcaacagtctgaatggagaaaagaatcaatatgtataattaatattcttatgcttataatgaaagggaaacttataaaaatttaagtgctttattattctcaagtcatcttcaaatagaaacacctgtatgtacgtgatgcttttgtttagtagtttatacataactggaaagagatgaaatctcttgaaacttatctacatgttttagattatactttagtgccagttgtatgttatgtttttcaaggccatattttagactaatttaaaagtcaaattgtacatgtcacaagggaataggaaattgcttttgaatatttgcagtataagagtgttaatcctttgggatgaatttgtttaataaatgcaagtttttttgaaagaagatttggttttatttaggactttataattaattgctagttaaaattattttatattttacatgaaagtgacacctggctgtatcagaaagtattctgtaacattaatacggttcataggtactaagctaattttgtattattatgtagcgtttgtaatctactggagaaaaaacatgtaaaggctaagaacagtgcctcactcgtagtaagcactactgtatgagttattcattgactctagctactttggtaatttgttgagtagaaataagatggcctaggtttcagagttaaaaatgggaatttataaatccacttaaatattatttgattattcacaatgtatttggtgtgatgaaggatacagaagaattgtgagacttgagctctgtatataagctgcttgttacaatacagatagtggtgtagtgtgaaaggcataaaactatgtcagagcttggttgtagttctttcttttcattgttaatatgaacatttattgagtgattatttctcttctaagtactaaatactattcagtgtaatatgcattaaattattttattctctgtatagatgttttaaggcagacactccattttaaagatgaagaaaggtgggcacaaagaagttaagttcttaacagcttgcccaagttcttacagccaggaagcaacagagccagaactaagaaggccaggttctaagcctgtgttctcttaaccggtatgctgtgctgccagttggctggtagatggtcttgggcaagtttcttcactttttctagttaataattttatctggcaaagtgtcagtttttttcatctgaaaatgtgggtgcctgtattagcctaggaaggaatggacattggaattgttcatgaaacttttaaaagaaatacgcatacctaggattcttaccttgtagattttgtcagtaagtttgtgatactcttttatgcattcaagtctgtattactgtattaggtgaactcagtttattttttatatgtctaacattctaagatacttgatttgaatgttaataaacaacacataaaactgaactgcatagtaagtgcttaagaggagaaaatgagggctagagttctcaaggaaggcttgacttgggtttaagggaaatgtgtggtttataaactctgcttctgtgcaaacaggagcttcatgagctgaaataagatgtactggtgttgataacatgaataatggctatttctttgtgtgtgcatgtgtatgtctgtctgcctgcttgcagtgggtagatggcacttaattgtcaaggagaaagagagttatgaatggaagagataatctagttgatatgggtaagagtggtagtaaacagaaaagcctgaggagaaagagagagatttcagagattgtggtagattttgcaaaccagtccaaagaattagataataaagattcagcaagaaaagtggtgttgtgagaacattattttgacataattgtgctagatttttttttagaggaaggagacttagaggggtgaatacaattggctttccacatccacagattcaaccaacctcaggttgaaaatatattttaaaaacaataaaaataacaatacaacaataaaaatacaaataaaaacaatgttgtataacagctatttacatagcatttacatagtgttaggttttaaatcacctctagatattatatgggaggatatgcatagatgttttaaatcacctctagatattttaaatcacctctagatacttatatggaaggatatgcatagatgttttaaatcatctctagatattttaaatcacctctagatatttatatgggaggatatgcataggtgatatgcaaatgccattttatgtaagagactggagcattctcagattttggtatcttcggatcctggatccaaccccttctggatcccaagggatgaccgggctaaaaagcccttggagtaattgaggcttgtcataagaaggacttcatcttggcagtagaaataaagaacagggtacaataaatagagatttttgaggaggtaaatgatttaattttgtgaaaggttggcaagctggcagtagtgcagtgcagtgcagcagataacagcattaggctaggattctaaataactggattttagtttgcctctaaccaaactctgttcaacatcccctttctgttgtccatctcaatgcaaagagatatttacttaggcttcagtgtgctgtatcctatacaggattctggtggacaaaacaaagtaactgccttcttggagcacactgtcactgagagtacattctagggcctaaaattatgaatctgtgaaataaagttcaatgagaaaagaaatgttaagcattttttgtttgttttctgtttgtttgcttgtttgttttaacttgggcaactagaagaattggtggtggtcaaaaagaagtggaagagttggcaaagggcttggaaggggaaggagctgttagttggaggtgaatggaatatccaagtggagacattttatgggcacttaaaaatgcagacttgaatgcagataaaatttggcctggagtgccaggcacggtggcttatgcctgtaatcccagcactttgggaggtcgaggcaggcggatcacctgaggtcaggagttcgagaccagcctgaccaacatggagaaaccccgtctctactaaaaaaaatagaaaattagccgggcatggtagcgcatgcctgtaatcccacctacttgggaggctgaggcaggagaatcacttgaacctaggagacggaggttgcggtgaaccaagatcgtgccattgcactccagcctggtcaacaagagcgaaactccgtctcaaaaaaaaagaaaaaaagttggctggagttatcctcgtaaagcagaggtccccagcccctgggctgcggaccagtactgctccgtggtctgttaggaccctgacctcacaacaggaggtgaacagcaggtgagtgagcattactgcctgagctccacctcctgtcagattagcagcagaattagattctcataggagcatgaaccctactatgaaccacacacgcgagggatctaggttgtgtactccttatgagaatctaatggccccccaccccatccatggcaaagtagtcttccatgaaactggtctctggtgccaaaaggttggggaccgctgtcatagagggaatcatttttgaaagagaacattggacttttgaaacagaataaagaaaggtgccaagcatagtaaagctctgaaagaaaggaggaaactggaaaggatagatggaaagagatttaaggaagtcatttaagtggtcaacaatataaaatgtcttagataagtttggagagcttgaaaactgagaaacttttcaaaagagggaagtgattgatagcttttgggagtggagaataatagaagatatttggagagctggtaggcatgaattccacacatttgtttggtagccaggagatgtagaagagtacataaaaaaaaaaaagttaacatgtagagtagcttcatacttgtatgctgcaacccattttacacagtgccactggatttgtcttacatgcagctttgattatgtcagtcccctgatgaaatatctttcaaaggctccttgaaggataaaactttaaaccttgataatttttaaatgcctgcagtctgacccacacttactgttgtagctttattttctgcttttcctaatagagactttgtttgagcatgactgatctgttggcctggtagtaatttatttgaggactatttttgtagtctctaattgaaaattaaggtaacaaaactactgtcacttgtgttttagaggctaaatacactgtacccaatttctgaaaatatattattatcaagtatagggcatgattatttccagcatcttagaggacaaattgtattggctgaatttctaatggtaggttataatggtaggatataaaaacagaacatatcacatttgtttactaagtgcttctctatgttggatcaatgaaattatgggccagtttagtgaaacaattttctaatagaatttgatatgtggaatattaagctaagaaaatttaagacccaatcctacatcagagtgaagttaaaagtcagaactactgaaatgcaaaggtttaattagaaacaggcactagaacatagaactttctcagctaagctgtacaattgcacgtgatttgactatggactgttgatgcagccaaatagaataaaaactgcaaggagaaagaggcccagtatgctcttacctattagcagatagaccaagcagaagagaagcaaccttaaaagagctccagactgatacgtggtttagaagaatatctgtcttttaataaaacattgtgatggagagaaactaggttgcttaagcaaaggcactagaggcctggtgatcttttggtcttgttttattaccagtgtttgaccaaaatggcttccacattattcacccatttcccacaagtttctcaatacttacaggatttcagtaaattttttcagatatccaggaagtaatattcaaaaactacaattttcactgataactttaaccatactgcgctaattgagtggctggcactatatttctgtacaagggattaactttgaatttatgtttaagaagcaattctttgttgcctagtttagttatttcttttaccacaaagtgttttctcattcttctttttaaagctctgaaaaagcttttctaaatcatagttcaaagtaggagctcaatagatcatcatgctggcaacagggcagtgtattctctgccttggagttgcttagtcttatgtgagaaacaaaaataaacagttaatttcatttcagtgtgtatgtgctcaggtagagatagccaaagggctgtgggaatttagagcgggccacccaccaaccccagattgtggaaatcaggaaaatgttttagacccttattagtttcttgccccaagagagaagaattataggtattgagttatgttttagatagtgggagtgggagcaggtacagaacattcttgaaagagggaacagcatgagccagagacatgagacagcacagtctgtgttcaaggaactattacaggtagctctgtatcgctgaagcataaagtgaaaggcagggagagtgacaggaaatatgaagctgaagacttagtagaattttagagatttttaaatagcatgtggagagaagcttgagttttgtcatgtagttaatggagtctgtaaaaggtcttaagcaggggaatggtagtgtgataatttactgttagatttttggcagaggtgtgaatggttgatttgcagacgtagcaagttaggaattagggagatctgttaggaggttgctctaggtaagagataagggcttgagttaaggcagtcagaatggggattgagaaatgatttgaagaaatttagagtagaataaacaagatggtcaagggagggtgaaggcaaaggagtagtcacaggtgtttttcaggtttctagtttgaggactgggtagatagcagtaccagatggtgggatcaaggatataggaggaagagatttggaaaaggaagctaatgtattcaattttggatttagatgtttttgagataccttggaatatgaaggaagagagatgcaacttttaaatgagctttgtttatcctcaacattaaggtagggtatcacagaagggttttaaggaatggaccagttaggaaaagataagggctgaagataaagtttcagtagctgtcaactaaaaaccatgagagtacgtaagtctcctatgtagaatataaagggaagatttcagaaccaaacccttggagcatcagaatttaaatagtgaacagaagcagcatatcaaaggagactcagaaacaagagtcagtgtgagatgaaaagcagaagtgtgtaatttgacaagtcaaagaggagatggtttaagttaaaacagcagtcagaggtaccacatgcagcagggaaatcaaaaaaagctaacttctgccacaccatactagtctcagtggtacaatgaggacagaaactagatttcagcaggctgaggactaaatagaaggtgaaaacattgagattacaagtataaactactgtgaaatttgataagtgaaagtagacagaaaaggtagtggctgataataactgacatttcagcacatattctgtgccaggctaagcatagcatatacatttatttcagttcctcctaataagtcaattttacaatgttgatactgagttgaggcatataggctggcctgcctgccttccgtccttctgtccgtccgtccgtccttccttccttcctttcctttcctttcctttcctttctttcctggcagggtcttgctctgtcccccagtctggagtacagcagcatgatcaccactcaccgcagccttgacctccctgggaactggtgattttccttccacctcagcctcctgagtagctgggaccagaggtgtgcgccaccatgcctggctaatttttgtatgttttgtagagacggagttttgccttgttgcccaggctggtctctgactcctgatctcctcttaaatttgtccatactcttggattaaagtattaatctaatttttacaaataaggaaactgaagctcataagttgcccatcactcaccttgcaaacttagatctctctccaaattgttggatttttccatattgctacgtttcatgtttaatattttctagccaacagataaatgaaaagaaaggtaagaagataacactgttacattcactcaagaattggtgatactggtcaaagctagatacagcataatacaaaaataaaacaactatcacaaaggagaagttctgattaactacttcatgattttcgtagtggcaacaagtgataaatatgaaggccgtgtagtagtggctaagaggcgcaggcttcagagtcaaaaaaatccaagttttaacccccggtccctcacttattaattacaggatcttgaacaagtaataaaacctgtataggccaggcacagtggctcacacctgtaatcccagcactttgggaggccaaggcgggtggatcacttgaccccaggagttcgagactagcctgggcaacatggcaaaaccccatctcttccaaaaatacaaaaattagccagacattttggtgcttgcatgtagtcccagctattctggaggctgaggtggaaggatcacttgagcccgggaagggggaggccgcagtgagctgagattgcaccactgcaccccagcctgggtgatagagtgggaccctgtctcaaaataaattatgtacagcgaaatgcacagatcttaactgtatagttggatcagttttgacacatgcatacacctgtgtaactcacaccccctcaagatatagaatattctcatcaccctagaaagttctctcatgtccctttctggtgaatcccccagaggcaagtagtgatctgatttctgtcaccatggattagttttgccaattctggaacatcatctaaatggagttatacagtattagctcatgtgtttgacttcttttactcaatgtaatgtctgagatttacccattttgtttcctttgtcattaattagttcctttttattgctgagtagtagtacactgtatgaatgtactacagtttatttattcttctgttagtggttatctggactgcttccaggttttcgctattaggagtaaaaactactatggacattcttgtacaaggctttttgtagacatagttttcattgctgttgagaagtacctaaaagtagaattgcaactgctgaaacggatattatatgcttttcgatacaatatcctgagaaagtcacaacatcattataatatcctgagaaagacacaatgaaggattctgactgagaatacctaatctgaatctggtcatcatgatacatcagacaaatctcacataagaaccatattatttaaaaagaaaggggactgtagccttcaaaaatgttagtgccacataaaataaagctccagaactgttccaagttaaatgatactgaatagacatgacaaatgcaggacatgatcatagatttaattctgtactggagaaaggaattctaaaaaagacattggattaattgacaaaattgcaatgtggacagtaaatttttgtgtcaatgtaacatttactgaagttgatacctgtattgtagttatgcaagagaatatccctattctgtggaaatagatatcacagtattttagaggtaagttactgggagagagggaacagagggagagaggaaggatgagtgagcatgggcaaatgacaaataatggaacaaattaagtaaaatattaacaatggattgatacagctaaagcatttgtagatttttttttgtactatgctgcctactcttctgaaatttgaaattatttccaaataaaaaatttaaaaacggtttgaattttctcctgtgtgtgagaagttgatagatccattcaagtttatcagtctattatcagttttttccattccttatgccagttttgcaatgtttctagaaatttatccatttctcctgttttcaaatatattgttatatatagtttataatattttataattttaaaaatgtttcctctgtggttgttttttctttttattccatattgtgttaattcccattactatcttccctttattggttttgccagaagtttgtctaatactttcttcaaagaaccaacttttgattttcttaattttctttgctgttttttgttctctattttagcaatgcctatccatatatccttccttgtttctttgcatttgtactctcttttatctttttgagttgattagctcttttgttttcagcatttgtctcaatgtattcagaagcatagttttcctgctattgtcttatctacatcccaccaattgtgattggtagtcttctgctgattatttcataatattgtttcctctttaacctaaggattattttgctacatatttcttgcttccaggcttgggatattgttagctgtctttctgttatttcaaattttgttgcagcatggttggagaatataatcttttagagcttgagtttttggaatttgaggcttcttttgaggctttagtttactatcggtatttgggaaatgttccacgtgtccttgagaagaatgttttaatttatatgtggtataaaattctgtatctttgagcttcttacatggaatataaatatcattttgtccacttaatctgttattttgtgaggtaatttaaaatagaccaccatactttttgtttattctctttccacctgtagctttgccagtggttgtagtatattttctacattgttaggtgcatatatatttgtaattctttcttctttttactcatagataataaatcgctgtcttaataacataatgttttccatcttgtttggtttctatgttaattaaaatggctactttgttgttttcatattttcttaaaactgtatatacttactcaaatttttaaatgagttgaaaattacccctaatgtttcctaacataataattggtacttactgggtaatcttacatgcttgtaaagtttcttcattaaaactcagaggaaaacaattcatttgaaagtgacagactccagtttagttttattagccaagcctaataattgcagactccttctttgcaattattaggcttggctcatttgcatattagtatattctttattgcacattaatgtgtctttctggaattcattattgcattattttgctagatttgatagtatgataaaaaacaatggttaaagatagctggttcagtaattctgcattaggcagatataaaaagctgtcattgcaagccattggatatcatttttaaaaggtatttttttctcaatcactttcacattaaagaatgctttcttctgtaatgaaatttcccttggcacaataaagaatgttttctgctttcttaatgaaatcttccttggctcttcagttgctatattgtttggaaaatttttcctgagtccctctgctgttctttttagtaagaatgaattgatttctcttttaccctaatacttaacgattatttttttagacacatagttgtaacatacacccttaaaatggcaggatgcctagaagtattaaagatcgtaggttgccacaacaagaaaaacttgtcaccatacattcaagttgaaaaccttccttcagggaaaaaaaaaaaaaaatagaaatacagtttctaaaatgaaagcagtaggtttaagaaaagattaaatccccaaagtctgtcttttaaacctaggcattccatttcttctggtgttatttgggtgcttctgataaactaacctaggctgattgccctctattccttgtttacagctatcttcctgggatttgtctttctagtcaccctgggggtttcctttgcctctgttatctcagtatcatattgctgtaattactgtagtttcatatagatctagcccctcatataagaatattcttgactatttctggcttgttatataaaaagtctccctttttaccacctcagtatgtagttcaaactacccctatatattattttgaattgtgaaattgacactttttccaagtaaaaggattgtcaaatattggcaatttcaaacagttctacttactagaagatttcttgccaagtttctatctggacacgttattgtttctatcataaatgagtccttgttatggtttgagagagtgttgatttgcttcttaattttatacttgggaatataatttttatatctgggacttcttttaataggtgattcttttgaattttccaattatataaactcatctgcagttaatgcagatacactcattgtttggaactacagataattttactgtcttttccatttttatgcctcttttatcttcatgttttgtaatgctaatgaaaatggacattcttgtcttatttcagatctatataggtgtctttttaggtttcctcactaaatataatactgacttttagttttatgtattacatatgtattttccatgttaaatatataattattcctgtttcattattgattcttaaaacattgatggatgtataagtttatcagatgtttttcagtggctatggatataatcgtaacatatttttccttgatatttttgcatagcaaatcaagttgattttattatgttggactagttttgaatgtcagagcttaactctacttgataataattgtggtatatttctcctttggtatgttcctagagactttcttttttattgttttcttgataagttttgcatgttatttcataagtactattaacctctagtattcatttatgtatgtgctatttctgttagtttttgatatcactgttaggttctctatgcaaaaataatttggaagcttctatgcttttaaacagttgaggtaactttaggattatctgttcttaaatatttgttagaatttataagaactggtactttccgaggaggttagctatttgacagctttctgtgtaccttgtgtgataattatcagatactgcttctggtgaagactttcctgttgtaccttcatggaattcataatgtcttacttggaatgctgataataatgtttatgtttttcttatacgtattgattttcgtcattaaattgttaaaaggtattaggataggaaccatctgtctgtttatcgcctcaaattctagcccatatagaaatatgttgacttaacaacttttcttctttctttctctttctctttttctgtttgttggtggtggtgggtgttttacaggcttcccagctggcgtgtatgttgtaaagagagttcttcagcttcagcgtcatcatattactctcaagatgacaactgcgcactagaaaatgaagatgtacaattccagaaaaaggtgccttaaataaagttaacattataatttgtgtgtcagctttctgagagtgtctgaaaacattcagaataaaagtaatttcaaaaatgccatgccataatttttggtggagattcgtatttttctttgctattactcaggtaattcttaaattatgacggctcagagatatttatatgtttattcttgttgcttgtagttggaattttgtaacatccttagtcctgtagtatagggtagtgcatgttcagagagctgaaaatgagtgatttgtttttaatgatctataatagagtttttaaagaaaccccaattttgcaaatgagaactattagaagtgagtattccagggagaatctacagtcagtggctttgtagtttgttttatgtaattaggtgcagtaaatataaagactccaaaaaacctcatggtcttaaaacatgtattattttaccattctaaatgataaatggagagtattgacttgatttggcttttgcctttaacttcagtgtatttatttaaaattactgaagtaatttatattggtataaaatatttattatttatgtctcattcctttccccaaaggaacaacagtctactatttcttgtgaaaacgtttggaccttgttctgtgggtatagataacacctttatatttgcccacaaattaatatttttatttccatgaaaatatcatataaatatattacaaattgccatcccccttcccctccagtgatagctcatatatcatcttttcatgttgatatattctgaatggctgcattttaatcttgttatatagacattatttatcagttgttctttattgacaaacttttgcattttgttccctgccatgtgtgcacacatgtgggtgtgtgtatcaacacatacttacaattacatacttgagggttttttgggcatatttagagtggattatttaaatttaagttatgttggatatatttctgggatggagcatttaaaattttgaagacttgccgcatatctcaaaaaaaactataattttatattttcacccacacagtatataagattttgatttaatcccccttttgatgaagcattttgcaaacaaatgtcataaaagtgaatttaagcaaagcattaagggggaaagcatgttctttcagtaaacatttagatacctagtatgagctagataggctcaggtaaacaaagattgaatatgaacttttatgaaaattacactctagaaggcataaaggtattagaaattctaacttgaatgtatgtcaaaaaagagatgaaagaaagagctttatgtatcttcatttgtcaggtattcattggagttttactaggtgcttacaacggtgctggatggtaagactaaaatgcttattaagaaatcaaatgaagttcttgaactggtgtattgcacattttaaatgttgtagcaatgaggggattcaaggaaatagacaataatcttgtatacaaatgaaattaattagagtcaaataaacaaggcagttttttggttttaaagtatggaaaaaaaccatcttcgtattgctttataactgttttgtaaaacagttttatcaggtgatttttgttgttgttgttatataggatgaaagagagggacctatcaatgccgaatcattgggaaaatcaggttcaaatttacctatttctccaaaagaacataaattaaaagatgattctattgtggatgtacaagtaagctatgtcgctttgattttcaataatatgtcatttcaaactactttacaagattgaaaacctttggtcaccatattgtgtgtgtattgttagttttttcactttgaggtactctgtaactggacttaagattacttacctgctaatagtactacttttgagaacatgtaaaattacagataataataaatgtgactagtctcttggtagtaaaagtttgagtataaatcctcatttcttcctcggttctattttggttcattatgatgtatcttgtctcttcagattttcagttgttaagaaatttttttctaacctgaatcacttggaacaaaagggagtatttttatgtagaacacagagtattttgataaccaggatttccacttattgtgggtatgaatagataatagatcaaaatatgttttttccctttttctctcatattacattctgaatattgtttattttgtgcaccagactttatgaaaaatactaaaaactagaatatatacaccataaactgatcagaatgctgaggtatctggaaaccatgtaatatcagtaatggctgaaggtactggggatattttatctgtaggcagaaggactaaggaaaaactaaaatctcgaatattaaaaaaagaacacacatttcaactcagaatgagggagaattctttctttttaaaaaaatacagccttggctaatttttttttcattttttattttttaaccttgtactttttgcaagagccagggctattttataacttactgagttatctaaagcaatagaattagtttcattttattggattctggaagacatttgtcaagggtttatgcataggagtaagagaaaaatgatacttgtagcccttacaattgtatgactatcctgaacactcctaccgttattcataaaacttttattatgatgtagttgtgctcaaatacttccgagtgcttaccatgtcttgtatacctatgttgttcattacagtagccactagccacatgtggccattaagcacttgaaatgcggctagtccaaattgaaatttactgtaagtgtaaaatacacattggattttgaagacttaattaaaaaatagcatgtaggccgggcacagtggatcacctgaggtcaggagttcgagaccagcctggccaacatggtgaaaccctgtctctaccaaaaatacaaaaattagccaggtgtggtggtgcacgcctatagtctcagctactcaggaggctgaggcaggagaattgcttgaacccaggaggcggaggttgcagtgagccgagatcatgccactgcactccagcctggggcaacagagtgagactctgtctcaaaaaaaaaaaaaaaagcatgtaaagtatctcattaatttttaaattttgaatacatgttcatatggtaatatagtatttgataataaggcagtagtcattttctcaaggcctccatcataaaaatgcagatgactatttatatttttttgtgaatttctcggtgtaaataattccccaaatgatcatactttatattctccggactgcgtgcctcgatgtttgtttgtgctcttgtactggccctccttttctttaatgcctagctcttctaattcatcatagtccttagtttctttttccttgagctgaacatgagtacctctcacttgatattcatttattgagcatttaaacacctactgtgcgctagatactgtgctagacactgggaatatgaggatcaagagaacatagttcttactgaggacatttatggtatagttgaagaagagagggagacatgaataatggcaattgagttgttatagatgcagtgataaaagtgtacagagaacactggaggcataggggaaagggagtagttaattctgtttagggttgatcttggaggaggaggtgctgatagaggttttcaaatatgaacaggtgttaggtagatttcacattgtgttttggaggactgaaaggcccaggtcattcaagactgaaggagcagtaagaatcatttattgcttcatggtgttacttgaacatatcttatatcgttgcttattgatacacattatttcctaaactgctcagggtcaagaactatgtattgtactgttttgtacatgtccatagggtttctttgttgctactatcattcatcaattagagaagagggaaatctctgtaggtcctgatgcaaagtaggaaataggtagggagaaagtgctttcctagtttatgaaatgccatgaaaaatgcttagggcctgtattttcatatgaaatgcattccttagggcggtaatattggaagaaaggatttttataaaagtactttttttagtgaacattgtttatattgtcatttttcagaaatgctttccataaatgcccgttctgctaaagagatgttatattaatctcaacatttaatttagctgacttgtttttttaaacagaatacagagtcaaaaaagttaagtccaccggtggtggagacactccctacagttgatttgcatgaagagtcttccaatgcagttgtggacagtgaaactgttgaaaatatttccagctcatctacctcagaaatcactccaatctcaaagcttgagtaagttgttacaaaaaacaaacacaaaaaagaatctccttagttagtgatagaaaaatttccttaaaagataaagcagcttgatactcaagtttgaagtttaggctatatagcagacctaaattacagtgcttgtgttttgtgtgcgtatgtgtgcatgcgtttgtgtgttttgaatgtaatgattttataacaagtttatttagctaactaactcaatgaagctgatagatcccagatatgaaatctctatatagtctgagcaaagtaaggttctacttaggaaacagtgcttatttgaattgaattccctataattatcaactcaaatgtcaggttattcatttccattaagtatcactgtcatttcattcatttttatgtcttcgtgtgaatcgctaactttttcaaactcgataataaatattcagagtgtttaggtttaagtgatccttaatttagaaaatttgttatgtacttctcctagcttcttcctgcagcagtccaaagaacaaaacaaaatgtccttctcttaatactacattaagcatttcctttatcaaatgagttgacataaataaagtgcaagaagaataactggtacataactcaagaatgtaagggcctgggttgaaggagttgcacaagatattatggttaccatttagaagcttgtctcagtatgggccagggaacagaagacatgttgagaaataatgatagtatttaaacttttaaatttaaatgattcagaaggaatttaaggctagatactatatatctgaagagtgaatgttatactcccattatattaaaaatgactggttaatgaaatggaggtgaggcagggaaaaataggaaggtttatattttaaaaacgaaattctaagaacaccttaaaattttagtgaaatgtcttgagataatgacttttgaaggatgccataagtaacaactttaatgctggtagaattagtatagtaatgatggaaattaaactttagagaagatacattgagaataagtaatttttaaaaatcttatttttgaaagaccaaatattaacctcatatttggtaagtagttatttagaagctgaggacaataacagatcaagtcagcaattgactttacatgatttaaaattttctttctttggtttacattatgttttggaaatcactaatagtgtttttaatgtatattacctcaagtttatttaattaccagattatgtttcttgtttctttttttagtgaaatagaaaaatctggtactattccgatagccaaaccaagtgaaactgagcagtctgaaactgattgtgatgttggtgaggcccttgatgctagtgctccaattgaacaaccttcctttgtcagtccacctgacaggtgggtaggagcagttgtttgtccttcttatgattctgtaataacagcagtgtcctgtttgaatggactttggtgtatgttaaattccactttgattgagagaaagctgatctctttgtgtttcttccttggtttactttgtgcatgagttcaaagaatttagattgtatagaatttgttatccagtaaaatctgtttatttaatatatcttttggttttaaacagccttgttggccagcatatagaaaatgtatcatcttcacatggtaaaggaaagataacaaaatcagaatttgaatcaaaagtttcagcaagtgaacagggcggtggtgatccaaaatctgcattgaatgcttcagataatttaaaaaatgaggtaggtatataacttgcactatctcttacttctttatgtaatgcatttttgttattagctaagcttataataatttgctaactatatttgtcataaaatcagggagattaagtagacaataacatgtggaactaacacgaactgtgctccctgagagcaagtgattctgtttccattatagtgtttatcacataaagttgtttcaagtgtgaactctctctggttatatattattaaatgattttgtgccacccacagctgtttgatagcagatacataaagtccttatttaatcatcttcttagaaagctatctagaagaaggtatgactaattacatttaattatcttcagaatacaagttaataatacaagattaaatttaggctcttcagtcagaactattttaatggaacattttacctttcattatttgtgtgcaaaatacaaccagaccaccttatattttagagtgtgattcttataattaaggcagggcttatcacagtggaacagttttactttcttttctccttctgagttctaccttgacttcatgcactgtagaatttcttgaagtagtatcaacacagcaatttaaacttccctcaggtaagcaataactaagttacagagatgaagtatattccataaacttaacaaaaacaaaaataaatagggtccatgagtagttcagtgtgctgactaccacatccatatttattcctctttaatttggggatcttttgttctctgctttctttttcacgtattttcagtgaatcttcacttacgactaactaaacttcattctggagactttcactatcacgggaccaactgttttgacgatgtttcttacaaatataggagctcaggatttcatagtctaacatcttgaaggaactacttttctcagtgataccaaatcacgcatatgttaaagtttagttgtcagatatcacatccatgaataaaattagacaaacgttaaaacacatctttgaaggtatttataataatgtcaaatgtaaaattcaagcatggcagctaactttgtcctagatttgcttgttctccttagcagactgaaatttctttattaccttagagacttaaactgtttgtgagtctatgctaatcggcaaaagagtagaattttaattaactgtattaattactttctaaatgaattagtatcccagaaaaatcatgacagataatgagcacattatgagtaatagccaatagttttatgtagtatctacttcagaataactctgtcccgttaagtttgtgtgagtgggagagaatttgctttctgatgccttgtgctagcctcttatttcaaggatctgtgagacactgattgccgtacttatacagagaatgctttccaaactgattttgttgtattgtttatagacagtgcattacaaagtgatttttattgtatttgttctcttatttgttgctaggaggatatagtgatttctttggctgggcttcaaagggtaaatgtatgttctttttgttgcagtttttgtatttgagctttactttgttagtatctcagctaggtaaatttttataagtgtatgtttcttgtttattttctcaatgtatctgatgcaggacaggcaagccccaaaattagtgcttagcccgggagggttcttggcttagcccaggaaagaattcaagggcaagccagtggtattaaacagcgactttaattgaagcggcagtgtacagcagcagcagcagaggtaatgctctttgtggagtagggctaccccataagcattgtgcccagaatagcagctcagaagcagttctgcagtcatgcttatatacaattttaattatatgcaaattaaagggtagtttatgcagaaatttctagggaaaaggtggtaacttctgggttgtcaggcagttgttatgggaaggggtagtaacttttgggtgttgccatggaaagaggtggtaacttccaggtgttgctgtggcagtggtaaacagacatagcacattggtgggcttggcttacagaaatttgcttccgtctgggacctgttttagctggtactcaatttgatctgatgtccaagacccgcctccagaattgaatcccaccttcccacctcattcctccctcagagattagatactcctccttaatcttaagaaggctgcacaaggacagagatccatcttctgtaactgcttcctgctgagtttacagtgtaggccctgtctagcaccagatgagtgaaaatctttggataactgataggggcccagagacaggatgagttggaagccttgtgctaacgttatctttacctggaactgttgtaatctaagacaaaactttgctaagaggttaaacgagcaaggaccaaaaattagtaacaagacagccttcaaaggtcccagaagaggtaggtaaaagccagttgagacttgcgaaggcagttttgatagttgaccagctgtagttgcaatgagtgccctggttatatctgtaaccaggtagtttactcatagatcttttgaatgttaatctcaacctgtctggagttgttcatataggtgcagcaggttttattaataactgcacatactctaccttgttcagctagtaaatagtccagtgctagtctgttattgagaaatacatttgccaaagagtctagggactcttgaattctctttagtgcatgacctgtgttggtggctaaggattctagggtttgagtcaagttgtttagggttcactttaagcaaagccacccaagggtactgctgccctgattcctgccagaattaatcctattgctcatttacttctggtgttactatgactgtgatccctgaaggggcaagagtggctaacatgtattcacctcagttccaagttttgatacataagggaaagctactcctaaaagagaagatgttgacttttaactattcagaattaaaaaacaaaaaacagatgactacctggggagtcaggagtggttatggggtgtaacttcttcccattcatggccacaaagaaaaatgagctgaattggggcacaaatggagaccctatggggtgtgatctttattctttgttgccaacttgagtctatagagatactttccccctattctaatgggggtagttgaacaatctttgttttctgaaagagggtggcaccgccaccttcccagactagatagttgtttttcccctgtatattctaatccaggagaagccaccatgtatggtctccttgctttcaagtggaatcccatttacctcactgcagcattggtatcttggcagctagagttgtattcagagcattgcagggaaacttctgctttagtgtcattagcacaaaagatgcagaaggtaggatcatgagtgcactggaggtatacatacccaacttcccaggtccaggtaatggtggggaggttcaggtggatttcattcagtggggggagttcattccacttatcaagtaagggtttgggtatttcaggattgctgtggttagttaggaggtctgtgggggatgtttgtgagattttttggataagtcagaagattgaaatctttatcctggggatgttgatgacgaatctagcaaccatgaaggtggtgccctgatgctataatttttgaaatatttactgtagaattatgtttctacccacaccagctcagggtaattgggagagcaaacaagattaatagtgacaacatgatatctgcggttgggccttagcatggcctctacacccaataaggacaagagaggtgtttcctaggaggttggctaaagtgatcgaaaagaagtattacactattttgctcccccagtgctcaaaagggttcaaggaccaatgagtacccactcacctctactcttgtctggcccagaacatcccctggctacaagtcccctgactccaagtcccctggccacagggttcccaccaagggacacaatggacctggggcaggcagcatactacctcagcattggcacaggagaaaataaaatctttgccattaacattgcatccagcaccttctgacaacaaggaggaatacaaaacaaaaatcaaaatctgtagccccccaacagactgaacagatgctcccttcctggccaaagggaatggatttgggcaggcacctaccagccccccaaacacttctaagcaatatcagagtcaaaaccaaaagccaaaataagttacacatcaataaaaaaacaacagcatagaattaagctatactggaggaaaacactgctcccacagacctctctctaagactaaacattttagcctcaggtcacaacagcagttgtagctggaggagaaaaactcacaggagctcacaaaaaaagctaaaagagttaaatgaatctgagaagctttcaaaagaatagattacaagattgaaaagcaaaatttctggtaatttagcaaattaacattttaagaaaattgggttttaacattttttttttttttttttttattttgagatggagtcttgctctgttgccaatctggagtgcagtggtgcgatctctgctcactgcaacctccgcctcccgggttcaagtgattctcttgcctcagcctcccatagctgggactacaggcgtgcaccaccatgcccatctaatttttgtatttttagtagagatggggtttcaccatgttggccatggccaggatggtcttgatctcttgacctcgtgatcacccgccttggccttccaaagtgctgggattaacaggtgtgagccagtgcacccagttagaccattctttagaaagtgtattgtaaacaatttccttttaattataccaagtttaatcatacacaaaatttctttttataaaagtctcctttatgaaccttgtcacgacataacacagaccctccacaacatgcttgaattttcttacttgtctgatatggtttagctctgtgtcgccacccaaacctcatgttgagttgtaatccccacgttagaggagcggccagatgggaggtgattgaattgtgggggtggaatttccccttgctgttcttgtgatagtgacttctcacaagatctagtttaaaagtgtgtagtgcttaccccttcactctcttcctcctgcactgccatgtaaagaaggtacttgcttcccctttgcccttctgctgtgattgtaagtttcctgaggcctccctaaccatgcttcctgtacaacctaagaaactgtgagtcaattaaaaattaaacctcttttcttcgtaaaacacctagtctcaaatagttctttatagcagtgtaagaacagactaatatagaaaattggtaccagagaagtggggcattgttaaaaaggtacttgaaaatatggaagtgactttggaactgggaaatgggcagaggttggacagtttggagggctcagaagacaggaaggtaacagaaagtttggaacttcctagagacttgttgaatggttttgaccagaatactgatagtaatatggacagtgaaattcaggctgaggtggtttcagatggagatgaggaactcattgggaatttgagcagaggtgactcttgctgtgatttagcaaagagcctggtggcattgtgcctctgctttaaggatctgtgggactttgaacttgagagagatgatttagggtatctggcagaagaaatttctaggcagtaaagtattcaagatgtggcctggctacttctaaaagcctgtgctcatttgcataaacaaagaaatggcctaaaactggaacttatatttaaaacggaagcagagtataaaagtttggaaaatttgcagcctgacttgtggtagaaaagaaaaacccattcactggggagggattcaagcctgcagaaatttgcataagtagagaggagccaaatgttaatagccaagaaagtgggggaaatgcttttagggcatttcaggcaccttcatggcagcccctcccatcgcaggccaggagacctaagagggaaaaatggttgcgtgggccagtccccgggtcctgctgctctgtgcagcctccggacatggcaccctgcatcccagctgctccaacttcagctgtggttgaaaggggcaaaggtacagatcaggccattgcttcaaagggtgcaagccccgagcctttgcagcttccgtgtgatattgggcctatgagtgcaaaaagggcaggagttgaggtttgggaacttctgcctagatttcagaggatgtatgcaaatgtctggatgtccaggcagaagtctgctgcagggacagagccgtcatggagaacctctacaagagcagtgcagaggggaaatatggggtgggaacccccaatccccagcatccccactggagcactgcctaatggagctgtgagaagagggccaccatcctccagaccccagaatgttagatccaccaacagcttgcaccgtgcacctggaaaagtagcaggcactcaacaccagctcctgaaagcagttatgggggctctaccctgcagaaccacaggggtggagctgcccagggccttggtgatgaatgagttcttgcgtgatctggttgtttaaaagtgtgttgcacttcccccttcactctctttctcctgcgccaccatgtgtaaaaggtgcttgcttccccttcagtcttccaccatgattgtaagtttcctgaggccttctcaactgtgtttcctgtacagcctgcagaactgtgattcagttaaacttttttttttttttcataaattacccaatctcaggttgttctttacagcaatgtgagaatggactaatacgttgtcctatactacctctttcttgaataactggacattttactttaggacaaggatttactatgcaagatttctccctcatataaaattactctttttttatatcctttgcaaaacaaagagaaaacattttctatccataacattctttatgtctctcttttctacctaatggtttccttatattttgaacttcccttttagtaacttccaaattaaacaaaacattttttcccaataaaaaatacatttctttagcacattttatgtaaacctagcaagaaatcctgaactgcctaccagacattagaattttatagatgagaatcattttaccatttttagattttataccatacaataagctcagtctattctattctgttctgatctgttctgttctgttctgttctgttctattctattctcatgccattttaatcattttaaagcctatgcacataagtaatttacctaggaaagggttgccaaagtggagacttcagaggccctgacttgctggagaacctacctggtagtggagacactgagaaaataggtagccacttgttgactgctgtaggtggctgtccatttgaggtcaggagcctgtgaactcccaattcctttgaccaagaggggcagttacaagcaaagcagttataagacagctcccaagaaggagttgcaactcgctgttaggaaaataatacttctaactttaggacagaaaagggcaagactaatacttccctagggagaggggctataacccacagtcctaaaggaatgtcaatgccaaaaaccccagcgcatcttgggtgcagtctataataccaatgctgtaaacccagagtgcctgcatttcagccaacgagggtcccttcaccaatgccaaaaaccctagtgcaccccgggtgcagccaacagtgtcccatgactgagttgaggtcacagaatgtgactgtggtgtcccagagtcaacacactggggggacctctcacaactaagtgtcccaccttaaataattgccacacacagttgacagaaagttaaaagcaaacaataagactgcacacattttaggattgaaaatgaaatgactggtggaataatgaactagaagggcaaggaccagtggaagaggtgctcaggatgtgtttcagggcacactaacgatgggggcttttaactgaccacttagccaaaggcttttgttccctagcttacctgataattatggggggtggtagaggggacacacccatccacagaagccaaaatgtgactggtcttccacatgggatttgggtcttcatccaggttccctcatctagagtgggctcagctgctgcagtgggaggggcttgcacaggggctggtaacctactggtctgcctgtcagagcagtgggtcccatatgaggcagtggcattatggccacttgctcgtctgctcagctgtgctgtctgccagggaaaatgatgactctcaaaagagcttttgattagtgttagagctcaggttttacagctctgcttagttacctctctggtcatctcacctgctgccatgtcttgctgtcttgttttgttaactgctgtctctcattgtcccttgctgttttcttgctgtttctctgactgccatctctcattggctcttgccaatcaccttctctccatctctgctgttgcatcatcttgcctctcctccagtcactgccatctctgctttcttcatcccttcgtggtcaccagatgattcaggacagggaagcccccaaattggggattagcccaggaaggttcttggcttcacctaggaaagaattcaagggcaagctggtggtgttaaacagcaacttttattgaattgactgtatacagcagcagcagaagtactgctctttgaggaacagggctaccccacaggcagggtgcctagagcagcagctcagaggcagttctgcagtcatacccacttttaattatatgcaaattaaggggtggtttacgcagaaatttctaggaaaatggtggtaacttccaggttgctggatccttgtcatggaaaggggtggtaacttccaggtgttgccatggcagtgctaaactgacaaggcacgctggtgggcatgtcttacagaaactgctcctgacctgttttatgtgggcatgcatatggttcggtgtcagagccctgcctccggagtcaattgagtcctgtctccttccttatattcaaactagatttttattatctaattgaaaaaattaaattagtggtaatactagctcttttgtctttttctgccatgtattgttttaagtagccatacacttcatttagtaaatcaacttgttctgtaaagcactctaaggtggaagttggatggggaccaaattgctgtcttcctaaagggaggtttggaaatggctctacttcctttgaagaaaagaagaaatagtcccagaagttatggatatttcatgttagtgctcaaaagcatgctcttatgtagcaaatataaactaaatgagacttatattgtttaccagagtttcctatctaatagattttgtacacttctcaatatagtgttagtgaacacatcaaaactttgttttaggaatacagaaatgattcaataatggaataaatgtctgtattcattattcagtttaagaggaaaaaaagtcacaagattggatgcccttcctcagtattccttctcttgtcttcagatataaccactgtcttgaatttagtattttttttgtttagttttagagcttttcaaataagtataaataatatatattatatggcatagtttaatataaatgacattcttaagtaacattttattcaacattgttttgagatttgttcattgtttccactgctctgtttatagtgactactgcagttcatccattcctcatttaatggatatttaggttattatttttggtattaaaagcaatgctctaatgaacattcttatgcatatcttttggacacacatgagtgttttcacttagatttatacatggggtgtatttagggattatgcacatcttaatattgttaaattttaaactccttttagcatagatttctcttggctcaacagatatttcacacttggccacagactatcacactttaaactccattagatttgtataatttatgtcagcatgccccaacccccaggccacagaccagcaccagtccatggcctgttaggaaccaggcgcacgacaggtggtgagcagcaggtaagcaagcattatcgcctgaattctgcctcctgtcatatcagtggtggcattagaatcttatatgagtgtgaaccctattgtgaactgcacatgtgagggatctaggttgtgcactccttatgagaatctaatgccttatgatctaaggtggaacagttcatcccaaaaccatctccctgccccatccatgggaaaactgttttccatgaaactggtccctggtttcagaaaagttgtggaccactgatttatatgatatctcaggctttcatttggattccatgattattactgaaattgtatttctttttacaaatttattgattttattctttgcttcccacccaccccatccccttatttgatttgctgatactctttatacttaataataattctttgttgactgaatgtattgcagatacttctctcagtgtgtgacttattcgtccatgtcatttatggttaacctaaccaaatgtatcagcttttaaaaatgatttatgcattctgcatcttattaacatgatttataaagatttttaaattttcttctaaaatgtaaagttttgttttttcacatttagaatttttaatttgccttaaaatttttgtgtacacagtgtttctttttaaggatattgtggaaataatattaaaacatctaaaattatctagcttcctttaatggatgtattaacttatattttaaggtggatgcatggcaagtatacaatttattcatttgtacaggctatatatgagtaattgtttgctttagagttttataaattatttttttcaacgacctatgcttatatcacttaacaagtgaaggaacacatcctaaaaagaatgtttaaattatctcaagagaaattcaacttttaagtaaaccaaaacctttctttttacgttttttattttttcaaaatataatcattcattataaattggaactttaatttgacagaaacatttgtatttatttctaaaatttatttgtattatttgaaagttgaagtcttcttactttttggtgtttctttcagagctctgattatacaaaaccaggagacattgaccctacatcagtagcaagtcccaaagatccagaagatataccaacatttgatgaatggaagaagaaagttatggaagtagaaaaagaaaaaagtaaggaagtatttgagttctttaaattttttttttaagtatatggtgtagtttaatatgctttctttttttgattggtaaaacaaaataaaatttacttttgaaaactttttaaaggtgaaacttaaccaagttgctgttgatccatccatccatcatgtacctgtatataattacatacagttttagttttaattaaaatccattcttgtaaattattaagtgagcataaaataaggcatagcagtgattttcatcacaatacgaggaaaattgaggcatggaaactattttaaaattcatatggaactcaaaaagaacttgcataaaatccttgggtttaaaatattctttaacttaccaaaaggtgttttacatatgatgtttcaagaacatacctaaagaaaagcttgcttatgttatgaggcagaggagggtgactaaaattataatttattccctgtgtgatgggttattaggtgcagcacaccaccatggcacatgtttacctatgtaacaaacctgcacatcttgcgtgtgtaccccagagcttaaaaaaaaaacaataaaataatgtaagaaatacatccttaatagatgtttataatagatataaatacagaaagctttgattctcatggacaagcttcattttgtgagttatgttacttagacataagtaatgtagaattttgtagttaatttgttttggggggatattttaagctattgaggtggagcactttgatttttttatgaatttttaaaatattctctcaagtgttaaaacctattcttttctagaagacagcttattgctttggagatcagtgttgctagaggtattttcagtcataatcatcaaatatatatataaatatttataataacggtttgtctgcaggtcagtcgatgcatgcatcttctaatggaggttcacatgccaccaaaaaggtccagaaaaatcgaaataattatgcctcagtagaatgtggtgccaaaattctagcagctaatccagaagccaaggtaggtgtttaaatataaaattttgtatatataggaaattaacgactttttaaaatacaggttatttgtttactgggaactatattttaatgtgagatattttccttattcactaataaaagcagaatatgcttttcaaaacattatcttgtatgaattcttacttatattggctgatgtattttgccctgcattttttaacttttaaaaacccgtatgaaattttaaaaaggaaataactaaaatattatttttttctttaaagtaacaggcattgaattttaaatgtatcattgtaacactaatttaatgctgttgccgtgaatggtgaatcttagccacttttatgcttttttcccaagtgagtgttttaaagtcttaggtgtacttaagatctaaaaatacagaagtcccagaaaactttaaagttaaaataaatactttcttcattattccttaagtaatttgtttcctttcctctttttaaaatagagcacatctgctattcttatagaaaatatggatctttacatgttgaatccttgcagcactaaaatttggtgagttatacacaattttaaaaagtacattctacatatatatgcatattatgttaagcttttacattagggttacattgacatataataatttaataagcttttatgattgattagtgctgatactatgcaaaactgaggacaaaatgccttcctttccttttgaggaggtcacaaaaagcaaaaaatggcagatctggttaaacaattatgaaatggtataaaaagtactgttgaaagggtgttattgaaagagtgatgatgcgtaactgcaagaggagatgagagaaggcttcctggaagaggtaattcctgagctgaatcttgaaggattaataggaagtggcagatgaatgaggcagaggtattcaggaactgtaagaataaggggggtactgctgccatctcggcacactgcagcctccctgcctgattctcctgcctcagcctgcggagtgcctgcgattgcaggcgcgcgccaccacgcctgactggttttcgtatttttttggtggagacggggtttcgctgtgttggccgggctggtctccagctcctaactgcgagtgatccgccagcctcggcctcccgaggtgccgggattgcagacggagtctggttcactcagtgctcaatggtgcccaggctggagtgcagtggcctgatctcggctcgctacaacctccacctcccagccgcctgccttggcctcccaaagtgccaagattgcagcctgtgcccggccgccaccccgtctgggaagtgaggagagtctctgcctggccgcccatcgtctgggacgtgaggagcccctctgcctggctgcccagtctggaaagtgaggagcgtctctgcccggccgccatcccatctaggaagtgaggagcgcctcttccctgccgccatcccatctaggaagtgaggagcttctctgcccggccgcccatcgtctgagatgtggggagcgcctctgccccgccgccccgtctgggatgtgaggagcgcctctacccgggcgcgaccccgtctgggagttgaggaacgtctctgcccagccgccctgttcgagaagtgaggagaacccccgcccgggcaccgccccggccgaaaaattaggagcccgtccggcccgcagcccccccgtttggggaagttaggagcgtctctgcccgggagccaccccaatcctggaaggaaggtgggggggtgagccccatgcccggccagccgcccgtaatgggagggaggtgggggggtcagccccccgcccggccagccgccccgtccgggagggaggtgggggggtcagccccccgcccggccagccgccccgtccgggagggaggtggggggtcagcccccgcctggcaagccacccggtccgggaggtgaggggcgcctctgcccggccgcccctactgggaagtgaggagcccctctacccagccaccaccccgtttgggaggtgtacccaacagctcattgagaacggaccatgatgacaatggtggttttgtggaatagaaaggggggaagggcggggaaaggattgagaaatcggatggttgccatgtctgtgtggaaagaggtagacacgggagacttttcattttgttctgtactaagaaaaattcttctgccttgtgatcctgttgatcggtgaccctacccccaaccctgtgctccctgaaacatgtgctgtgtccactcagggttaaatggattaagggtggtgcaagatgtgctttgttaaacagatgcttgaaggcagcatgctcattaagagtcatcaccactccctaatctcaagtacccagggacacaaacactgcggaaggccgcagggtcctctgcataggaaaaccagagacctttgttcatttgtttatctgctgaccctccctccactattgtcctatgaccctgccaaatccccctctgtgagaaacacccaagaatgatcaataaaaaaaaaaaaaaaaaaaaaaaaaaaaagaataagggggcagtgctaaaaaggagtatgtttcttctgggtgactgttagatattacaagaagaaagatacaatgagagtaggggtggaacataagcctggagcattcgtttatctataagtaggccatccagtgctgtgtatacccagagtgttacatgtcatgggtatttattttccgccaatgccatgctatatgcagttttatattatgcacatggaaccatgcttttaattttttcctaagcagcaatatttttggcatctttccatgttaataaatgtaaatcttagcatcattttaaaaaaaaacagctttattggggtatagttgacatacaataaattgcatgtataataaactacatgtcaaagtgtataatttggtaagttttgacatttatgtatctgaagccatcaccacaataaagataacaaacatatccatcattcccaaaagtttcatcatacctctttgtaatttctctcaaactctcttcccccacagcaattacagatctgctttctgttactataaattagtttacagtctctagattttttatgtaaatgaaatgatagtttctggtaccagttttaatggctgcttagtatttcattgtctggatgaaccataatttgttaattctctttgctaaatatttaacttgatttccccccctgcccttatagactgtgtgtacttcgatatagcaaaatatatatacaaaggtggacatctgaagccttgaatccttaagataaatttctaagaactaaatcgaagactatgataactttttaagacaatgtatatgccaaactatcctctagactagtcattttacactatcactgtctgttcttaagaaagtcatcccttctccaagaatgagtgttatctaaaaaaggaatttttaaaaaaaaatgatggagcaaaatcaatattgttttatttacaggtcttttccccccactaatggtatcctttgggaagtatttaaagatgcttcttatagacaactaaggctacataccctcctcttaacattttaatgagtaactcttaatggtagtctaatttatggaaactgttaatgtcatatttaatatgaactgttattttgattggtttaagtaattgtcttttgttctttttgaaggtttgttattgaactttgtgaaccaattcaagtaaaacagcttgatattgcaaattatgaattattttcttctactcctaaagattttctggtttctatcagtgacaggtaaattctaaagctgtttctatagggtctatgttggatctctgaaaaaaagaaaaacaaaaaaacaaaaaagtgggtcacattttgacttcagtccatttattttttaaaggtcagtttgtaataacaacgataatacgactgtattgtaggctcttgttaatcacttaccttttaccttcattagctcatatgctttaaacataaccatatgatattattctcttataatgtggggaaacagaaaaggggagattaagtgccttgcccaggtcacatgacttgtgagttttagaaccaagattcagaactacaactctgacttcaaagtcctcacttgcagtcattatgctgtcttgtttctaaacatttcttttaaaagttgttaaaaacatacatgtgtaggtgctttatgaggtatatttttattaaaatatattctaaaactttttttgtacatgtgtgattataaaagaaataaatatatgttgtgaggaatttggaatagaactgcattttgtcaaccagagatagcccttattagcattttaatatatttcttccagtctttactatgcacttatttattaattctataaaaatatgtacttttacatcctggaaatactctttagtcttttacacgtatcatttttaatgtgtacacattattttttgttcaacagagatgtgaaatcatttcataaatactttttgagtgtccacgatatgccatgtaggatgctgtttctttatggaactgttattttgtcatttaatcattaagggttttccttggtgtttcttcctccacctcacactcagcactgcatatatacagtttttgaaatcggttctcaagacctcttgagaattctgttattctgccgctacccttgctcagttcacttctttttctctcagctgcaattttcttatatgtcaaatgaacatacacagctctgataagtaaagtgtatttttttaacgtggtgagagggctcattattttgaggagttcttataatgtttcagtaaacagatataatagttttagacttttatattaaataccaaagtctcctttaaaggggaatagatatgtcaaactcagatgtggttttaaaagttttttcttcccattctctttccaccagtacttgtatttatactttacattattacacacatgtcagtatgtgaagagctgtgccaccttcttccaagacagtctcttggtgactttctgttataaaacctcctcccaaaccccaagaagtggtactggtcctactttttgttaatggtgtgatttttcaaggcattctttcctggtaaagagaaacccgtcagttcagttggaaaagaaaatgtattaaatgtatgtatttatgtattaaactgttaagtcagcgtgttcacctggaaaggaaaaaaattatattttgaaaatatgatagaacctttcaatatgtggtttataatttttaaaaaagaacatattgcttatattttttagatatccaacaaataagtggattaagctgggtacttttcatggtagagatgagcggaatgtacagagtttccctttagatgaacagatgtatgcaaaatatgtcaaggtaatgtttacacatacaggactatgttctataatgaaaatatacgtgttattcacactttatacacctcatctttttagaaatcagaaaagttaagaaatagactacactataccacttaatagataattcttacttgggtatattatttcatgaatcaaatattgctacattcccttttgcattgctggaagcctaggccagttttttgttatttatggccctgataaaattccaaattataactatttaagttttttgagtctttatgcaaaatgtcatcttcatagtatatttctttctattttgaaactgaaatcattgctggtcactgaagtctttaaagcagatgtaatttcttgttagactctgattcttagaccatttcatctttaacgtccacttatttggcattgttacagcttttgtctttttctttgtatagccaaatgaaatattctgtgtccaagtaccaattgcaaataaaatagagttttaaacactggtgttttatatttccactgctgcttctaccaactaattaagtaaaattatcacttttgaattgggttagacaaaatagggaaaattcttactccttcctttcctcttttttttctttaaaattatagccataccttaaagtactattgaattaatattatgacatttttggaatggcagcagttctaatttctatcctttcttctttaaatgtgagaacttatagctacctaattttgtcttctgtgattttaccatctctttttaaagcatgttttaaattgacttctataaataggtaaacttgtagtattcttaatctcagtataaaaatgctaaattctatttttaaaataaagttgatattctcagttaattcaaaattattagttcaaaaaaattaaggaatgttttcaattccttctaaaatgagtactgaaacaattacttaattttttatacagtacactttcttcactctgaagaggcaaaaacgttaaaaatcatttgctaggtgataaaatcgtatttaattttggaaggatattttattggaaacataaagaatgccttataaaactttccaccttgttccttttatggtgggagattatacagcattttaaatattagttttataaaaaaccttctttggtagaattgagtctaaaggcaagaaacatttacttacagctcatgaaaagcagagaaaaattactttctgattttcattttatggtaataatgttatataagttttttacctggatgttccttatcttaaaataactacacccaaatctactactttttaatagcatacattcgaaaggccaattggtatatatcttccacttctgtaagttgtacttgaaataacatagcataccaaaaattcatactttccccgaaataagttgtatataatatacaagtataaatatcattccataatggactgttaccaatatgtatatgtgtagaatatatatgtatatgtgcatatatatcaatatataaattcatatatggatatatacttgatacatgtctgtaatacttaaagtaaaagattgtttctagatactgtttattaattgcttttagaatgctttctatctaacagctatataaaataacagcaatggcttgtagattagttaacttataaccttaaagttaatttatttcattgcaatcatttagattatactctcaggtagtgatggcaaaaatttaaatcattgcttttatttctgcaaggaattaagaatactacagtgttatccatcacatgacattactctctatactttatacaacataatttacaaatatttaaagatgcttattgcatgatgtctagactttggaactgatttctttttcttttcctttctcttgcttcagatgttcatcaagtacataaaggttagcaaccttctcttttgcactattaaataacagggcatggcgtattaatgcattacaaaaactttacaagtattgattttggggaaaataaggactttatagaaatgtttagaaatgttataatgaaaaaactgagtatattgttagataatcttacatgctctctgctggcttcccattttatgtgcttttattctttaggttgagttgctatcacattttggatcagagcacttttgtccattaagccttataaggtaatgcagaacaaaatacatttattgagtttttaaaaaaattgatatacaaaattttcgatatatttaaagtgaagaaataattttctcttacgtgagttaataccatagaaataaaaactgtgaaacctttcttttgaatgcattttggaaaaatgtcaaaatatcctcttttaaaaaaaaaacctcattttgtatatttgttttaacttgcttgctattttgctatgatgataatacacagaaacgttttagactgatatgaaaactcatccatttaaatgccttaaatagattagttttacattttaattgaaacagtagatgacttaaatgtaaggagcagccattatttttgagtccaaaagccagtggccctcaaaatatgaccaaagttgatgtttgtcatttattgtgaagagattagtcttaacgagtgttttgttttggaagtctttaatgaaattgttgttgatagggtatttggcactagcatggtggaagaatatgaagaaattgctgattcccagtatcactcagaacgccaggaactatttgatgaggactatggtaagtgacatcaaacagatgactgttaggtatattttttttactttttaaaaatcgaatagtaatgggggagtatagcttacttaaatcaatatgactgttgtcttcaggcttttgttttgttgtttttaactctaatcaacttttacttaaatctgttttctaatatgattgctttgtattcgtattgctttccaagcttatctatcacttatttgtaactgaaactcccttctataacattaatggtataaattatgattatatccctatgccagggccaaaaatctgttaaactcacaagatactgaaatagtagaaatgagctttaatgcctgtgatttcccatgagcctaagagcaagcacattttggcttcctgtgagccattgagaaatcctgtgactctaaagagttagaggaaagttttatgacactctccatttcctctttaagtccttattttaagatgtgttaaactattgtttgaacaatctaaattttctcaagagtgaaatgaagacattgactaagagttggtaaagtatattgaaagcttgaataaaaacgtcttataaatgtggttaaaattttggtaagcattacagttattttccttggtttatatttgtttgttaaatggtttcttaatcttacatgctttttgtgaacatgttttagatatatgattcatatttatcataaaatgttttaaatgtcagctgactttgacaggacataatttgagcttttaaatatgttaccattggagctagatctcagcataattacttttattttcgtttttaacagattatccactggattataatactggagaggataaatcctcaaaaaatcttcttggttctgctacaagtgagtattttgaggattttctattcattctactactttttcattctgacacacacagacattttgtcatggtatggttgaggagaattctcccagtgttgaactttgagttgaaataaaagatactgtcttttgaaaagtatttttatagaaatgcgataagaatatatgaaaagaaagaggagagagacaaatgcaatcgtaataaaggtgtttcttctactctaattaggcgctgacattttgggacagattccttatagtgaagaaagggctatggattttcttggggaaagaattattaaaacagtcataccacagttaatctatgggtatggttagtttgccatttagttacaaaatataaagggtgctcctaccatcatgataatgaataccaataagaatactagtaataatatactccttgtaaactaagaaacaatgaataagatatactggtgctttagtttgttgttattccaaagtcgaatcccaacctagtggtaggctcactaaggagactactagaaagaccattacctgactgacactttatttttcatggttagattctgtgtaggtatatttcaatgatgtttttgattatttctgaaaaatgtaaaattaactacaagtagttttctttttatttgaaaattattaatcaaatttaataaaaacaaatcttagtaaaatcgaagactagttgcgtgtgcttgtcactttttgctcttagtgaattgaattgttgaataccgatgtctgtgaacattgactttgtaagttttttagctattcaaccagtagtctaaatacttaggttgatattttgtgtagccacagtatatagagttaaaattacctctttcatctctccttctagccttttctttctttctttcctttcttttctttctcttcctgccttccttgccttccttgccttcttccccctccatagaagagtatagacctcagtggactttttaggggatgggaaaaagagtgttaaaaatacctgtagaaggaaaatcttttgtgattacaaagtaatattcaactttattacatatcagttcagtatattttgttttactttattgctaggcttctgactttctagatattagtgattacttttaaataggattcctagctatctagttattgatataaaaataagtcttattcactgctatgtgatgtattttttaggagtgaaagaaatgtcttatctgtctggatattaatgtttttgtttcccttaatttgcattttatatgttacatagtagtcattattctgccatttatgtagctcagtaatgttgaattagctctgaggaagcattattattttatggggtcagaaaatagccccagactaaaagatctctagcttctggtaggtactggaaaaaagaggacaccttaaggaaataatgtcttattgtagtttcagataaaggaaaagtgtgttgatattctggattttcttgctatatcttcctatgtggttaacttctagatgccattaaaacctaaccataggccaggcacagcggctcatgcttgtaatcccagtactttgggaggcctagataggcggatgacctgaggtcaggagtttgagaccagcctggccaacatggtgaaaccccatctctactaaaaatacaaaaattagccaagcatggtggcgtgcgcctataatcccagctactccagaggctgacgcaggagaatcgcttgaacccaggaggcggaggttgctgtgagttgagatcgcaccactgcactccagcctgggggacagagtgagactctgtctcaaaaacaaaacaaaacaaaacaaaacaaaaacctaatcatatatcaggggaagacatttccctgtttgtattcatgtctctgatcagtatatcaattaattagacatagaatcttgtttagatacttctgtttggatctttctccttgaaggtatatcacttaattttccttttacagatctctgggagggcaaggttatcttccagtgttctaggtattgaaagaatttatacagtgagataagatgggtgggaggatgtcagctgagtctctaaaatgagatttaaaatgatctccacctcctgaagttttagaacaagagaggcagtaagagctgagtgataagactttattgtcataaaactttatagacttggcctaacactgctgccttctgtatctgtgtccttctactcttctctgaagtttgggactgaattagctatagcctccaaggtggtataacttgaagaagtaaataataaagtggaatcagaacttcagtagttctgattcaaagaactggtctttggcacaagaatgtcttgagtttgactataatcatcactgctttctaaattagcttgaaattggcccattttgaaactagttttttttcttgtttttaatgtgtacatagtatccacaagctagaattgtctttaatcttaatagaaactccttttctttttgctctcaagtagttactagttataggaaatatgtcaccagaatactttgcctgtgctgagagttggatgtcaaagagcatccacactgcataaacattcttgatattatataatttacttaactactaaaaagggagaagctgttatcttagagcagcattcttggctttgtgtgtatggcttcctgattcttttgtttacattcttgaactaaaacatttaaatcttttacatcagcaagatttctccatatcactctgattttcttgttctttgtcatgtgaatttgccagacctctgcctactttgatattggcgcaggtctgcctttgctcttaaatatgtggttttggtttttgttaaaatcaccctatctgctaaagggagataggtgcatgtgcatgttgaagagaaaatgtagtttttacttctcaagtattttttgtggaaaaaaagtagatcctagaaggaccattttcctagaaaatgtgggcatgcttcagagatagtacacataggaggaagtctttttttgttggtttatcttctgttgtattatataaactcttcaacttcagcagcctggaaaaatgtttgttttctttatcaaaaagagacattggagcactgaagactgagtaaataatatggagatatttggtctttaggaccaaatattaggagcattttattcctaaaggaatgaggcgggatgaataagttgcccaattcaaaaatttaaaagttgactaatccaggagaaattagggatatttatctctagtttggcaattatattcaaagatgtcattttagtctattctgaaagttttttaatggccagataatcatggtgtatacaaactatcatgtgtttagatacaaattgaaaatagaatagaatattcacaattctgctttctctcaaaagacaaaaaagatacattaggcagtgttctgtaaacatgggaaaattattttaggttaaatgggctgagaagaaatttgctaaattttgcttttgttaccacgtttcctgaaatgatgataataaataatattttaaaagggtgaatagaaggatctttattgtaggtactggtgttaaaatttaggttcagaaataatactgtaaagctactttctttacacagattaacacatttatcttcttgaattatttaataatgaatgtcaaaaaattcgaaatctcatataagatctcactttgaaacaaagtatataaactgttgattgcacaatttgggttttgtgaagcagtcagttttgactataggtggcagtgtaggtggggcatcataaataatattgcagtattggttggcattataaagggtgtatgaggaaataacagtttccattccagacttcatcttggtttatgagggaatacggagtttccatttttgttatctcataccgcagcatctctttagcttaagtaagaattaaggccacttctgtttatcagtttgccaggtcaaagggcaatattaaaaatgttatttaaacattttaaaatggcaaatattgagcctttgtgtgttacagtaatgattagaaacaaagtaccactgctttgttgactttcagcgtatacactcataatttcgtgaagatcaacattatggctgattcctagctatcactttaaagcagtttgaaatctgctactatttctcccatcctgaagcatatatttacaggatgagctccaggcagcactctttggtttacttgcaaccttcctgatgtagtagatttttctctcttagatccttttctacttttcacatctctggttttcattgaaaatatgatgaatactctgtggatcgctttaggaagggagattaagacagaaataatgtatgatgattaatatgtagcccctgccagatcttagtattttaatagtaggagtatctgataccaaagaattaacttctagtggaatttcaaaggttagactgggaatgaaagttaatttcacttgaaattacatcacattactggaaggaaggtcttctattcccagtaccattttttatggagttctgatattttgttatgctcatgtataaatatatctatgtagatattgaggtttgtaccacttttttcatgtaaatatcctccttcaaaagagaagtagggttagcaggtatgcaaattgctttttacaacactttgttttatgaccttgacttttcattaatctgccccatacctgtccccagccaattaactaaagaatttgtatgctttatgatttaaaaagattgctgttttggtcaatgagttttttaaaagtcatcaaagagatttgattctatgcaatatcaatttagaatttaaccatattaccatagatatgataggctaatcattgaaaatgttttctgcttttttttggataatctctgttttgtttttacctgtgataatcacataatgtaggaaaagcatttgcttttttacacttttttaaaattttaaactgtagagaatttttaaagaaaaataggtttttctgtaaaataagaattttggtcatcacatttttttccctgtcccagtacagactgtatgttgagttatacttgagtttatagtatgctgaagacagtgttttggtaaagtgtctagggaagttttacaagaaaagtatatttaaggccaggcgcggtggctaacagctgtaatcctagcactttgagaggctgaggtgggcagatttcctcagctcaggagtttgagagcagcctgggcaacacagtgaaaccctgtctctactaaaatacaaaaaattagctggacgtggtggcatgtgcctgtagtcccagctactcgggaggctgaggcaggggaattgcttgaacctgggaggcagaggttgttgcagtgagccgagattgcaccactgcactccagcctgggcaacagagcaagactccgtctccaaaacgaaaagtatatttaaatataaaattccttttgaacataaaaatttagatacacactttacacttttggctaaaatttatttgtgtcctatattggactttagttgtgaggtgaatacaaaagtaaccagtcaaaaaatgcaaaagatcattctaaatgattttttgactatctgatattaatttatattagaatatttaggtatttggtactttttctgattgaattttgttttagatgccattctaaatatggtgaatattgctgctaatattctgggagcaaaaactgaagacctgacagaaggtacctaatcattttatgggtcttttaaatagctggtactccagggatccttatatttaggaaaatcaagtaatgagttaagaaaatttgattgtttacatttagaaatatagaaataattcagaggaacttaccaatctttattattcattgtttatttgaatttcacaagttctgttttataaaagaatactgtctatataaaacttatgaatttgccttttgacttctcctagctctaatattaatagcaatgattttattccttatctctttaccgagattttgatgtcctaatggtacttcaagtatgttattcttttatgtgttaaatagctacttgatttagaaagccatcttttccttagagaatggcagatgataatatttttggcaagaagaaacagtcttgcctttttgtttttttaaaaaatgcttagatccaagtgaacacttaaaatgactcatttatttcctctcatttaacaactctttcagtatctagaaggcatattaatcacgtaaggttacacaacattcatagtcacctgacttgatttaattatctgagaaattgagaaacgatatatattacttgtgatcttatatgatcatttcttcctaaaagaactttgattttttaagaaaaagtctgcagtagcaaacctatttggcttttttcttctcttccaagaaatttgttttagtaaaatattttcatggtacagcttttaaaattgaactcaacattgggcatctttcttaaaataggaaataaaagtatatctgagaatgccactgccacagctgcacctaaaatgcctgaatcaactcctgtttcaactcctgttccatctcctgagtaagttataatgtgatattaaatagaattttgttacaatggagagataagtatattagtataaaaaaaggaatttgtgatttgtgtgtgaaatgattacctgtagagagctctgaatcataggatagacattctgtggccacttagaaaatctgagttgcttcttcccattagtgtatatgcatactgggaatataattcagatcaaactttttttggggggggtattatatattactttcattattcacaacagtgactcttttccatactggaaataattgaccttactctgcaggtataggcttgaggacaaattttaaaggcccccccttttttttattaagttcaagtttaaaagcattgatctgtggtatccctagaaagctaccaaaatacctagagcagtggttcttgaataatgtatttgccacacagcaagctcttaactgttccatttctctgaatcatgtaggcctttccccaggttgcagtggggacactttgggcagggatgtatctaaataggtaatagatatatcttttaccttttttgtcttttctgccagaggtggttacttttgttggtacctctacttcttacctataataaataataagcttataatgatttggataatcaggtagttattgtagacttaatttatgtatatttcattagatacactccctacaaaactttgcaagtcctttatcttagaacaactctacttaaagagtataagatatttgaaatgaaccacttagttcaagatagtatgtaatgagacctgcagtgggtatgctttgaactgcaattcctgagaactatactatttcaaaaatgatattttgatgctttgaaaggcatagtgagaaaattatattatcctgtgttaatcctgaaagttactggagatatttattgggtaattagaaaatatagcgtatgtgttattgattctgaaaaggacctaagaaatctattggggatagagacattcttggtgtttctaattatgtggagctgtgattgctgttcctgattttgtaactaggtttcttcagttaacaacacgctatgtcgtatttttcaaaactaaataaaactgatttggttttttatatatatatgtacacactttcatacacatatgtgcacaagtagataggaatatttgttgaaagctgtagtcacaggctaacgtagcagtttttatttttccatattagttttttaatagatatttttgcataatttcttattcagtatttcttcatgtttgtcttaaattctttttaatgcttttgaagtaatcttttgaagcaaatatgtgaaaatgaaggaatccatgataggatgtcactgttaaagttacggaaagccaacttattttcttttcctaggttttagtaggttttgccatgtgaatttgagaaaaaacttttaaagtatatttctgattacagtgtgtatgatgggatataacatctgtattcagtattttttaccaaattcaatataatttttctctctccccttcttcagacattacttgtttttactgtcataaattatttggtagaaaagcaatatattacctgaatatgtaagaaatattattagagactaaatatatatggctataaatatctttttatttaccgaagtgtagtctaattatgttttaatttggtccatttactgttttactaccaaaatgaaagtctacatcatagatactattttattactttcttctgtctttgctattgtgacattagtctttatttgaagacatttcctggcatgcttagtaatttttcagaatgggaaaatgtgtgtttgagcataattatttttggtattgaaattaccatattttttcatattggactttttatgtataaggctacacccagtaattaactatctttatcttggaaggaatcacaagcattataatttataacactgtccccataagcttcatccccccactctcctgtatgccacatacatactccacagcctcaaaatgggatagaatattaatagtggcactagtagtttaatagcagcactgttagcatatcataagccagaattgttattaaagtggttaggtatttggcttagaagattagcctagatgatagcaaaattattttaggaagggagatatgtttcttgtccttaaagtagataatcctatgtgtgtaggtgtgtgtgtgcgttgtgtgtttaatgctgtattggagttcctcaaatcattcttagaaaaattatgtttgagaccaacctagctgccttttgaaaatagggtattcaagtacaaagtgcactcataaatattaagaatcctagattctagttttagctctggaccttatttaagctagtttattaagctagctcttagttggcttaatttctgatgtgtaagggatagtgaagcttgtaaagattcagtgaatatttatgagaggaaaggaacactacattcagtgaatggaagtattcacttagaaacaattcttaaacagattaaaagaaagcaagtttgatatggtaaatatggtggtttgagtcatctggctagtcacttgataaatagtatttctcttatcatttctgagcagtatttgtttttataataaaagtgttttgtaggtgaaacatttatccaaaaacaaatttcttctatatttccaaccttttatcttctgtatggatacatttatttttctttaacatatttcaactttagacttctaagtaagtgatttataattatgatatatgtatttctaggtatgtaaccactgaagtacacacacatgacatggagccgtcaacaccagatactccaaaagagagtcccattgtacagttagttcaagaggaggaagaggaggcaagtccatctacagtgacccttctgggcagcggtgaacaggaagatgaatcatcaccctggtttgagtcagagacacaaatattttgcagtgaactgaccacaatttgttgtatttctagtttttcagaatacatatataaatggtgttcagttagagttgctctttatcggcagcgcagccgaactgctttgagtaaaggaaaagattatcttgtgttagctcaaccacccttactacttcctgcggaatcagtagatgtttcagtattgcaacctctgagtggagaattggaaaatacgaatatagaaagggaagctgaaactgttgttctgggtgatttaagtagtagtatgcaccaggatgacttggtgaatcacactgtagatgcagttgaacttgaaccaagccattctcaaactctttctcagtctcttcttttagatattaccccagaaatcaatcccttgcctaaaatagaagtatctgagtctgttgaatatgaggcaggacatataccatcaccagtgattccccaagagagttctgttgagatcgataatgaaacagaacaaaagtctgagagctttagttctatagagaaaccatctattacctatgaaacaaataaagttaatgagttaatggataatattataaaagaagatgtgaactccatgcaaattttcacaaagctgtctgaaacaatagtgccaccaataaatacagccactgtacccgacaatgaagatggggaagccaaaatgaatatagctgacacagcaaagcaaactttgatttctgttgtggattcttcttcattacctgaagtaaaagaagaagaacagtctccagaagatgcccttttgagagggttacagaggacagctacagatttttatgctgaattgcaaaattctacagatctaggatatgctaatggaaatcttgtacatggatcaaaccaaaaggagtcagtatttatgagacttaataatcgtattaaagccttagaagttaacatgtctctcagtggtcgctatctggaggagcttagccaaaggtaagctttattatgaattagcacagtcagcttcacacagtgagttaagcagcatagagtatgacctgtgattacaggagaggatttaattatctcatgatataatagaggtaagcgcaattttagcaagagagagaaagaaagctacttgaatgctgatcagtgccttaatgaattgattttttgtttttaattttaaaagtactttccagtgacaaaacacttttattaggctggcaacaagtttgaattatctatactcactttcaccttttttcggttgcttaactttagccactttttctgcttgattcccagagggctcatggaaaaaaatgatagtatatagaccttaaagcttttagtggaatttgaccagatatcacttaagagtttagataagtgaagacagagatggactgaactggatgattgggcacatttgcagtttgctctcttttaaacaggtctcggcatcctagttctagttgtaataatttctgcttttaagtgccagagacagtgccaattcattaagacaccaggcctggctttttaaacctatttactcttttttttatcctctgtgtgtccattgtctgtccttagggcttctctaccaacgttttgcaaacatctaggcacaagtgtccagagttcctgaaacaccaccttttcttacatctcttaaattgaaatgccactaataaggtgtcaccaaggcagtcttatatctgaagtaggaaatttttctaatccatacatagaattaattggctaatcatgtgtgtgtgtgtgttcatgtgtaacatgcccacttagctaccccatacctgctcttacttttccctacctccatctgcatcccaagggaaccacagaaattactaaattttacatagcagaagataaatagaattgtattgcataggcctgaataagagtcactttcagaaaaatagatttgtctcatatatcaaaatcagaagtatgtttccattactaagtggaataagtaagaaattaaagctgatttagaccaattcttacttcataggtaccgaaaacaaatggaagaaatgcaaaaggctttcaataaaacaatcgtgaaacttcagaatacttcaagaatagcagaggagcaggttggtttctacatcccttatttactttttatataaatttccactgaattctgtagggtctcactggtaaacagtaagtattgtagtttcactttttccccctgctagctggtgtttaagcctgttatattaatgtgatgtcatgtttggaaagttacatagctattagcatcattatcttctgtagagaaagatttgtttaattttttttttaattatacttttaagttctagggtacatgtgtacaacgtgcaagtttgttacatatgtatacaagtgccatgttggtgtgctgctgctgtacccattaactcgtcatttatattaggtatatctcctaatgctatccctcccccctccccccaccccacaacaggccctggtgtgtgatgttccccaccctgtgtccaagtattctcattgttcaattcccacctatgagtgagaatgtgcagtgtttggttttctgtccttgtgatagtttgctcagaatgatggtttccagcttcatccatgtccctgcaaaggacacaaactcatcatttttaacggctgtatagtattccatagtgtatatgtgccacattttctttatccagtctatcattgatgggcatttgggttggtttcaaggctttgctattgtgaatagtgccacattaaacatgtgtgcatgtgtctttatagtaaaatgatttataatcctttgggtatatacccagtaatgggattgctgggtcaaatggtatttctagttatcaatcattgagaaatcgccactctgtcttctacaatggttgaactaatttatactcccaccaacaatgtaaaagcattccatttctccatatcatctccagcatctgttgtttcccgactttttaatgattgccattctaactggcatggatggtatctcattgtggttttgatttgcatttctctaatgaccagtgatgatgaggtttttttcatatgtttgttggctgcataaatgtcttcttttgagaagtgtctgttcatatccttcacacactttttgaggggtttttcttttcttgtaaatttgtttaagttctttgtagattctggatattaactctttgtcagatgacggatagattgcaaaaatattttcccattctgtaggttgtctgtnnnnnnnnnnnnnnnnnnnnacatgaactcatccttttttatggctgcatagtattccatggtgtatatgtgccacattttcttaatccagtctatcattgttggacatttgggttggttccaagtctttgctattgtgaatagtgccacagtaaacatacgtgtgcatgtgtctttatagcagcatgatttataatcctttgggtatatacccagtaatgggattgctgggtcaaatggtatttctagttctagatctctgaggaatcgccacactgtcttccaccatggttgaactagtttacagtccaaccagcaatgtaacagtgttcctatttctccacatcctctccagcacctgttgtttcctgactttttaatgattgccattttaactggtgtgagatggtatctcattgtggttttgaattgcatttctctgatgaccagtgatgatgagcattttctcatgtgtctgttggctgcataaatgtcttcttttgagaagtgtctgttcatatcctttccctactttttgatggggttgtttgattttttcttgtaaatttcagttcttcgtagattctggatattagccctttgtcagatgggtagattgcaaaaattttctcccattctgtaggttgcctgttcactctgatggtagtttcttttgctgtgcagaagctctttagtttaattagatctcatttgtcaatttcagcttttgttgccattgcttttggtgttttagtcatgatgtccttgcctatgcctatgtgctgaatggtattgcctaggttttcttctagggtttttatggttttaggtctaacatttaagtctttaatccatcttgaattaatttttgtataaggtgtaaggaagggatccagtttcagctttctacatatggctagccagttttcctagcaccatttattaaatagggaatcctttccccatttcttgttttggtcaggtttgtcaaagatcagatggttgtagatgtgtggtattatttctgagggttctgttctgttccattggtctatatctctgttttggtaccattaccatgctgtttttgttactgtagccttgtagtatagtttgaagtcaggtagcatgatgcctccagctttgttctttttgcttaggattgtcttggcaatgtgggctcttttttggttccttatgaactttaaagtagttttttccaattctgtaaagaaagtcattggtggcttgatggggatagcattgaatctataaattatcttgggcagtatggccattttcacgatattggttcttcctacccatgaacatgggatgttcttccatttgtttgtgtcttcctttatttccttcagcagtggtttgtagttcttgaagagttccttcacatcccttttaagttggattcctaggtattttattctctttgaagcaattgtgaatgagagttcactcatgatttggctctctgtttgtctgttattggtgtataggaatgcttgtgatttttgcacattgattttatatcctgagactttgctgaagttgcttatcagcttagggagattttgggctgagatgatggggttttctaaatatacagtcatgttatctgcaaacagggacaatttgacttcctcttttcctaattgaataccctttatttctttctcctgcctgattgccctgggcagaacttccagcactatgttgaataggagtggtgagagagggcatccttgtcttgtgccagttttcaaagggaatgcttccagtttttgtccattcagtatgatattggctgtgggtttgtcataaatagctcttattattttgagctacatcccatcaatacctagttaattgagagtttttagcatgaagggttgttgaattttgtcaaaggccttttctgcatctgttgagttaatcatgtgatttttgtctttggttctgtttatatgatggattacatttattgatttccatgtgttgaaccagccgtgcatcccagggatgaagccaacttgatcgtggtgggtaagctttttgatgtgctgctggattcggtttgccagtattttattgaggatttttgcatcaatgttcatcagggatattggtctaaaattctcttgttttgttgtgtctctgccaggctttggtatcagaatgatgctggcctcataaaatgagttagggaggattccctctttttctgttgattgggacagtttcagaaggaatggtaccagctcctctttgtacctctggtaaaattcatctgtgaatctgtctggtcctggactttttttggttggtaggctattaattattgcctcaatttcagagcctgttattggtctattcagagattcaacttcttcctggtttagtcttgggagggtgtatgtgtccaggaatttatccatttcttctggattttctagtttatttgcgtagaggtgtttatagtattctctgatggtagtttgtatttctgtgggattggtggtgatatcccctttatcaatttttttgcatctatttttttcttctctcttttcttctttattagtcttgctagtggtctatcaattttgttgatcttttcaaaaaaccagctcctgaatttattgattttttttttttgaagggttttttgtgtctctgtctccttcagttctgctctgattttagttatttcttgccttctgctagcttttgaatggtttgctcttgcttctctagttcttttaattgtgatgttagggtatcaattttagatctttcttactttttcttgtgggcatttagtgctataaatttccctgtacacactgctttaaatgtgtcccagagattctggtatgttgtgtctttgttctcattggtttcaaagaacatctttatttctgccttcatttcgttatgtacccagtagtcattcaggagcagattgttcagtttccatgtagttgagcagttttgagtgagtttcttaatcctgagttctaattcgattgcactgtggtctgagagccagtttgttataatttctgttcttttacatttgctgaggagtgctttacctccagctatgtggtcaattttggaataattttgtggtgccgaaaagaatgtatattttgttgatttagggtggagagttcagtagatgtctattaagttggctcagtgcagagctgagttcaagtcctggatatctttgttaactttctgtcttattgatctgtcgaatgttgacagtggggtgttaaagtctcccattattatgtgggagtctgagtctcattgtacattgtaggtctctaaggacttgcttcatgaatctgggtgctcctgtattgggtgcatatatgtatttaggatggttagctcttcttgttgaattgatccctttaccattatgtaatggccttctttgtctcttttgatctttgttggtttaaagtctgttttatcagagactacgattgtaaccccctgcttttttttgttttccatttgtttggtagatcttcctccatccctttattttgagcctgtgtgtgtctctgcacatgagatgggtctcctaaatacagcacactgatgggtcttgactatccaatttgccagtctgtgtcttttaattggagcttttagcccatttacatttaaggttaatattgttatatgtgaatgtgatcctgtcattatgatgttagctggttattttgctcgttagttcatgcagtttcttcctagccttgatggtctttacaatttggcatgtttttgcagtggctggtaccaatcgttcctttccacttttcgtgcttccttcaggagctcttgtaaggcaggcctggtggtgacaaaatctcacgtttgcttgtctgtaaagcagtttgtttctccttcacttatgaagcttagtttggctggatatgaagttctgggttgaaaattcctttctttaagaatgttgaatattggcccccactctcttctgacttgtagagtttctgccaagagatccactgttagtctgatgggcttccctttgtgggtaacccgacctttctctctggctgcccttaatattttttccttcatttcaactttggtgaatctgacaattatgtgtcttggagttgctcttctcgaggagtatctttgtggcgttctgtgtatttcctgaatttgaatgttggcctgccttgctaggttggggaagttctcgtggataataccctgcagcatgttttccaacttggttccattttccccgtcactttcaggtacaccattcaaatgtagatttggtcttttcacatagtcccatatttcttggagtccttgttcatttgtttttactctttttttctctaaacttctcttctcgcttcatttcgttcatttgatcttcaatcactgataccctttcctccacttgatcgaattgtctactgaagcttgtgcatgagtcacgtagttctcgtgccatggttttcagctccatcagatcaattaaggtattctctatgctgtttattctagttagccattcgtctaatcttttttcaagatttttagcttctttgtgatgggtttgaacatcttcctttagctcagagaagtttgttattaccagttgtctgaagcctacttctgtgtacttgtcaaagtcattctccatccagctttgttctgttgctggcgaggagctgcattcctttggaggagaagaggcgctctcatttttagaattttcagcttttctgctctggtttctccccatctttgtggttttatcttcctttggtctttgatgatggtaacgtacagatggggttttggtggaatgtccttcctgtttggtagttttccttctcacagtcaggaccctcagctgcaggtctgttggagtttgctggaggtccactccaaaccctgtttgcctgggtatcaccagtggaggctgcagaacagccaatattgcagaatggcaaatgttgctgcctgatccttcctctgaaagctttgtctcagaggggcacccggccccatatgaggtgtcagttggcccctactgcgaggtgcctcccagttaggctacacgggggtcagggacccacttgaggaggcagtctgttcattctcagatctcaaactccatgcttggagaaccactactctcttcaaagctgtcagacggggacgtttaagtctgcagaaatttctgctgccttttgttcagctatgccctgcccccagagatggagtctacagaggcaggcaggcctccttgagctgcgctgggctccacccagttcgagcttcctggctgctttgtttacctactcaagcctcagcaatggcagatgcccctcccctagcctcactgctgccttgcagttcaatctcagactgctgtgatagcagtgagcgaggctccgtgggcatgggaccctccgagccatgcgcgggatataatctcctggtgtgccatttgctaagaccattggaaaagcacagtgttagggtgggagcgtctcaattttccaggtaccatctgtcacagcttcccttggctaggaaagggaattccctcacccttgcacttcccgggtgtggcggtgccccgccctgctttggctcacactccatgggctgcacccactgtccaacaagccccactgagatgaacccagtacctcagttggtaatgcagaaatcacccgtcttctgcgtcgctgatgctgggggctgtagactggagctgttcctattcggccatcttggaaccttccaagaaagttttctttagcattattcatagtacattgtgtgtgtgtgttaaatagaaacatagaggactttcctgcaactttgttaaactctaaaatatttttgtttgtattttttttaatgtagataatcttattgactgcaagtaagaacggctttgtttcttctttttgatcgtcataccttttttttccccctatctcttggctagagccatatagtgatacaataggactggtaattatgaccgttcccctatcttgctgattttaagggaactatttcagtattgcacctctagtgtgatatgtgtgttgtcacataataaagaaattttacacttttctaaaaggttatttgggtctcggggatggtgaagtgaggaggccttatactgcggagttttgttaggtgcatcttactttcctattcatggcacgttataaattggagatacactttgcaaatattttctcccaatccattacttgttttcttattctctttacagtgtggtttgaagagcagaagtttttgatttgttgaagcccaatatatcagttttctctttgctctatgaaatatttgcctaacgcaaaatcacaaagattttttcctttgttttttctagaagcttaatagtttagttttatattaggcccatgattcattttgagttaactttgatgtgttacagggtatggatcaaagttctttttggaaagtcagggttagaagagcaaagcatatagacatccatttgttctagaatcattcgttggaatgagcgtcctttctccacagaatttcctttgtatatttgataaaaatcagttaaccatatatatgtgggtctgtttctgggcttttgttctattgatctgcttgtctatctttaaggtaataacacaatgttatgtttgttgtagctttatattaacatttttagtcagctaatgttaagtcctccaattttattcttttacaagattgttttggctgtagtagttttttgcgtttctgtgtggattttaggctcagcttgttaatctctaccaaaattgaatcttgattgagattgtgttgatgaatttatagattaatttgcataatgtcatcttaatattaaggcttctgactcatgaacgcagtgtgttatttagctttcattagtttgaatacgaaagccccttcctctgtattttctctttgctgatatgtagcatctatgtcttgtgtctcaaagacttatgtgagtacttttcaacaatgttgtatattaatagtattggaagttaatcctgattagaagtgttaatcaacttactaactttaatagcttgtcctttaaatgtttataactgtcttgaattcatcagagtcaaatgtaagtcaggattcaaaagaaacaatttaaaaagtcacatttagcattttggaaagatgaagtaggatagaaagtaccatagtggatcacagtaagggaagtaagtgaaatattttgttacagttttatacaccccccctctccacacacaggtacacagctttttaaaaaagtttttgaatcaaaatatgaaaaacttaggtctagaataataaatagctatgtagatatttcatataaggtcctaaaagagttttagatttccttgacttcttcctgccctcgtttcctcctccctaactttattaaaagttcaaattttcgaccatcctggctaacacggtgaaaccccgtctctactaaaaatacaaataattagccgggcatagtggcgggcacctgtagtcccagctactcgggaggctgaggcaggagaatggcatgaacccgggaggcggagcttgcagtgagctgagattgcgccactgcactccagcctgggcgacagagcgagactccgtctcaaaaaaaaataaaagttgaaattttcagttaaagtctccctaatacagggtcataactatgattgtgatgtagaattccctaaagtatgcatacaaactatattataaataagacatctttgttgattataaaagtttctaaaattcagtgctgcctaaaacagatggaaagataggcatttttgatgcatttctttcattggtgatattttagcattggttggatgaacaattatggatatttcactatgtaccatcctaagttccaatataatatgctatgaaggaaatttttaaaacttggttttgggcctactttataaccaaaaaaattcttcagaaaattttcaatttgtctttgcgccaactgctttgctttaaaaacactgacttcttaaatatttctggttatatgctagtttatatatatggaacacatgttaatttgaaaagtaatttaccaaattctgttatacagtatttcacattgtagcagtgggtgacaaaaataaataaataataattcttgttggggagggttagacacggtcccagatacttcgtgttttgtttatttctaaaatttctgttcaaagtttacttactcattgagattcctattaatacatttgttttggaataacttaatggttttttttagattatttgacttcaatttataatgttaatagtttgtagttaatattcaaaaaaaaataaattcctttatcataggatcagcggcaaactgaagccatccagttgctacaggcacagctgaccaacatgacacagcttgtttcaaatttatcagcaacagtagcagaattgaaacgggaggtaattgttattgctggtattgcgagacccaatgcatgtatagaggttgtcataaagccaggcttgttaacatgaacatggtacctaaaactttgaccaaacaaaattgtcatttgtagtgaactttttcaaaaaccagaatatggcatttttaagttttgaaaatatattatcatagtcttttgtaaaatatggctttcataatttaggccatacctataatataggtataaaacttctagcaggccttttgtaagcattgatagtagcaacacgtacttcattttcaattcaaaaaggcctataaagttgcttaacaaagcaaacatttcattgatttaaaaactttttattgagcatctagtgtatgtgaagtgcgagctgtacactcctaggttgtggtatacggtagttaatagtccctggcctcacagggtttacgtcctgggggagggatagaatacatttagtaaataaataaatagatgataatttctcctagtgatacgtactatgaagaaaattaaatgtgtgtgtgtgtgtgtgtgtgtgtgtagggtggtagcagtaagggatgctgctttagttagagtgatcttggaaggcttatctgaggaggtggtattacaactaagtactcaagaggagttagcagccacacattgcctggaatgataacaaacctgtttctagcagaactagggcaaaggactggagagtagaaacagtgtaatgtgtttgacagcagaaagaaagctggtatggctggagcagagtgagtgagaaaagtgaagctgagaaatgggttcaagatattggcagaggcctggtcatgtaggacttcgtagacaatttagagtttgaattttatttgaatctttgtatcattagaagtattaagaagtgatatgggtcatgtcattaatgcttagcactttgagaagctctccatttgttgctttgtggagaactgcctgttggggaacagcaggagcagaagcagacaggaaaccaattaagaggtaattgcaggccaggcatgatggcttttgcctgtaatcccagcgctttgggtggcccaggtggtcagatcactcgaggtcaggaggtggagaccagcctcgccaacatgatgaaacgccgtctcttctaagaatacaagaaaattagccggtgtggtggcatgtgcctgtaatcccagcaacttgggagcttgggaggccaaggcaggagaattagttgaacccaggaggtggaggttgcaataagccaaggtcacaccactgcattccagcctgggcaacagagcaaggctctgtctcaaaaaaaaaaaaaaaagtaattgcagtagcctgaatgaggtggtattgacttagagtaggattctaaaagtggagaacagtgtaaacttgttgaattcagaatatttgtaagttgtagaaagataagccttaaggaactaaggttgatctctaagttttgggcttacgtaactgggtggttgatagttcattttataagatgggaaagactgggtaaaagcacaattattttttctccttgaggaggagatagtgtaaatggaaagacaaacaaaatgtgacaaaatgttaacaattggtgagatagataaaggtgtaaatatatttcttgttttatttctaaaacttccataggtttcactcctatagaaagaattggaatgctgcaaagaattttttttctttaatgtcatagtttattttcaaagagcatgccctgcatttctggtctttgaagcacattaaaaaaatacttaaaatgatttgtcctttgaattttagatacccttatatttttcctaatatgatttcctatgattattatttaaccctcttctcatctcaggtttcagatcgacaaagctatcttgtcatatctttggttctttgtgttgtcttgggactgatgctttgtatgcagcgttgtcgaaatacttctcaatttgatggagattatatttcaaaacttcctaaaagtaatcagtatccaagccctaaaaggtaatatcagcattatatttcacaattttattttttttactatgctttgtatatttttgagaaattttaagcaaataaagggagactgaggtaatttctttccctatatgattatcttgaaaccaaaacattaaaaacatcattcgatagtaagatggtcctatgcctaacctggctctgtagactataatagagaaaacactaatagtaagtgcatgaaacccctgaaatatttggttgagaaagatgcttaaatgtggaattcaaaggaagaagagaatactattttaatacagtaccttttagacaaagatctctaaatttttttttccacctgtattagcaataactggagtgttagagttagtcccgtgtggtatgtacagttctcaataacctctgtgtagcctcaacaaaagagtaaattatatgtgctttactcgttgtaaccaatatgtatttttcctaatgtgttaggtgtttctcttcctatgatgatatgaatttgaaaagaagaacttcattcccactcatgagatccaagtctctacagttaactggcaaagaaggtagatttctgtggatatataatatgtatatataaacatgaaactagcttctggcataaatataatgtcagtgttgtgttcatgaccatctgcaacaaaaaatggatacaagtagcctttgtctttgtgctgtgtcaagccactttatcattttcacattttatatctgtctttgttcctaaaagcccagagggtagggaggggggcttagtttaattagcagttggtagctttgtttgcacatgctcctgtttagaagtatttctttttagaaagggatgtttgagaaagttcaacagatatggaaaacctgaatgtgctcccatagcatcctgtgcttttctgcctcctcttcttatacaggtaggaccccttttgtctctagtttaggactatgaggcactttctgaacaaaaatctggtctcttttttttagctccagaacctataattaggttccattgtctaacactaaataaatacttacatttaaatgaatggatgtgtactgagtggatattttcctatttcagtatcttgtaattaatgcatattaatagaattagaaatttgttttcatactaatattaaaataactaaattaattacatattttatttaggagtgctttcttaataatcgatggttgtaggatttagtaactgagtagcatgtttcaattgattaaattattcaagtaatcattcctgggcttcactgttttattattatcacaaagctttacagacttaacccattacatgtgtttacttaaagctagtaaatctcttcttcctccttgcttttttctttttcttttggttgatatgtctttttataagtgaaatttttaatttaagtataattatgtgtaaaacgtaatgaattttcacaaacaatacagctgtgcaaataacacctaaattaagaagtagaacatgagcacctcaaaaacttccttgtgctcttttagtcactgcccatcctttcccagagtagccagtattttgatgtgtaaccattgtgagattcaccatgccattgactataggcatttgtttattttcgttccttatagtattccattatataggtatactgtacattattcatttacatttagattattttcattttgaggttgttacatacttttggtaaacacctgtgcatttctgttgggtatacactggaaatgggattggtgaatcatagggtatgtgtgtgttcagctttagtaaatactgtcatacaattttccacactgttttatgaatttgcccttctatcagctgcgtatgagagttacagttacttcatattctaaacattccttatttgaggtatacccatgcaattaggaaatacgttagatttttgcttctcagcatttctagtcttaagtgaaatcgtgactatcttactatttctcttctctttatccaattttttagggccaaacagagtagctttttgcacctgataatagaattacttctattttaaacaacagtgtcatcttggtgtatctttaccagtaaagaaagttgagtagagtaggtaggagactgactttagtcctgattctaccaatagttaattcatttatttcttctgttgtttgataagttcttgttgttatggcatttatcatagtatgctttgattttacctatttttacttgccttattttcacttctaagctctgtgggagagaccatgtctttttcttattgtgataaaaagcacataaaatttatcattttaacagtttttaagtgcacagttcattagtagtaagtatagttacattgttgtgaaacagatcttccgaatgttttcgtcttgcaaacctgaactctgtgtccattaaccaattccccttttctccctctctcagtccctggcaaccactattctattttctgtttctatgaattcaactacttcagataccccatataagtggattcatacagtatttgtctttctgtgattggcttatttcactcaacataatgtcctcaaggttcatctacattatagcatgtgacagaattttttcctattaaagggtgaaataatattccatccattttatttatgtacctcatttcctttatccattcatctgtaagtggacatttggattgcttcccctcttggctgttgtttgagtagtgctgttcaggggtatacagatatctctttgctcattttttagttggattgtttgagttttttgtttttaagttcagggaattctttataacctccgttatggattataacccccattagataatatgatttgcaaatattttctttcatcctttaggttgctttttcactgttttgattgtgtccttggatgtacagtttttaagttcaacgaagtcccatttgtctattgtgtttttgttgcctgtacttttgggtcatatccaagaaatcattatcaagttcaaggtcatgaagcttttcccctgttttcttccaagacttttatagatttatgtctttaatctattttgtgttgatttttgtatatagtataagataagggtccagtttcattctttggaatgtgaatattcagtttttccagcaccatttgttgaagagactgtccttttcccattgagtggtctttgcacccttcttaaaaatgagttgaccacgtacatgagggcttatctctgtgttctttattttgtgccattggtgtatttgtctgtgtttatgccagtactctaccactttgattactatacctttgtaatgtgttttgaaatctggaagtgtgagttatctaacttcattctttttaaaattattttccttatttgaggtcacttgagattttatgtgaattttagggtgaactttctatataagcagtgtcgttttactagttcacttgcagattattttggattttcagtgaatacaggtacgtatactgagaacaaagacagttttgttttttcctttgcagtccttatagcttttatttcctttgctttcttaactgtgttagcttgcattttcagcaatgttaaataaaagtgattgacaggcatctttgtcttgttccaaagggaaagcttacagtgttttattgctaagattgtatttgtcatagatgttttgtggattttttattctgtattttgtcattatgtgttacctattgtcataggtattctataaatttttttatattatattttatttccatttttaatgttacaaacatgaattatattagattttctaatgttaaacttatattgcatttttaataccagttgctcatgatatacgtgtgtgaattttgtattgtatatattatttctacataattttgttagataattatttagaaattttgcatctatatgaataagattggcatgtaatattttctcatgttggattttggtatgtaaggtttataaaaattagatgggcaggggtatcccttttaattttttttttttttccccttccatgctttcattaagattttttattggggaggaagtaaatattccctttactgccattatgttggaagttgtgtactggttctgttcttttactagttaccctagaagtcagaagtattaatgtttgccaaagtctcaagttcatcaatacttgtatcttctccttaacaatacatagatcttaaaactcttatttgtcccaagccttatttatgttactgttcttgtatattttaattctattctttctgcttaattttaactcaacaaggtatttctttttacacttaatgttcatttaaatttaccccacgtttactaatgtttttattcttcagagctttcatttgtcattagttaaaactgaaatattctcctcttctttttctttatcattttgagattcgtgaggctctttggagctctggatttgtaggtttcttttacttgttattgagaaattctcaaccattattttttcctcccagatattccctgtgccccagtctcttttagattctcatatttaattaaacatattacttctccgtatatcttccctgtcttgtaaacattccacctttttgactttttatgctgtattttggatgatatcttctgatgtgtttccaggccagcagtcttactgttgcaaatttattcattgggttttcaatttcagttattttttccatttccaggagttctttttgtattttttaaaaatccaggtctgtattttccttgttatatgtttcctgcagatattttcaagcttattttctagacatattaagcataattatctttatagtttgtgtttgataaatctaatatcttaaatttttgtgagtctgttcattgtctttgtaagctcttactcagggtatgttgtgtctttgtgtgctactttttctctttgaaaagttatttgtagggataatttgaggcctagaatataggttcttatttgagagggaatttgtgtgtgtgttacattcatgtaataccttacattcatgacttgtggtttgttgggccaccaggtgatgataatttggactgcaagttcatgcatggcttcattctttacctgagaatatagtcctttggagtctcagtttactgtacacagggagatggtatcttattacactaaactttgggtgggccctaggacctgatttctgatccattcccttatgataccatcagaaccaaagttcatatattcttgtgttggcaaatgttttcagggcaaaaatgacttttgtcttctacttgactgtccgggttcccacttttctttcagttttagcctagggattactttcttggcagcttttcaatgcttttagtgattttttttaaaaaaaacaaactatcattacttagttgctttcattgtagaggttgatctgaataacataactgtttctagaaatagacatcattattaaagaaagtaaattaagattagtaatctggtagaaatgactgtttagagggatgttttgatattttcatatatttgatgactttctcaataaatctctgaaatataatgtaaaaaattataattggttgaattgtattaataaatttcccaaatgtgtagagcttctgtagtgaatttactatgtgtaagcttttgtctctgtcagaccttaaattgtttatttttagtggattgaataggactaaagtctcatagccttttaaaaatgtgtgtctattttgtcagtgtgggggtggggttgggatatatcttgaagctgcttagagtaatgaaaccttagaaactttgggctaaaactaataaatctaatttactcactatgccagaagtgttcattcattattgcttagtgatatatattgcatgttcaagctgtttttagattgggatttcatagttttgatcatagtaataaacagagaaaaatatcttggatctctttttgtgtttatttctctaactggcttccaaacacggtcacgactacttgttgcacattgttaatctacctttgtgacacagtttagaggctagtcttttagggaagtattcaaatgatctgtaggtttggtgtgagcttacccaggaatgtttcttttcttatcaggtaaaagagtgaggctgggcccaaagaaagatcgttattgtattggttgataaccagctactagttaacaacttaaggaagtatagttatttgaagacgaccagtcaagcataggaatcatatcatcttccaccttgcctctttttgcttactaatttaaaatgcataaatatatagttaacctgatacaaattcattggttctattactagaggataataaggaatgaatgatttgtcttattttagtgtttaattatagcaaatccaccaaatccactttacattttacatctgcttttttttttttttacttacagtagacccaaatgatttgtacattgtagaacccctcaagttttctccagaaaagaaggtaattgtttatttctttttaagtttattgctatgttttgtgataataaatgaagaaaagaggttgaaaggtttaaggtaattacctttaagtagtccttaactgaatgtttattttctatcatgataatgttgtaaataaatattaacaggggtcagcaagctgtgacccacaggccatatgggccatgagccagataggttttctcatttttaaagagtgataaaacagaacagcatgcaagagagaaaatgtgtgacctgcaaagcctaaaatatttactgtctgacccttcacaaaaaaaatttgttgatccttggatgattgtcattatttattaccgaatgcatgccaagcacagagcatgcaccgttcctctaatcctcaccacaacctgaagatgatgttatcctcatttttttttttaataaaaaaacagcaactcagaatgtacttaggattttttggcttcaaagtctttgctttttcattttgcctttcaaattaagttatactaattttagttgtaatttcatctaggtgaaagaacttgggctttgtaggcaaatagcctaagattcattctcaacccggctgcttactacattgtaacttgggcaaagaaccaaacatctgaaccttgcttttctcatttaagaatcaaggataaaataccgacctttcagggttaatagctgccataatacatgaaagcaacctgtatgctctctggcagttagtaggtattcagatattagtatcactccctaaacctatattcataggtagcaggtaagcaatttaaagagttttgattcagtagtatttacaaaatgggaagatgatgctagtatctatatagaacataacaatgtatgtgttctgtgctgtttataatactgttttacttttcaccaggaggtggcacttctctattagctcagctctctaggtgtttgataaggttactatgggaagtatcattactaacttttcttttacttgtgttgtagaagaagcgctgcaagtacaaaattgaaaaaattgagaccataaagcctgaagaaccattgcaccccatagccaatggcgacataaaaggaagaaagccctttacgaaccagagagatttttctaatatgggagaagtttatcactcttcttataaaggtcctccatctgaaggaagctcagaaacttcatcacagtcagaagagtcctatttttgtggcatttcagcttgcacaagtctgtgcaatggacagtctcaaaagacaaaaactgagaagagggctttaaaacgaagacgatctaaagtccaagaccaaggaaaattgataaaaactctaatacagactaagtcgggatcattgccgagcctgcatgacataatcaaaggaaacaaagagatcaccgtgggaacatttggtgttacagcagtctcgggacatatctaaaattaattgaacttttcatacagaagacttttttgttgttgttctttgaagaacagtctgtagtatttgaagggtttgggggagggagaaaatattaatgggaaaggcattcagaaattatggtttctacctttttaaaaagtagatgggattgtgtcaatcttggttaatgagctacagttttacaaagctgatcacttcctataaggacaatggtagacattttataaagatgttttttcacaagattaattactgggacaaaagtaatttggaagcccagttccttaggtgggataggaatgaaagcctaaacctcttcctttagctttgttcctatttcttgcaccttcccatatttatgtgccttttgtctatttataatgccactggaagaggagggataactttttctgttatttgatttcttttataactttgttaggtttttgaagctgcaaacactacaatgctttgagggggtctgtgcctgaagctcaggagtgtggatcagacagtctaaagatcctaaaaacttgccaactggatctttgtttagcaaactcactggaaatgaacacttaatggaatttttaagtctgttctgttaggtagatggtgatgctcttgttattttcacttattcagactggattacttcttacttagttactaactcaatgaggaaaaatccctacaggatctttttttgcaaacaactgatatatgcagacaaatttttgacaaattcaccttttaaacacacttaaccatttgtgaaggttttctttagcttacattttaaacatacacaataaacactaatcctccaaactttcactgtttttattagtatgaatataaaatttgaaggtttggccaattagtacaagtctcatgatataatcactgcctgcatacatatgcacagatccagttagtgagtttgtcaagcttaatctaattggttaagtctaaagagattattattccttgatgtttgctttgtattggctacaaatgtgcagaggtaatacatatgtgatgtcgatgtctctgtctttttttttgtctttaaaaaataattggcagcaactgtatttgaataaaatgatttcttagtatgattgtacagtaatgaatgaaagtggaacatgtttctttttgaaagggagagaattgaccatttattgttgtgatgtttaagttataacttattgagcacttttagtagtgataactgtttttaaacttgcctaatacctttcttgggtattgtttgtaatgtgacttatttaacgccttttttgtttgtttaagttgctgctttaggttaacagcgtgttttagaagatttaaatttctttcctgtctgcacaattagctattcagagcaagagggcctgattttatagaagccccttgaaaagaggtccagatgagagcagagatacagtgagaaattatgtgatctgtgtgttgtgggaagagaattttcaatatgtaactacggagctgtagtgccattagaaactgtgaatttccaaataaatctgaacacttgtctttattaattactggctcttctgtcttttaaaagagaactcagaaattattaatctttgaacagagatttaagtttttgccacttttaaagttaaatatagcagcattccattcaatattgatcacatttcagccaactacaaaatgatggtacttttacataaacattttgctccctatgctatcagaatttcagtttttcatatctaaatacagcataacattttgtaacatgaggtttattttttcctctctcacataactacatgagaaaaaaaacttaagtgaaaataatagatttatgcctattaagaagcaaaaactatatagatatttatccaatgggatttttagtgttccctgatgatcaacctcattttatttcttctaatgttaagtaaagcattaaaacagtatgaaataaaaggaaactagggaattggtaagaacaaggatgcaaagtaaaacaattcttttaattgaatttttaaaaacattaaagttgtggctcacgcctataatcctaacactttgggaggccgaggcaggggatcatttgaggagttcgagaccagcctgaccaacatggtgaaaacccgtctctaataaaaattaaaaaaaagtagccgggcatggtagcacatgcctgtagtcccagctactcaggaggctgaggcaggagaattgcttgaacctgggaggcagacaggttgcagtgagctgagattgcaccactgcactccagcctgggtggcagagtgagactgtctcaaaaaaaaaaagttatgcatacatataatttgataaattagttttataaggcttataaagtaagaacagaaaacagttctctattctgtaccatttcactcacacacaacgcacacacacacacacacacacactaccagtaccacccatctttctctaccaaagatttcttgcttcccagtggcaaacattttttattccgtctgcagttattgtgcttcccttaccttgctgcttatttttccatttttagatgtgtcctcagtttgaatatacaaacttgtacgcatgaacatgagatagatataaacttatattggttaatgtaattggataagtctattcaaaatcacacaacaggacaacttagaagtactgcttttcttcaactgattgatttaaaaaatttcaaatctgtagataagttgaacaccatgtgcctttgcccagattcaccagttgctaatctttttagttttcttcatgtgtatgtgttttatatgtatatgtgtattatatgtatatatgtatgtataaagatatgtatgtgtgttatgtgtatatatataaagaaacatcttttggtgagccatttgtaagcaagttgggacattatgaccctttccccctaaatactgtagcatattttttcctaaagtaaggacattcacttatgtgaccataatacccgtataatatgtaagaaaattaataactccataatatctaatacacagtatatagtcaaatttcttcagttaccctcatttgtttattttggtccagggtccattcaaggttcatttggttgtattgtctatttagtgtctaaaaaaaatagactacttcctgactttgaatattgtccttgtgcaaggtccatacttactttctctgaatcatcccagttttagtggatgagctgcccaagtgagcaggaagagcttttttgagtaatgtgttgatgttgtcactgaaattttatcccaacccacgagtatttatagttaacacattctttaaaatatcctgttggagcaataacctccgcattacactccacttaatctattactttaaaaattaatatttcaggctgggtatggtggctcacgcctataatcccagcattttgggaggccgaggcaggtggatcatttgaggtcaggagttcgagaccagccttgcaaacatggtgaaaccccgtctgtactaaaaatagaaaaattagccaagtgtggtggtgcacacctgtaattccagctactggggaggctgaggtgggagaatcccttgaacccaggaggcagaggttgcagtgagctgagatcgcaccactgcactccagcctgggcgacaagaacaaaactccatctcaaaaaaaaaggatctttcaaatacttgcttacaacagagtttattactgctattttgaagtcatatagcctgggctaccaaatctgcttcatattttttgacagatcaccaaatactaaaacccaaacaaatgccttataacacttgtaaggacttttgagcaaacataagtattgatgattttttaaaaagtgaataaagagcaagttttaattccaggatagtttaaaatagccagctccccagggaaatggtatattacacagtttaagagcaggtgctgactgggcacagtggctcatacttgtaatcccagcacgttgggaggccaagatgggaggatcacttgaggccgggagttcaagactagcctagacaacatatcaagaccccatctccacaaaaagttttttaaaaataagctgggcatggccaggcatggtggctcatgcctgtaatgccagcatttgggaggctgaggtgggtggatcacaaggtcaggaggagttcaagaccagcctggccaacatggtgaaactccatctctactaaaaaaatacaaaaattagccaggtatggtggcatgcacctgtaatcccagctactcgggaggctgaggcaggagaattgcttgaacccaggaggtggaggttgcagtgagccgagatcgtgccactgcactccagcctggacaacagagtgagactctgtctctaaataaataaataaaagctgggcatggtggacgacagagcgagactctgtaaatagataaataaataaataaaaataagctgagcatggtggtccatgcctgtagtcctagctactcaggaggctgaagcaggaggaccacttgagcccaggagtttcaggttgcagtgagctatgattgtaccactgcactccagcctaggcaacagagtgagaccctgtctcaaaagcaagtgctttaaagtcagactgcctgttttcatatttgctatccacctcttactgggtacggcattggacaaatcacagtctcattaaacatgagatttctcacctgtaaatgaagataagagcacctatttcaaagggttgctttgaggatcaagagtgctaataactgtcatatacatggcatagtacacactaaacataagccatcagttttcagatgctcagggttctgatccttggtttctgtacatctatcagcaggggtcaagaaaggagctcattatgcttggtgtaagacttccatcatctccagcctctctccatcatcaccaccatttgaaaggtcagtagggagttttgagtccagtatactctgagaaagaccacccctcagttttgtcatcatgagggtcagtagggcaaaccaaagctctgcagagctcctgcaaagatgttgccacccctttctactgcccagtatgaagtcttgccaactttgtgcctcaaaaccattaaggtgaatttcatgtcttagattcttgttaattttataaccacaagaagcctcatatgacttgtaacattcttttttctggatccatattccatccccaactcctaaaacacttctgtgccctctggaactctaatccagtcattagtaaaattccctggaatctttcatttctttcagccttcgctttgcctctgttctatttgaaactacttccctgaatccttctcaggaggtcacttttttttcctatacccctcacaccaatgggcctgaagataggctagttgttgtccttaatcttcaatgccactataagactactctccacttttgcttaaatttctctttgaatcttgtatcaacaaactataccacctgctgtctctccttattgcaaatgatcccctgttttctctcacccttattcttggggtcacttattccattgctgcttctgttataattcttgatgatttcaatatctatcttacattagtttttctagtttctcagttccttgctttctctaatgatcttgttctccagactgtattggccacttactcccgtgatgaaatcctagtttttatcattaccaaaatccataattctttcttaatacgaattttaagcatctggttctgactaccacctcctgttttactagctcatacccccttcccaccctaactcttaacaattctttcatcccaccatatcctacaatccattagtcataccactgggacagccaagtataaaggggtccctagagaaactatgaccagcctgtgcactgagagaacaggttggagctacaaaagtttgtgccctttgcagtggagaggagcttggcctctcctgttctggagtggaacctgccattgaatctgtgaggcaggaaactggctagcaggactcttgctttgctgagagttcctctttccctttatttcctcttcacccaataaattccatttttctcaaccttcaaagtgtctgtgagcctaatctctcatggtcgtgtgacaaggaccttgtttttagctgaactaaggagaaagtcctacaacagcattggcacccaacatggggcttaagaaagggtgactgagatgcaaaccaagaaatctctccctttcacttctaagtgttttcatctctggacttctgagggtaggggaaaccaggccctcacccccattactcccagggtcaggggtctttccatggccttttccttcctttttctggatggacaggtgaacagtggctcctcactccccctcccttcccagttggggctggggaatgccacacattaacagtgtcttcatcttcccctgcgaaggagttcaactctcatctgacagcaattaagtttctccctccggaagaggaacccagttgcataagaataagaggttctcccctaggcatttttaaagtgtttttttttttccttccttttctccaccaggtcaagagctgacttttaagaaaggtttttttcctcttagaagacgtttttctaagctaagaatgataaggatcactctttatattctctgtaaagttttaattgtgaaaaaggatttgtgaggctggtcttaagctgtagccaactggtgtgctttgagtgtctgtatggttcgtagaaaactttgcttcaggcctccatcttgttttacaacttgggggcatggcctgtaacccagcagcaaggctttgtttagcaatcctgccttggggaattagtcctttctggtttgatatctgcatgtttttctagccatgtctcttaaaggactccacctggtgactgtgttttcttctgcctgtgtagctatatatgtgttgtgtgtgatgtctagaaaaggagctctaattaattggcctaaaggaagacaagcacttgaatcaaatattttttaaagggaaggtaaaagctgtgatacctttcagttcacatgactttaatatttgagaaataaaaacaaccttaaagattactggtaaaaagcagatgtcatcaaaatataaataggtggactaaattacgcaggtcagatgcaagctttgctaagtgttttgaggttataaactgctttttggtggtaaggcctggggacatatggaactaaccatgctcttaattatgctggaaggagtcaaaccttggctgcacctggcacaaaattaaaacaacttgccaggttttacattaaagttaaaattgctagaggttaccattataacatgtaattgaaactactgaaaatagattcacatgcaaggtatttaagaacagtaaaatgtgtttttaataaaagattacaaaaaggcatgaaaatgtaaattcttgcctagggttaaagaattattctaaattaggataaagctgcgggttcaaaaaagtggtggaaggattgtgggaattaatcttgtgaaagagattctctgtgtgaacatattgactaggttcaggggggtatattgtgtagtttttgaatgaaagcacaacagagtattcttggggcactgatttgccctttggcaaaatttgtaaagggttataaaaggcttttgcttctttaaaatttctgagtcatcattttggcaaaataaacaattatggtcatctagaattctattttataacatcaggtgttttaaactgctaacatatttaacaggcttcttaaaatcaaactttagtttcaaaattttctttcctgacacctggctttttggatatatcagagggcctctggagtgttcagaaaagagaggtaaacaggattattttacatgtttaggtacatgggatcgacaaaatgatgttcaatcttctttaggtatattttggtgaataatactaatatatgttccaaaaccatatgggattcctaaaattctaatgtctaagtatatgctatcaatcataattaaggttatgttaagttattgtaaaccgtggagataaccaaacttctttgtcaatcatgtttctaactgtaactaccctggacattttgttattcgtagacaattgttgtcttgttctaatctttttcaaaagacagtttataaaaagctatagaactataggtaggtgacctcaaacacaggtttttgataactttggagactgtgacattggaataaatgaaaaatgtacaggactcatgaagagctaaaatgttcatgaatatcaaacaaatcaataactaaatggactgaactcaggaaactgaagcaaatcttttttactttggcttgaaatgttgctgaactttgttttgtttttcagagttgaggaaacttactttgaactatttatggccattaataattgagtaaggtatactcctgtgaacaaaatttggagcatgtttgtttctctcttcctggttcttctagaatttggaaaccatctgtgagtattcttaattcatagcaatatagttgtttggatcagtgcaataagaatccatttttcttttgcaacgggatgcaattggagaaactggttgttttaccaaggctttgactggaagtgtatgcttcactttaaggaatcaagcctgacttgcagagctgataacagccccttggggaaaaaactggcctcataccatcatctacatagtctctctacagggctcctgacctgtggtcaataaagaatgtcactttctaacaggcctaggagctccaagttaatcttgggaccttaagaggagaggatcacccaactaacaggtgtttgaggatacaaacccctggctgggcttgaatttaaaaggtcttatctgagattccttacagaatagagttccatcaaagccaatccaaaaggcctgtgtagaaataattattcttgttgcactttatgcaagtaatcaggccaagtataagattaaaatctattgcaaacaactcagtcctatcatgattttttttaacaaaaatgaggaccggagagaaattatgtttcaaaactcatacatttgtcattaaattataagctcattagttgtttttaggtttttgcctacattttagacaccctgcttgttgctgtgaaccaaccagcaatctcctgctgcagctcagaaagaacaaaagggatgggtaatgtagaagtctggatcaatattctagttctgagcaattatcctgcaaatcctgccaggtgttgggaataaataggacatccatcactcagaggattccttttgggaaagtaagactaagggagctaaccaaagccaagcaccatgcacccaaatcttagcaagcataactagctaccagtcatctgaatgtatcacaagacatccttttctctcccttgttggaggagggctcagttccacagtttcaccttagcattcggcttattgataaggagtccatgcaccatcccacaaccccaccaagacacagttttgtcccaaagaattttgtcaattctaagctttggatccctaggaaagaaaactggatctaagggatccagaggcagatgataatggaagttaaaaggcagagcacaagtgagcatggttgattcctgctgattaagacaagcctcctgtttcatggataaaggtcatgctagtatcactggcaaaaatgaggtctagggaatgccaaggctactgacagcagggggaaagagacataggtgagagcagataatttctattctctaggccctccctgcttcatgggtacaagccgtttggcactcatcatggcacctgccaaggtcgctgggacttggggctgcaaggacagagaaagaaagaggatgttcttcctactgtccctcacgtaccttgggtatctgcttggaagagaaaggaaccagggattatcgggggaacaagcccccagtatttcaacataggttattttctattttccctaagagtcggctggtctgagaaataaagagaaagagagaaattttacagctgggcctccgggggtgccaccacatattggtaggactgtggtggcaacctcaagccacaaaaccagcaagtttttattagggatttcaaaaggggaggggtgtacgaatagggagtgggtcacagagatcacatgcttcaaagggcaataaaagatcacaaggcaaaagagcagagcaagatcacaaagcaagggcgaaattagaattactgatgagggtccatgtcccgctgggcacgtattgtcttgataaacatcttaacaggaaacagggtttgagagcagacaacctgtctgactagaattcaccaggctgaaatttcccaatcctagtaagcctgagggcactgcaggagaccagggcatatttcatcccttatctcaaccacataagacagacattcccagagcggtcgtttatagacctacccctgggaatgcattccttcccccagggttatcaattattaatattccttgctgggaaaagaatttagcgatatttctcctactcacacgtccgtctataggctctgtgtgagaagaaaaatatggctctattctgcccgaccctgcaggcagtcagatcttatggttatttttccttgttccctgaaaaatcgctgttattctgttctttttcagggtgcactgatttcatattgctcaaacacacatgttttacaaacaatttgtacagttaactcaatcgtcacagggtcctgaggtgacatacatcctcagtttacgaagatgatgggattaagagattaaagtaaagacggcataaaaaattataagagtattgtttggggaagtgataaatgtccatgaaatcttcacaatttatgttcagagactgcagtaaacacaggcataagaaattataaaagtattaattttgggaactgataaatgtccatgaaatcttcacaatttatgttcttctgccacagcttcaaccggtccctctgttcggggtccctgacttcccgcaacaagggatgcctgctcctctctttctagatgggtagccgttcatcttcactctgtacccctttcaaatgcatcctgaatctcctttgaaaaaaaacaccttcttcttcttttttcctcctctgtcctctcttcactgataggtaattgtgtctccatactatgggacactccccttggatgcatcctctgaactgggaaaagttaatttcccaaaccttaaactggttggcttaggattggactcaggggaagggaacccaggagcccaacatgttggcaaaatggtaaaaggcctcgggatttttgagctgtccttaccccctgcttttctcattttaatacatgttttctaatgacctggtttgtctcttcttgccttcaggtcatcaaactccaaacagtcatgcaactgg

SEQ ID NO: 621 - DNA, 5917 bp, Homo sapiens
cccaaagttcgaaaccaacagaacgaaaagcaacgaagcacacttaaagtgaggaacccggcaagcggcgaaattcttgctgaagagaagaaaaagcgaaaggttttccgctgcaaccaatcagatgagaggattcttggcacgcccctttctatctaccaatcaacatctagctcaatggggcagtccattgccacagggaaagggcttggtgcagcttccctcacaacacacacgtcattctaggccattccacgaactgtgctcaaaagaggaaaacagtgcaacagttccaaagctgatcagtctcgtggtgagcagcgaaactatagacttctctaacaaaaccatggattctaggagggactgggaaagagaaaaacgaattctggaaggcaaactacaactcccaaaggcccttgcgcggactcagcgcgcgagggacgaagggcggcgggcgtggacgagccggtggctgcagcggcggcggtccccggagtcctgtgaagcgcccctgtccgcgcctctgtggggccctcagagagggctgccaggacgcgagccactgaggagccgctcagccagcgccatagcccttaggactatcggtcacatcctcgcgctcctgctccggctcctccatcttggcctcggcagtggcggctgccgggaggatgtgccgccttctggcagggggaagaaggaggagaagatgaagaagcaccggcgggccttggccctggtctcctgcctctttctgtgctctctggtctggcttcccagctggcgtgtatgttgtaaagagagttcttcagcttcagcgtcatcatattactctcaagatgacaactgcgcactagaaaatgaagatgtacaattccagaaaaagaatacagagtcaaaaaagttaagtccaccggtggtggagacactccctacagttgatttgcatgaagagtcttccaatgcagttgtggacagtgaaactgttgaaaatatttccagctcatctacctcagaaatcactccaatctcaaagcttgatgaaatagaaaaatctggtactattccgatagccaaaccaagtgaaactgagcagtctgaaactgattgtgatgttggtgaggcccttgatgctagtgctccaattgaacaaccttcctttgtcagtccacctgacagccttgttggccagcatatagaaaatgtatcatcttcacatggtaaaggaaagataacaaaatcagaatttgaatcaaaagtttcagcaagtgaacagggcggtggtgatccaaaatctgcattgaatgcttcagataatttaaaaaatgagagctctgattatacaaaaccaggagacattgaccctacatcagtagcaagtcccaaagatccagaagatataccaacatttgatgaatggaagaagaaagttatggaagtagaaaaagaaaaaagtcagtcgatgcatgcatcttctaatggaggttcacatgccaccaaaaaggtccagaaaaatcgaaataattatgcctcagtagaatgtggtgccaaaattctagcagctaatccagaagccaagagcacatctgctattcttatagaaaatatggatctttacatgttgaatccttgcagcactaaaatttggtttgttattgaactttgtgaaccaattcaagtaaaacagcttgatattgcaaattatgaattattttcttctactcctaaagattttctggtttctatcagtgacagatatccaacaaataagtggattaagctgggtacttttcatggtagagatgagcggaatgtacagagtttccctttagatgaacagatgtatgcaaaatatgtcaaggttgagttgctatcacattttggatcagagcacttttgtccattaagccttataagggtatttggcactagcatggtggaagaatatgaagaaattgctgattcccagtatcactcagaacgccaggaactatttgatgaggactatgattatccactggattataatactggagaggataaatcctcaaaaaatcttcttggttctgctacaaatgccattctaaatatggtgaatattgctgctaatattctgggagcaaaaactgaagacctgacagaaggaaataaaagtatatctgagaatgccactgccacagctgcacctaaaatgcctgaatcaactcctgtttcaactcctgttccatctcctgagtatgtaaccactgaagtacacacacatgacatggagccgtcaacaccagatactccaaaagagagtcccattgtacagttagttcaagaggaggaagaggaggcaagtccatctacagtgacccttctgggcagcggtgaacaggaagatgaatcatcaccctggtttgagtcagagacacaaatattttgcagtgaactgaccacaatttgttgtatttctagtttttcagaatacatatataaatggtgttcagttagagttgctctttatcggcagcgcagccgaactgctttgagtaaaggaaaagattatcttgtgttagctcaaccacccttactacttcctgcggaatcagtagatgtttcagtattgcaacctctgagtggagaattggaaaatacgaatatagaaagggaagctgaaactgttgttctgggtgatttaagtagtagtatgcaccaggatgacttggtgaatcacactgtagatgcagttgaacttgaaccaagccattctcaaactctttctcagtctcttcttttagatattaccccagaaatcaatcccttgcctaaaatagaagtatctgagtctgttgaatatgaggcaggacatataccatcaccagtgattccccaagagagttctgttgagatcgataatgaaacagaacaaaagtctgagagctttagttctatagagaaaccatctattacctatgaaacaaataaagttaatgagttaatggataatattataaaagaagatgtgaactccatgcaaattttcacaaagctgtctgaaacaatagtgccaccaataaatacagccactgtacccgacaatgaagatggggaagccaaaatgaatatagctgacacagcaaagcaaactttgatttctgttgtggattcttcttcattacctgaagtaaaagaagaagaacagtctccagaagatgcccttttgagagggttacagaggacagctacagatttttatgctgaattgcaaaattctacagatctaggatatgctaatggaaatcttgtacatggatcaaaccaaaaggagtcagtatttatgagacttaataatcgtattaaagccttagaagttaacatgtctctcagtggtcgctatctggaggagcttagccaaaggtaccgaaaacaaatggaagaaatgcaaaaggctttcaataaaacaatcgtgaaacttcagaatacttcaagaatagcagaggagcaggatcagcggcaaactgaagccatccagttgctacaggcacagctgaccaacatgacacagcttgtttcaaatttatcagcaacagtagcagaattgaaacgggaggtttcagatcgacaaagctatcttgtcatatctttggttctttgtgttgtcttgggactgatgctttgtatgcagcgttgtcgaaatacttctcaatttgatggagattatatttcaaaacttcctaaaagtaatcagtatccaagccctaaaaggtgtttctcttcctatgatgatatgaatttgaaaagaagaacttcattcccactcatgagatccaagtctctacagttaactggcaaagaagtagacccaaatgatttgtacattgtagaacccctcaagttttctccagaaaagaagaagaagcgctgcaagtacaaaattgaaaaaattgagaccataaagcctgaagaaccattgcaccccatagccaatggcgacataaaaggaagaaagccctttacgaaccagagagatttttctaatatgggagaagtttatcactcttcttataaaggtcctccatctgaaggaagctcagaaacttcatcacagtcagaagagtcctatttttgtggcatttcagcttgcacaagtctgtgcaatggacagtctcaaaagacaaaaactgagaagagggctttaaaacgaagacgatctaaagtccaagaccaaggaaaattgataaaaactctaatacagactaagtcgggatcattgccgagcctgcatgacataatcaaaggaaacaaagagatcaccgtgggaacatttggtgttacagcagtctcgggacatatctaaaattaattgaacttttcatacagaagacttttttgttgttgttctttgaagaacagtctgtagtatttgaagggtttgggggagggagaaaatattaatgggaaaggcattcagaaattatggtttctacctttttaaaaagtagatgggattgtgtcaatcttggttaatgagctacagttttacaaagctgatcacttcctataaggacaatggtagacattttataaagatgttttttcacaagattaattactgggacaaaagtaatttggaagcccagttccttaggtgggataggaatgaaagcctaaacctcttcctttagctttgttcctatttcttgcaccttcccatatttatgtgccttttgtctatttataatgccactggaagaggagggataactttttctgttatttgatttcttttataactttgttaggtttttgaagctgcaaacactacaatgctttgagggggtctgtgcctgaagctcaggagtgtggatcagacagtctaaagatcctaaaaacttgccaactggatctttgtttagcaaactcactggaaatgaacacttaatggaatttttaagtctgttctgttaggtagatggtgatgctcttgttattttcacttattcagactggattacttcttacttagttactaactcaatgaggaaaaatccctacaggatctttttttgcaaacaactgatatatgcagacaaatttttgacaaattcaccttttaaacacacttaaccatttgtgaaggttttctttagcttacattttaaacatacacaataaacactaatcctccaaactttcactgtttttattagtatgaatataaaatttgaaggtttggccaattagtacaagtctcatgatataatcactgcctgcatacatatgcacagatccagttagtgagtttgtcaagcttaatctaattggttaagtctaaagagattattattccttgatgtttgctttgtattggctacaaatgtgcagaggtaatacatatgtgatgtcgatgtctctgtctttttttttgtctttaaaaaataattggcagcaactgtatttgaataaaatgatttcttagtatgattgtacagtaatgaatgaaagtggaacatgtttctttttgaaagggagagaattgaccatttattgttgtgatgtttaagttataacttattgagcacttttagtagtgataactgtttttaaacttgcctaatacctttcttgggtattgtttgtaatgtgacttatttaacgccttttttgtttgtttaagttgctgctttaggttaacagcgtgttttagaagatttaaatttctttcctgtctgcacaattagctattcagagcaagagggcctgattttatagaagccccttgaaaagaggtccagatgagagcagagatacagtgagaaattatgtgatctgtgtgttgtgggaagagaattttcaatatgtaactacggagctgtagtgccattagaaactgtgaatttccaaataaatctgaacacttgtctttatt

SEQ ID NO: 622 - protein, 1392 aa, Homo sapiens
MRGFLARPFLSTNQHLAQWGSPLPQGKGLVQLPSQHTRHSRPFHELCSKEENSATVPKLISLVVSSETIDFSNKTMDSRRDWEREKRIGKLQLPKARTQRARDEGRRAWTSRWLQRRRSPESCEAPLSAPLWGPQRGLPGREPLRSRSASAIALRTIGHILALLLRLLHLGLGSGGCREDVPPSGRGKKEEKMKKHRRALVSCLFLCSLVWLPSWRVCCKESSSASASSYYSQDDNCALENEDVQFQKKNTESKKLSPPVVETLPTVDLHEESSNAVVDSETVENISSSSTSEITPISKLDEIEKSGTIPIAKPSETEQSETDCDVGEALDASAPIEQPSFVSPPDSLVGQHIENVSSSHGKGKITKSEFESKVSASEQGGGDPKSALNASDNLKNESSDYTKPGDIDPTSVDKDPEDIPTFDEWKKKVMEVEKEKSQSMHASSNGGSHATKKVQKNRNNYASVECGAKILAANPEAKSTSAILIENMDLYMLNPCSTKIWFVIELCEPIQVKQLDIANYELFSSTPKDFLVSISDRYPTNKWIKLGTFHGRDERNVQSFPLDEQMYAKYVKVELLSHFGSEHFCPLSLIRVFGTSMVEEYEEIADSQYHSQELFDEDYDYPLDYNTGEDKSSKNLLGSATNAILNMVNIAANILGAKTEDLTEGNKSISENATATAAPKMPESTPVSTPVPSPEYVTTEVHTHDMEPSTPDTPKESPIVQLVQEEEEEDSTVTLLGSGEQEDESSPWFESETQIFCSELTTICCISSFSEYIYKWCSVRVYRQRSRTALSKGKDYLVLAQPPLLLPAESVDVSVLQPLSGELENTNIEREAETVVLGDLSSSMHQDDLVNHTVDAVELEPSHSQTLSQSLLLDITPEINPLPKIEVSESVEYEAGHIPSPVIPQESSVEIDNETEQKSESFSSIEKPSITYETNKVNELMDNIIKEDVNSMQIFTKLSETIVPPINTATVPDNEDGEAKMNIADTAKQTLISVVDSSSLPEVKEEEQSPEDALLRGLQRTATDFYAELQNSTDLGYANGNLVHGSNQKESVFMRLNNRIKALEVNMSLSGRYLEELSQRYRKQMEEMQKAFNKTIVKLQNTSRIAEEQDQRQTEAIQLLQAQLTNMTQLVSNLSATVAELKREVSDRQSYLVISLVLCVVLGLMLCMQRCRNTSQFDGDYISKLPKSNQYPSPKRCFSSYDDMNLKRRTSFPLMRSKSLQLTGKEVDPNDLYIVEPLKFSPEKKKKRCKYKIEKIETIKPEEPLHPIANGDIKGRKPFTNQRDFSNMGEVYHSSYKGPPSEGSSETSSQSEESYFCGISACTSLCNGQSQKTKTEKRALKRRRSKVQDQGKLIKTLIQTKSGSLPSLHDIIKGNKEITVGTFGVTAVSGHI

SEQ ID NO: 623 - DNA, 5655 bp, Homo sapiens
ggagcaaggcccccggcgggcggggaggatatggggcggcagtggcggctgcaggaggcgggcgtggacgagccggtggctgcagcggcggcggtccccggagtcctgtgaagcgcccctgtccgcgcctctgtggggccctcagagagggctgccaggacgcgagccactgaggagccgctcagccagcgccatagcccttaggactatcggtcacatcctcgcgctcctgctccggctcctccatcttggcctcggcagtggcggctgccgggaggatgtgccgccttctggcagggggaagaaggaggagaagatgaagaagcaccggcgggccttggccctggtctcctgcctctttctgtgctctctggtctggcttcccagctggcgtgtatgttgtaaagagagttcttcagcttcagcgtcatcatattactctcaagatgacaactgcgcactagaaaatgaagatgtacaattccagaaaaaggatgaaagagagggacctatcaatgccgaatcattgggaaaatcaggttcaaatttacctatttctccaaaagaacataaattaaaagatgattctattgtggatgtacaaaatacagagtcaaaaaagttaagtccaccggtggtggagacactccctacagttgatttgcatgaagagtcttccaatgcagttgtggacagtgaaactgttgaaaatatttccagctcatctacctcagaaatcactccaatctcaaagcttgatgaaatagaaaaatctggtactattccgatagccaaaccaagtgaaactgagcagtctgaaactgattgtgatgttggtgaggcccttgatgctagtgctccaattgaacaaccttcctttgtcagtccacctgacagccttgttggccagcatatagaaaatgtatcatcttcacatggtaaaggaaagataacaaaatcagaatttgaatcaaaagtttcagcaagtgaacagggcggtggtgatccaaaatctgcattgaatgcttcagataatttaaaaaatgagagctctgattatacaaaaccaggagacattgaccctacatcagtagcaagtcccaaagatccagaagatataccaacatttgatgaatggaagaagaaagttatggaagtagaaaaagaaaaaagtcagtcgatgcatgcatcttctaatggaggttcacatgccaccaaaaaggtccagaaaaatcgaaataattatgcctcagtagaatgtggtgccaaaattctagcagctaatccagaagccaagagcacatctgctattcttatagaaaatatggatctttacatgttgaatccttgcagcactaaaatttggtttgttattgaactttgtgaaccaattcaagtaaaacagcttgatattgcaaattatgaattattttcttctactcctaaagattttctggtttctatcagtgacagatatccaacaaataagtggattaagctgggtacttttcatggtagagatgagcggaatgtacagagtttccctttagatgaacagatgtatgcaaaatatgtcaagatgttcatcaagtacataaaggttgagttgctatcacattttggatcagagcacttttgtccattaagccttataagggtatttggcactagcatggtggaagaatatgaagaaattgctgattcccagtatcactcagaacgccaggaactatttgatgaggactatgattatccactggattataatactggagaggataaatcctcaaaaaatcttcttggttctgctacaaatgccattctaaatatggtgaatattgctgctaatattctgggagcaaaaactgaagacctgacagaaggaaataaaagtatatctgagaatgccactgccacagctgcacctaaaatgcctgaatcaactcctgtttcaactcctgttccatctcctgagtatgtaaccactgaagtacacacacatgacatggagccgtcaacaccagatactccaaaagagagtcccattgtacagttagttcaagaggaggaagaggaggcaagtccatctacagtgacccttctgggcagcggtgaacaggaagatgaatcatcaccctggtttgagtcagagacacaaatattttgcagtgaactgaccacaatttgttgtatttctagtttttcagaatacatatataaatggtgttcagttagagttgctctttatcggcagcgcagccgaactgctttgagtaaaggaaaagattatcttgtgttagctcaaccacccttactacttcctgcggaatcagtagatgtttcagtattgcaacctctgagtggagaattggaaaatacgaatatagaaagggaagctgaaactgttgttctgggtgatttaagtagtagtatgcaccaggatgacttggtgaatcacactgtagatgcagttgaacttgaaccaagccattctcaaactctttctcagtctcttcttttagatattaccccagaaatcaatcccttgcctaaaatagaagtatctgagtctgttgaatatgaggcaggacatataccatcaccagtgattccccaagagagttctgttgagatcgataatgaaacagaacaaaagtctgagagctttagttctatagagaaaccatctattacctatgaaacaaataaagttaatgagttaatggataatattataaaagaagatgtgaactccatgcaaattttcacaaagctgtctgaaacaatagtgccaccaataaatacagccactgtacccgacaatgaagatggggaagccaaaatgaatatagctgacacagcaaagcaaactttgatttctgttgtggattcttcttcattacctgaagtaaaagaagaagaacagtctccagaagatgcccttttgagagggttacagaggacagctacagatttttatgctgaattgcaaaattctacagatctaggatatgctaatggaaatcttgtacatggatcaaaccaaaaggagtcagtatttatgagacttaataatcgtattaaagccttagaagttaacatgtctctcagtggtcgctatctggaggagcttagccaaaggtaccgaaaacaaatggaagaaatgcaaaaggctttcaataaaacaatcgtgaaacttcagaatacttcaagaatagcagaggagcaggatcagcggcaaactgaagccatccagttgctacaggcacagctgaccaacatgacacagcttgtttcaaatttatcagcaacagtagcagaattgaaacgggaggtttcagatcgacaaagctatcttgtcatatctttggttctttgtgttgtcttgggactgatgctttgtatgcagcgttgtcgaaatacttctcaatttgatggagattatatttcaaaacttcctaaaagtaatcagtatccaagccctaaaaggtgtttctcttcctatgatgatatgaatttgaaaagaagaacttcattcccactcatgagatccaagtctctacagttaactggcaaagaagtagacccaaatgatttgtacattgtagaacccctcaagttttctccagaaaagaagaagaagcgctgcaagtacaaaattgaaaaaattgagaccataaagcctgaagaaccattgcaccccatagccaatggcgacataaaaggaagaaagccctttacgaaccagagagatttttctaatatgggagaagtttatcactcttcttataaaggtcctccatctgaaggaagctcagaaacttcatcacagtcagaagagtcctatttttgtggcatttcagcttgcacaagtctgtgcaatggacagtctcaaaagacaaaaactgagaagagggctttaaaacgaagacgatctaaagtccaagaccaaggaaaattgataaaaactctaatacagactaagtcgggatcattgccgagcctgcatgacataatcaaaggaaacaaagagatcaccgtgggaacatttggtgttacagcagtctcgggacatatctaaaattaattgaacttttcatacagaagacttttttgttgttgttctttgaagaacagtctgtagtatttgaagggtttgggggagggagaaaatattaatgggaaaggcattcagaaattatggtttctacctttttaaaaagtagatgggattgtgtcaatcttggttaatgagctacagttttacaaagctgatcacttcctataaggacaatggtagacattttataaagatgttttttcacaagattaattactgggacaaaagtaatttggaagcccagttccttaggtgggataggaatgaaagcctaaacctcttcctttagctttgttcctatttcttgcaccttcccatatttatgtgccttttgtctatttataatgccactggaagaggagggataactttttctgttatttgatttcttttataactttgttaggtttttgaagctgcaaacactacaatgctttgagggggtctgtgcctgaagctcaggagtgtggatcagacagtctaaagatcctaaaaacttgccaactggatctttgtttagcaaactcactggaaatgaacacttaatggaatttttaagtctgttctgttaggtagatggtgatgctcttgttattttcacttattcagactggattacttcttacttagttactaactcaatgaggaaaaatccctacaggatctttttttgcaaacaactgatatatgcagacaaatttttgacaaattcaccttttaaacacacttaaccatttgtgaaggttttctttagcttacattttaaacatacacaataaacactaatcctccaaactttcactgtttttattagtatgaatataaaatttgaaggtttggccaattagtacaagtctcatgatataatcactgcctgcatacatatgcacagatccagttagtgagtttgtcaagcttaatctaattggttaagtctaaagagattattattccttgatgtttgctttgtattggctacaaatgtgcagaggtaatacatatgtgatgtcgatgtctctgtctttttttttgtctttaaaaaataattggcagcaactgtatttgaataaaatgatttcttagtatgattgtacagtaatgaatgaaagtggaacatgtttctttttgaaagggagagaattgaccatttattgttgtgatgtttaagttataacttattgagcacttttagtagtgataactgtttttaaacttgcctaatacctttcttgggtattgtttgtaatgtgacttatttaacgccttttttgtttgtttaagttgctgctttaggttaacagcgtgttttagaagatttaaatttctttcctgtctgcacaattagctattcagagcaagagggcctgattttatagaagccccttgaaaagaggtccagatgagagcagagatacagtgagaaattatgtgatctgtgtgttgtgggaagagaattttcaatatgtaactacggagctgtagtgccattagaaactgtgaatttccaaataaatctgaacacttgtctttattaa

SEQ ID NO: 624 - protein, 1244 aa, Homo sapiens
MKKHRRALVSCLFLCSLVWLPSWRVCCKESSSASASSYYSQDDNCALENEDVQFQKKDEREGPINAESLGKSGSNLPISPKEHKLKDDSIVDVQNTESKKLSPPVVETLPTVDLHEESSNAVVDSETVENISSSSTSEITPISKLDEIEKSGTIPIAKPSETEQSETDCDVGEALDASAPIEQPSFVSPPDSLVGQHIENVSSSHGKGKITKSEFESKVSASEQGGGDPKSALNASDNLKNESSDYTKPGDIDPTSVDKDPEDIPTFDEWKKKVMEVEKEKSQSMHASSNGGSHATKKVQKNRNNYASVECGAKILAANPEAKSTSAILIENMDLYMLNPCSTKIWFVIELCEPIQVKQLDIANYELFSSTPKDFLVSISDRYPTNKWIKLGTFHGRDERNVQSFPLDEQMYAKYVKMFIKYIKVELLSHFGSEHFCPLSLIRVFGTSMVEEYEEIADSQYHSQELFDEDYDYPLDYNTGEDKSSKNLLGSATNAILNMVNIAANILGAKTEDLTEGNKSISENATATAAPKMPESTPVSTPVPSPEYVTTEVHTHDMEPSTPDTPKESPIVQLVQEEEEEDSTVTLLGSGEQEDESSPWFESETQIFCSELTTICCISSFSEYIYKWCSVRVYRQRSRTALSKGKDYLVLAQPPLLLPAESVDVSVLQPLSGELENTNIEREAETVVLGDLSSSMHQDDLVNHTVDAVELEPSHSQTLSQSLLLDITPEINPLPKIEVSESVEYEAGHIPSPVIPQESSVEIDNETEQKSESFSSIEKPSITYETNKVNELMDNIIKEDVNSMQIFTKLSETIVPPINTATVPDNEDGEAKMNIADTAKQTLISVVDSSSLPEVKEEEQSPEDALLRGLQRTATDFYAELQNSTDLGYANGNLVHGSNQKESVFMRLNNRIKALEVNMSLSGRYLEELSQRYRKQMEEMQKAFNKTIVKLQNTSRIAEEQDQRQTEAIQLLQAQLTNMTQLVSNLSATVAELKREVSDRQSYLVISLVLCVVLGLMLCMQRCRNTSQFDGDYISKLPKSNQYPSPKRCFSSYDDMNLKRRTSFPLMRSKSLQLTGKEVDPNDLYIVEPLKFSPEKKKKRCKYKIEKIETIKPEEPLHPIANGDIKGRKPFTNQRDFSNMGEVYHSSYKGPPSEGSSETSSQSEESYFCGISACTSLCNGQSQKTKTEKRALKRRRSKVQDQGKLIKTLIQTKSGSLPSLHDIIKGNKEITVGTFGVTAVSGHI

SEQ ID NO: 625 - DNA, 88607 bp, Mus musculus
  misc_feature (1)...(88607): n = A,T,C or G
agacagagattacaagagtcttgcatctatctcaggaccgaggacatagctcatgaatattatatacttcttgagtggatattgaatgggaatatgctatatagcatgtgcttgtataatttgagtttgaggccagcatgggctacaggaaaccacacttaaagaaaaatgatctagttattttcttttcccttttctcttctctttcttccttcctttgacctcacacattctaccattgagctacatgccagcccttaaaatcactctgagagaggattttgttaaaagttgcccaagctagccttaaacttagaatcctcctgtctccaccttctgggtctgtgggatcacaggtgcatatcaccaaacctggcttacatcattttttattatgcatctcaataaatccacaaagcttaataaaatttcaaggaaaaggctctttcaaataaaggtaaagatggaaaggcaagcccagagccaccctagttgctttaggtgacaggccatggtgacttggatcacagtcactgtgagtggaagagaaaagcaaagacctgactattaactgcatgtggagaataaatactccatatggaggagagaatggagtctgggggttttcccagatttctggtatgaacaaattatgtagatggtgctactgcaggttgagttgctaggaaacaaaactatgcacgtggtgctttggagaacaccagcctaaggagagaaaaagaagcagacgtaggctgagaagctgacctagcagccaagggcagcccatgcgggactctggcacgtggagcgaaggcaggctgtggggatatctgatgaggtgacatggccagacctctacagctccacaccaaccaacaggaaaatcagctccctttaaacgatgccatccttcaaacagggctccgagcccagagccatcctcagcctgcactcccaatagctaacaaaacaaaacatttctgctcagcagaagacctctctgcagcacctcccactgttcctgtggctggcagctctctcctccacacacagaaaactccttccttggatcaataacaattatatattctataaactcacaagcatcagccaagtagtataggggtttgttaggaacgactgacctgtgacagagttagttacttctctccgctatgacaaaagtcattggtaggaacaactagagggaggctggattggtttagctttagagtaggggcttgtggtcccctggaggcataaattttccacaactgattttaataaggattcaactgcttctccagcccaccacccaggaaaggtagtggaagagaaaagttattagggcacaggggaagtagatttgtttagaaatagttctttgggggagcaagtccaaccttcattgtcaggatatcagcagctcagtcccatagcaaacatcaaatacaaatcagcagtcgaagtccagtcctcttgacaagcagacaccacgcaagaaccatcagctgcagttcagtcctgaagaagccacgaggctctcccaccagcccagggctgaggaagtggccagaagccacaggaacctcacaaaaagttctttggtgagtttcttctctctggcgtcaccacttgtggagctcggcaaacacaatgtaaggtgaaccaatatatgtgtgtcattagcaaagactattgaggtggagcaaagcaaaccagtgctcaagatcccactatttgtggggtcatatatattcatatatatatatatatatatatgtatacactccatctcgcatccttttacacgtcagctatagcaaaacatctttccacctgtgtctgcttcaaggaaatgtcaactgactttccaaagaaaccaggagtttcctcttcagtccatcatggcagggaaggactgatgaagatgctctaaatgataagggaaatatagagcagagattgattactcacgtggtggccctaccagaaaccagattgtacacaggaaggatccaggagcaacctactatttaggacctgccatcagtaacctactcaaagtttccaaactgtcctccaaacgtagtgggccccgctggagacaaagggttcaattttaggaaggggacattccaatctacaagggaattgtattgtattgtattgtaattttttttcatacaatatattctgattatggttagctctcctgtcctggctagttgacataagctagagggaacctcaattgagaaaatgcctccataagatctaactgtaaggcattttcttaatgggggagggcccagctcattgtaggtggactcacccctgagctggtagtcttgggttctataagaaagcaggctgagcaggtcatgggaagcaggccagtaagcagcacccctccatgaccagtgtatcagctcctgcctccaggttcctgccctgtttgagtcctatcatgacttccttcagtgatgaatatgggtatgaaagtctaagccaaataaacccagtcttctcccagttgctttggtcatggcggttcatcaaagcaatagtaagcctaactgaaacaccttccccaactcctcccagatcctccttacggttccacccacccaagcccatatccttccttcctctcagaaaataagcaagaatctgatagcagtagtaataagaaaataaaaacatgccgggcggtggtggcgcacgcctttaatcccagcacttgggaggcagaggcaggtggatttctgagctcgaggccagcctggtctacagagtgagttccaggacagccagggctacacagagaaaccctgtctcaaacaaacaaacaaaaaaacaaaaaataaaaaataaaaacaaaccagaacaggacaaatgggtgtggggggggcacacatacagacacaaagagacacacattatgcacacagaaatctcataaaacataaaactggaaaccataatatataagcagaagagttgtaaggttaaaataaaatgcccatataaagcatgagacgaaaacctccaaaaatacattgagttcattttgtgttagccatctaccagggggcatggggcctgcttttaagtgtggcaagtatacgcagcgagactccattggaaataactaatttttccattttgagcagttatcaattagtgttagattataggttaggggtgggttatgggttgggtaggtatcatggttaaatgtaaagtaatgtgtagcattattttattagttgctacattgagatctccaagttaaaagcttcatatagggaccagtgtgacagcttggtaggtaaaggcacttgtcatgtgaacctggcaacctgagtgtggttcccagagcctgcagtggaaagaaagaatcgactccttctgactttcctggatgtgcaatgatgcatgatatcctaagcgtgcctctatgcatgcagtacacgtgtacaagaagtacatactttttgtaagtttcatttaaccatactgactactggaacaactagttccagttgagtgtaatttacccagggtactaaatacttgcaaagctttttagtgttctttctccctactccaggtttctcttctttcttccaagactatgtgccatatgaagttaagagtggcactgtgctgagcactgaactaattcccatttgaagcaattatctcaatgagactctaatcaactcgaagaagtacttctgaaacaaccatttaattaaccccagcagaaataagaatggagaatacaaagaaactgataaacaaggactaagctagacatgggctccagactgtggcacaggaaaattccctcttccacaggaatcgctcaaaatgcctggttgccaaggagcaaaaaaataagatttgaaactgggtagcttcacttgtgtactgaatgtacaatgggttggacagaaaataaataaagggtccttattctttgaaaaatgctagaagcaacagccaggcttgtaatttcagaaataattgagtgctgtaagtacatttgtcagcattatctcaaatctctattttccggcctaaaaatatttaaaaagcatttttcctgtatctccaattaccaccacttacaccccgttttaactgttttctcttctgcatttgctgcccctgaatcacttcttagagatcttccccctctgatcccagcctcatgctgtgactcacttcctggctcaggtgaactcattcaagaaagcttaaggcaaaactgggacccaagtcttctctgtcttccatctcccttcctcctccctcctccccttactgctccagccctgagtaacatccctgataatgttctctgctctctaaccgcgttgaaccctcttgacttggctcaccacaccactctaagaacttagattctctcagcttaaatgttacaaatacgtagagtggacagtgtaaatcacaattactccaaaatgcattagcacatgatgtgacaaaatttaaccaaaatgtatcttttattcaattataaaaagttttttagctaattaataatagattgacaaataaaaatattatcgtatgttacatataatgtaaatgtttatatgttacatatattgtaatatttcacataaaacatatgagttggcaaaaggcagtttctttttgcactgtatcttattgagtgtgtaagcatgtgtgtgtgtgagtgtgtatgtgtgtgagtgtatttatgcaacaatgtgccacatgtgctctgggtactcttggttcacaagatccctaaaagttcacaccaaggtgtatgagctgtctgatatggatgctagaaacataacttgggttcattggaggtgaagcaagaacccatgagccatctctccagccccaggggtggttcctcgaagcaatggcaatattgttcttgttttcgtttacagacttggagcatctgtagttattaataaagtaaggctacatttttacatagtgcttgattattatggctttcattatatccaatccatcatgtctcacagtcttactaagtatgagacatcctggttttgtttgttgaagctgagtctttctatagagcccaagctggcctccaactttcagccctccttcctgtctcatcttccaagtttccacatgctgggcttccagctcgttgtattatttatttgtttgcttgtttgtttgagttggtatttcactagatggccttagctgggacttgctatgctaaggctgggtttgaacgcacagagatccacctggtcctgcctccagagtgtttgataaaggggtgcattaccactctcagccttgctgattgttttatttgtaatctaatgtctcatacatttttggtgcctccagctttctggaatcaaacaaagataaagtaaacattttaattaagtaaaatttatttatttttgtttttgaggcagggtctctctatgtagtcctggctgtcctggaactcgatctgtaggagttgttcaagctggcttcaaactcaatagagagtcctcacctgcctctctctatcaagtgccattaaaggtttatgccaccacacccagataagtaaatattttatttttaaaaatcattagtaaataccactgaacaatcattaaaaaaaaagattatattgtttggggagtcaatttgttttcagttaaaaactagtttgcctgattccataccaccaactgcaaatctaatgatagactaaaattattgtttgaaaagccacaagtttttttttttaattttccatgaaacattttttgttgtgtcaaatatatctacagttgttgaggtgtttggagctgcccaagcaacttaagacaaaggaaagttgtttatttatttttatgtgtatatacgtacttatgtggtatgtgtacatatacatgcgtatgtggcatgtgtatatggatgttcacatgcatggacatgtgcacaagtgtgtggcatggatgtgaaggtgtgatattgacatcagagtcctcatagctttccagttgaaccagagcacacagatatggctagcctagtcagccagcttggctttggatccctgtggatatcatctgagtattgggaattacaggtggctgccatgcctacttgacagttatatggtgttttatttagggtttccactgctgtgaagagacaccatggccaaggcaagtcttataaaggcaaacatttaattggggctggcttatagtttcagcggtttaatccattatcatcatagctggaagcatcataacatgcaggcagacacggtgctggagaaggagctcagagttctgcatcttgatttgaaggcaattaggagacactcttccacaggcagtcatgaggggaatctcctctgcactaggtgaagcttgaacatagactctcaaagcccccctacacagtgacccatttcctccaacaaaccatacgtcctaatagtgccacttccatgggacaagcatattcaaaccaccacatatgggttgtggggatccaaattccagttctaacccttgcacaccaagtgctttacccactaagtcattgggtcagtgcaaaaagtgtttaaaaagtaacagttttattacattgcatgtcttgtgtagaggttcctgacatttgcacccatggaaaggagatgataacttgtgggaacttgttctccaccgtgagtcctgggaattgaactcaggctatcaggcttggtggcatgcatctttactcatcaaagcatctcaccagcaccaaaactagtaattggctttgggcgtgaaactaacacgtggagatttcagttagattctccctcctctcaccaccaaaagaaatgagtaatgaggaaaataaaactgccctctgagagttaaactttaagattgcatacagtgagcaccagtagagataagtaaacttgcctttaaagcacacactgacctgactccactgtgatttgatttttattgaaagaacattgctaagaggtagctatggaaacagaggaaggaacacacaggggcacttcagggcaggtagccatccaagtgctgtcaaggagaaacgaagcctgaatcaaaatcacagcaggatgtccctgctatattggcaatcaatgtagaaaactgcaaccactagaaactcaatatttatttcaacttttgaaacaaaaccatcctcttgtggaaccagataagtcaagaaatgtcctcgtatataacacttgttctgaacctctgctcaccaagcatcttctgacccctttggtttcttatagtaaatgctgtatctagccaggagcggatcccgtgccttgaatcccagtattcaggaggaaaaaataggtagataactggcttatcctgggcaatggtccatgcctttaatcttggatcaagatcaacctggtctacctggtctacttagtgagtttcaggacagccagagctacatagtgagaccatgtcgggggtgggggggggtgtctctcaccagctctgcagttttgagcatggatgtatacaagtcacagtttgtgatggctattctgggttatcaacttgactactatctggaattaactaaaacccacaaatgtggaggggcttgcctgtgaggatttgtttgtttgcttgcttaatttgaagtggcaagatccacttctttcttttttctttttcgagacaggatttttctgtgtagccccaactgtcctggaactcactctgtagaccaggctagcctggaattcagaaatcctcctgcctctgcctcccaagcgctgggattaaaggcgtgtgccaccactgcccagtggaagatccacttctaaactgtatctttgagtttagaaaaaaaagttaggagtgccgactgtcctgagttcaaatcccagcaaccacatggtggctcacaaccatccgtaatgagatctgatgccctcttctggagtgtcgggaagacagctacagtgtacttacatataataaataaataaatacataaatacataaatattagaaaacatacctttaatcaggatcttttaaggtgggaagactcacctctaatctgggctatgccttcagctggaagcctatcctatatataaggacattgaagaaggtagcttttgctatttgtcttctagctctttcctcactaacaagagtccatttcttcactggtattaaagtcttctttgggattccagtatgtactgaaaaccaactgagaaatctagccttgtagactgaaaaacctattgaattcttggaccttctgttcattggcagccattgttggattagctataccagagtccataaatcattctaacaaaatctctttctatatatacatagagattcattctataaattctgttactctagagaaccctaatgcacaactcttagaaactcatgaattaatattctgtttgtacatgtcagtctcataaccaggtagatgtcagcatatttgattgttggagggatcctgcattgctcaagaaagatacttcaagtccaggatacagaagactggttctaatggattgtgggaaaataaccaaggtgttttcttggtgaaaagacaggcctctctctgtcctgttctatcaatcagcaaattatgtctcattttggaaggtctctgaaggggctaagggttatagttcagttggattagcacttgcctaacatgttgaaggcaagccccagattcgagccccagaaatgcaaagcaaacaaaatctaaaacaaatgatcacaaatgtcaattggggaagaagttacttgtggttactgcgctattattttatggttgttctaacgttgtggtatcaccccatgaatacatgccagttgcaagcggaggagtttactcagaccaggacaagaatctttggatttattatacactatagatatctcataaagtagagaaatatcacatactcgtggattaccttctttccgttggggaaaggaagaccaaacctagagacttgcatatatgtgacaagatactacgcggcactgaggtacatgctcagcccccaggtagaatattatcattttccttcctcacttcgggtactgccttgtctctactatacacttacctagtaaacatctgcatgaatgtctctttttttttttttttttttttttttggctttcgagacagggtttctctgtatagccatggctgtcctggaactcactttgtagaccaggctggccttgaactcagaaatccacctgcctctgcctcccaagtgctgggattaaaggcgtacaccaccacggcccggcctgcatgagtgactcttaactgttagttttctctgttaggtagttgttccaagaggtaaacattgccagaggagtcagaaataaacagtgccttattttacaccaaaattacaaatgccgaaggtggcctcagcaaagcacgccagtcgcttttgtccctaacacttggattatttttttcactccgaggtaacttcggtcttctcaaattgccaccacaccatggcccctcactttgccccccccccccccctaagaacattcggtcaaagcgcaggttgtaaacgtttatgttcctccatcagttgttgtcaatgcacggagacaaaccaagtcgtgattcctcacggagggctcaaggtttttggaatcttcccaggtggaaaagctttgtctccgaaatggctctgcttgacgaactccctccttccagtaggaggtagcgttgccctccgccgcagtcgagaagcggcggaggctgtcacgtgaccccgcagcctcaacccctccaccccccccggggcggtcttgcggagatttgccttacgtacgcaacgtcatgacgtagcacgtaggggctggctagccgccatcttgcttctttttctcgctcgctctcaccctctcaggaggtagcgaaagtgctttggcggtttgtacggcggtggctcgggctttcgggaccgagcggccctgcggacggtctctcgaggcaatctcccctcccctgaccctgatccgtccggggcgagccccttggaagcgcgcagacttggttctcaaccctggcgggtaaggagagcgagggcgtccggaccgtgaagaggcccgatggaggagggagggaaggcacgggcgctggagccaggcctgggggcccgcggcgtctctccctgggctcccggcgtcgtgctgtccgcggagatccggagcagggctcgtcgcccatgtgcgcggcgtgtgctgcggcggggcggccctgcgatggccgagggagcctccgcccgcgcggggcctgcgcgcgccgtttttccacggcgtggaggacggtgcccgtggcggctccgagcgctcttagtgcctgcggatgctcctgtggtgatggctggcgtttgcagccagcggtgtgtagtccagggcggtcgtagaggctctaccaggacccaggaccaacgaaccccacttccgctggggacaagctgaacaacttcttggaggatttgagtagtcttttcctccctctaggccgctccagcccggcatttgtgggaatacggctcggctgctgcctgattttcagagagagcgtttagtattactggttgctagagtagagaccctagttaagaccgaagaaaaatagcatgggagccagtgaggactcttgcttgattttgcatataaggaccgctctgatctctttaaaggggatgtatatttgtttgaagtgtgttcaagatctttggggtggggggatccaacttgcctagtaattcctgactcttaaaactacccggatttccgcattggctggtcttcaacctcggttcataaattcataccccagcaggatacttagaattgtacagtaggcggccctcctgttagggtttctctttgggaatgcaccagaagaatcggaagatgcttgcttcatcgagtgctcaggagtcaattcccgctaatagacgttacagagagggtggtatgaagcggccaccacgtctgacctctagcattttttaaaagtagatttaagcttccatgttggtcattaagatgctgctttggctggagccatttttaggtgtgtgtcacagatgcactgcagcatcttttctggctggctccaaatgcattgattctccaaaaattagaaatagattgagtttgcatatagaaaagaagtttttatatgatttttctgggatgaatttgtcataataagcttttgggtttttttggggggggtgtctgtaggtgtgtgtgaagaacatagaatgctggctgatctctcattacttaacctctaactgtatgctctcaagacctttatatacattatcctttttgatcctagtctttgaggaaggagctcttatacttggtttacagatgaggacaagatatttgagagatcgaagtaatttgatcaaggtcacaaatttgtagtggtgctgtagtcaaagccatactttctaaacccagaggggatgctctgaactatcaaagtgttcatttggtcttgtacatttataattgttgctaaaataaggcacatttttaactggtactttttctttagcttgcttgggtgtttgaacattgttacatgtgaaggttaaaatgctgccagatgtaaacgtagtgtctgtttggtgtcataggaagactaggggaagacagaaatgggcttgaggccagcctaggctgcgtagtgagagcttgtgaatgttcagttttgttttgtttttgagaagtgattgtgagcccatcccttcattataaactaaagatgatatcagtacctctcaggcttgctgtagaatttaagactgagtaatgctcttgttactgtggttagtgcatagtaagtaaaaggacagctaaagatgaagggaaagcaggagagtcctggaagaagaaactagtgttcaagcagtaaaatctgttctcagaatagcctaagtctttggatccgtaagtagtttctttttcctcttccactcctctttacatttacatactgcactttatttcataagactttctcctttgtgctctgtatagtaaataaccctggcatcagttctagctcagaatgaagtgcagaatttcttcaatgtctttgaatataatactgtttccttgagtctatgtgctacccccaaacccccacttccagttattagttagctaggtggtagctttttatgtaatttctgtcattctgatatctgatagtaagtaaaaggacagctaaagatgaagggaaagcaggagagtcctggaagaagaaactagtgtttctaagagttcatcattgataaaatgcaaaagaagtcaattacatacatgtttaggaaactgaatcctcttgttttgggggatgtttgttttgaggcaaaggctctcttacagagccctggctgttctggagttctgtatatcaggctctggcctcaaactcaagagatcctcctgtctcagactcctgggtgctgagattaaaggtgagtgctaccgtgcccagcagaaagcatcccacaaggaaagcagcctgcagttaatacccaagttctgaccaaaacactttgacttcagaaaagcaggatttatttgttgccttagagtggagtgacacagtatgtgttaattgttgctaagaattctgagttaatgttagtttcctgagtcacagcatttttaggtcagtgataccatagatgtatcaatcagagtttctttgtggctttaagaattctttagagtcacttgtgttgtgttttccttttagagctaactataaacttgtctttgtaccacttaccattttattctagagtttagtagcaggacagtcatgtttaggagcctgtgtctttgctagaagagccagtcaaatgaggttattactgaagttcaacaagcaacttttgtttcattggcagatattggcatatattacctaggatactaaaagtattactgccagtgtattggattcacccttagaggcactactggatgctgaatattaaaggaaggcccaactagcatatagagaaagcattactagtattttttaaaacttatccaggaagccatgtcatggtagctatctttaatcctaacactgaggcagaggcaggctgaactgtatgagttgaaggacggccagggctacagacacaaagaagccctgtctcacaaaactgctatctaggaatttttcccagttagtcttcctttcctgggcctttcccatggttctctcacttagcttatatggtgggtgtcatagtttatttacattgaatagttagaaataccaaagattgcatcctcaaataaggttaagtgagccaatactcattgtgaggctgatttgcatcacatttttctggttttatttgagactggttctaactggcttagaagtcattgtgtagactaggctgcccttgaactcacatattggcctactacctctgcctccccagagctggaattaaataaaggcttgtggccccatagctggcttaattttcagaggagtgtggctttgtttcttattaccaagatacttagtcttaaagaagaatggttagagttaccaagagcaggaggcagaactctcttgagttccaggcttccctggactgcattaataaggtgtgtgttagtggggggttaccatagaaccggagagagcttttgtgtggcacccatgaggcttaggtttagtccctaatactgcccttcacaccacagaaagctcccttataattttaggattaatacctgaggatgaaattaaagtcatgtgattaaactagagaaaagttggtgtagaaaaaaaaatccactcagaaaaatatatcatgtctggttaattacgataaaggaagacattatggctaggagataaaaattgtggggcagaaaaagtgattcagtgggttagagtgcttgctgtgaaagcaagagaacctgggttcaaatctccagcactcatgaacatccattgctacacgggcctgtaaccaagagtagtacacgcccagttcagtgagagactctcaaaaacaaggtagagagtcttagaagactcctgacagtttctggtctctgaatataggcacatccacacaaatatcaataattgtaattttcttactgtgtgtgtgtttgtgtgtgttcctaagtttcacgccatagctcagagcttggcctcaaactcctacctcagcctccctggtgctaacattacgggcattaacagtcatcctcggctgaggtttttgagtgttgtgtttgaggcagaggttcattataatccacatcctcctgcctcagctttccaagtactggggttacaggtgtgttccagaattagggttggtcggtcttgcacatgcttgacaactattctacctccaagctatagcctaattcctattcctttttaatatttgccgaggactctacccagccctagggtaagactgtttggggaggtggggcactacggtaaactttacaggaggattcttacattacaacactagaaaactttttctcttacgttgatagttatgattacctggctagtaagttttgactttgtcttcaacccatgtgttaatactttatttccccatttccacgccctgaccccacctgtgtctctttgtgtattcagatttgtcacccttttaaacctcaggcttcagactactggaattacaggtgaatttacttttaattaagtaaatttgaaattaaaatgtacatgattattatttggtgataagtttttttttaaccatctaatatctttaaaaataaacatgtaaactcttaaattctaatctgtgggccacttcaaattagcattccaccagtctgtctttccatccgttggaacataactgctataaaaaatgagtggtggataagatcaagcaacagttgaggtaatgaagaccaaaagtggttaaaagcttagaatggaatagattcatgaaacaggaagagacagcggtgcagaaaaggatgccaactagtcctaaataggtacttgacaattgtactaggatgtcaacaagagaattacgagagtgattaagcaaagctactacagatatgcgagaaggccataatataacatagtatgagtactaaagttcagtgtaagaaacatttcttaaatctgtggtaaacagcctctgactgaggtgacatatccttggtgaccccaaaagacttttaagtcaagtactggggggtggaaggttaagaggcaaggtggttagaaaaagtaatgaaaccttgagtttcaggtgtttcaatacttgaacgctgaactaactgtatttgaacttaggtttagttcttttcagttcgtatcagctgtcaagttcaggtctggtctcttgactttacaaagagaccattaaatgtgttctgtatcctttgaacttaatattctgtggtaccacatgtcatcaatcttgcctttatttatttgcctatttatttttgggatttggaggtgggtctctctgtagccatggctgtcctggaattcactgtgttgaccaggctggtctcagtctcacagagatcagcatgcctcttgtctgctgggatcaaaggtaggggctactgtgtctagctttagccatatttaaagtacaatcatgggagattagattaaaaaacatcactctggcagacaggcgggtggtattctgtgagtttaaggccagacaggtcttcagagagttccagttcaggtatggcatacatattgagatcccatctcaaacaagtcactaaattttgagtctgaagaaaagagatagtaattcagtcttccttcctctttccagctggtaatgtgtaagtacaggactgctgttgtggttctgtggtcagtgcactacacaaaggtactaggatgaaaaagataacaagaacttaagtgtagcccatcttccagttatgtgctcttttaaagataccagcttcttgctgatagaactctagttatttccagaaagatacattttcctatttattcagaggctttgtagaggcctttggaacaccagaaacaggctggaaaagtggatcagtggctaagaacacttgtgcttttaccaaggcgccaggtttggttctcagcatccacatggtggctcacaactgtctatacctccagttccatttttaatgcatattaaagatgtatattaaggccaggcagaggctggcctatgaatttgaggacaaccagggcacagagaaaccttgtctctaagaaaccaaaacatcccccactccaaaaaaaaaaaaagatggatattataacttactaaatacttttagtataaatgaaaaatggcagaggcaggcggatttctgagttcgaggccagcctggtctacagagtgagttccaggacagccagggctacacagagaaaccctgtctcaaaaaaaacaaacaacaacaaaaaaaaatgatgtgttaaatactatgtaagagcattttaagagttattatttagctaagcagtcatggcacatctttaatctcggcactcaagaggcagaggtaggcaaatttctgtttgaagccagccttgtctttcttagtgagttccaggacaatactgagaaaccttgtctgaaaaacaaaagcagaaagagtccttatttaatacaattttatcttcaaacattttgtttgaattcaagttttgattttttttcaaaatatggctattgtatggtagtctaattcgagtctgctttgagaatttaaattttttagatcaaatcaaagaagcatagtatgggaggtctagaatagctgttgaaagttaggaaagtggatcatacaaatattagtttaaaagtgggaaaagaaagctgaatgcttcttcatgcccgggagagagtgagtcactgctggcttcaggtcatcctgggctacttaataagtgactttctcttaaaacaaaaatcaaagagtatttctggtcaggttgtacaaagacaaaacatcttccaaggcaggaggagtattctgacactttgaagatgaaaaaggaaggtgtcgtgtaatatgtatggcaaatttgaacatggaaagaatgaaagttagaacgtgtaagggagggatgcacacgctcttttaaggtttgaagaccaacgtttcagtgatattggaaggatgctatccttaaaattccagcccctactgtaaccctttggttatgtggaagatggagaaggaagatgcgcattgtaaaataattcttttcctcatagcttttaacattttggccctccctttactgcggtcatctctcacagatctcatcagttcaatgtttgactggcccgaaagccccagggagcctcctgtctgtctcctcaactctggcatttgaggtgctccacctcacctccactgcatcccagtcctcatattctcattcaggtttgcaaagtccattttcccaccacgcgctctctctctccagctctaggacagggctttttaacctttccacatgtctgtctgtctctctctctctttgtctgtggtccaggtatatgaaatatacaaattaaatatttagtggtgattatgaatttattttaatacagttcttttggtattttactttttaaagataaaaactttacaggtgattgtttggttttttgcataaataagttttgtttaagtgtttgatttgctgaatgtaaaaatcttaaacatttttcaaagactgactggtacagtgcagagaatgacattttgcatatcagaagtatgttaaggaccgtcttagaaatttgtaggaattgtattgtagactggaatgagcttgacaaagccatcaacttgagaagcaattttaaaatcaagcagtatagcataatacagtctgaaagtaaactaattagatacatcctgaggaatattgttttccataattaaaccattttacatttctatacaagcaaaaaacgctatatatacagtaaaacactgaaattcatagcacacaggcttcaccagtattaaccgaggtgttacaggctgcattgttgcacggcatgaggttatacccggtgaagttgtccagacagcatggttgagtgcttccagaaatgctttggattcattgtaggattgcaaattcagaagccctttactgttagctacattttaggtcatgacccacataagaagctgattaatacagcagtggtttgtttgttggtttgtttggggtttttttgtacaaaagatttactagctagattgtttttctaattataaagggttttctctgtcctggaaacataattctcttgttctcataatccaggttgggtttcaacgcttgatacccctgcttccatcttataagtgctaggattataggcatgtaccaccatacccagcaatgttgtttccagttatgacctgacagttatttgtattacaccttggtttttaagaaatgatagtttttcatattttagaggccttcaacatatttgctttgcaattatagaaaaaatgtaatttaaaaccatttgatgttttctatacagagaaatgaacacttgagatggtagacagggcagttgctctgacctgatcactgcacactatgtgtgtatattttatatgtctctcacacattgagttgcgacatcatgcctcaagtatatacttgtgttaattaaaatgtgtaaaattgtaggatatcattttagacattcaaattactattgggtgcaatgggagtaagaccttagaaggtgggcaatataatagcttgcttttctacttggaagccacctgtggttgagaggtggtgattgaaggtcaccatagtcaatctttaaataagatgtatatggtaaggtactaccatatcccaaactgcaagtaccataataacattaaaactttattctacttccatcatttcttttcagagctctttattctaagaagctgatagattctttttatgtgagttatatatgtcactcctggataccccccacccctcacccccacagacacacaatgaagaaagtcaggggaaaaggaaaaggtgcccagcatataggcataggtagggagaattcattttgcttgtttcctagattcaccttcgtagaaacaagcacaatagcaaatgctgtgctttggcaaagtcatttcacagttcttgggttatctggttaattctgaaaatggagaatggcatgattttattttataataacttactttcagagttgagcatttacaaagtttatgattggcctaggttataagctggccagggtggaacctgcagtagaactagccaaactttgaatttagtatgataagttcagtagaatagttaaagtcccagatctgtacattaggtttttgtttgtttgtttgtttgttttattttggtttttcgagacagggtttctctgtcctggctgtcctggaactcactctgtagaccaggctggccttgaactaaaaaatccacctgcctgtgcctccctaagtgttgggattaaagacatgtgccacaacagcgcattagatttttattaatgcaacaatgtataaagaaattcatgtttgtggggagatagttttggaggctctctgcctgtgaaacccagtttggttacccttctcttggccataggcaatcctcctgccatagccacctgagtagctactacgattatagactcctgccacatgagaagaaattgtgtttttaaattgtggctatatagttattcttaaatactttaaaaggctgagatcttatcttatggaagcattaatatactgttgctctttcagatgtgtttatgatttcgtttgttgtgtctgctttccagctttatccaagttttaaacaagagacagaaaagaataagattaggacccaggagattcagataactcctgctcaaagcaaactccataaatggccaagtcctctaacataataaagtggctggtgtacataacgtgcctgtagtcccaacacttgggaaatagaaacaggaggattggaaggtcagaaacatcacctacataatgtgaaggtgagaccaacttaaactgcattagacccagtttcaaataaattagcatgatgtcacatataaccagtacacggctctcatatatcattagatgacttaccacatctaaactatgtaaatgctgcataaatagttacactgtattgatgttttttgtggctttttaagaaaggtatttatagtttttttttttaatatttcctatcaaaaaattggtttgtgggttctgtacttcattcatatcataaagtgggtttccacttttttgtatttagggggtattaagcctggcacttgagtaatgcttcacaaacagaagattgaagaattaaataactttctagaaggtttatattttgtgaataccttgaaactaggatggcttggggtgctgaatgtttggtcataattaaatttgacattttaattaaaattgtagtaataaaatactgtcttctagacttaatacaccagtcattccctgcccccaatataactaggtggcttaaacagcagaaatgtatttctcaaagcaatggagactggaagcctaagttgctagcatggtttgtctttgtcttgcttcccttcttacacatgagcgctttccattgttctcccacaacagagtgagctctcttgtcccttgaaatgctgacctgttcatgacttttatgtcatcatctgcgtttctaaataccatcacctctgggttagggcttcataatttcaggttacacaaattcctcttataatctgtggtgctttttatgttatttcacttgaaaatgacattttctgtgtaggtgcgcatgtttatttaatggaggctcactcagtgctcataatgatttggtgttctagattgtagtacattgtgaggaagaaagcatcagccatgtacagtctctttaactttaaataacgtgttacctcattttaaatgtttatctccttaatgaaaattgttgtaataaaattatcttggacacttcttttgaggcacacctgaattaatattgataccattgttttcaagctttatagggtttttttttgggcaattttcttaatttataaattttaatgatttagacttttaagtacttctgagacccagtctggtaattttatattttgcatgccaaaaccttagctttttgaaaggtgggtcccaaaatacattgctaaattagaatatagttcaataatgtttataagtgtgagaatctaataccaaagtttagtggtgtttaagactagagataagagaaaatactcttagaaattgggggagaagaacttatttgtggagaaggtgtcaccttttttaagtccttacaattttttaagagaggaataagcttttccaaaggccagcttcaacatctcaggtgctgaggctgggtgtgtactctgcaactcagtcttttctctgggggagcaagacttaattctctgtggccaatgaagagggggaaacatacacacacttggtggatgaagcaaggctctaacaactttgctttttctcttactcctttatatatcacctaagacaaaaattctcaacataagatcaccttatagctacaagttacatattctcaaaaaaaaaaaaaaaatcaccagaaaaacgtattcttcaaaaacagattaaaatcattacactgaggggaattgcatgatgactgactatatattcttttgaaacccaaaccttactgaacattttccatctatctttgcacaaattcatcttaacccaaagcaataattcttttgtcgttgattaacaattttaaacatgccagctctattgtagctaatttttctgttagctgacaacagtttcatttaccaagaaaccaattttttttacatattttttttgaagccttacatagctagactatcatctgttctaccttcccatggtgcacactaaaacctgtgaccacatccttagatcacaagattaacgaactcaacctagaacaagtgaatgttttctttgcgtattaacttgtctcaaacctctgttcctttctcaagtcccactctgcgctcgcagggcttgagaggtcacggggctccctttctagcctagacagccctcactgctctgcagagaagggcacagtctgtctactgttggttctttgattcatcttcctggcaaagcaactgaaaccatctcctgagtctttatcaaccacaccaaattcctaaaacgatttaaatcaagtcaggaattctgtaaaatcagttcatttaaacaccattattttatagacgttcatcttcatattgatctgcagaaaatttgctcagtagattgggctatcttcctgaagtggtcacatcagaccacaggcagtgagggtctccccgtgcccattaataccatgctaggtacaggatgattatagcaatgataagcaggagaaggcacagcagaagcaagaagcaatttggtgataccccccccccgggggggggtgctgctttgcctctctaaggtacacccatcacagttttgcaaaactggactatttccaggtccctcacttgctcaccactgctcctccagatggtgtccaccaacacttatttttctagaaagttaaaagatggtagagaatgtccatatttctttatccaggtgtcctgcctttaactgttttaccttattttctttgtcttctgtgtaaacatttacttctgcacacactgacacagtttttatgtgtttggtttttaatatctaggtctaaacactgtagtctctgaaaatcatattcttatgtcaataattttctgagagtagttcttgaatttgatttagtaaaaagcttgattctttgtacataactcagtattgttgctgacagacactctgggggtggttgctgaagtcaccagtctccttcgctttcctctctcattcctttctgttagtgctgttgtaacatgcctgagacaacctcccagttgtagtggctgctaagaaccagaggttctgcattcaaatgccacttgaacactgtcttcacttgaagtaatggtagaaagacaaaagatggtcactggttagttagctttctgacttcacatttgctttttatacctttgcaatctcaaatttctaagctcttatctctgcttagtgcatgaggacaatatatttcctggtcacaatttctttggtatatggtaagcactgagtaagtgtacgactgtagggttaaaacatttgctattgaagctctgtctagaaacttatatgatattttagtatatcagcaattaaaaactgtctcaaagattgtagtttgaaggaatttgggttttttgtttttttaatttatattttgacaaactgctccccaaatttcatttatatcttttggaaaccagctactttctttaaaaacatccgttccccctatataccccatcttttgccttataaaattttatgcaaaatgtttgtttatttttggccaaaatctgttagaaaataatatacagttgtacaaaatctagaaaatacatatgcaccatatctaatttcagtggaaaatgccatttttactgggttttctcagtcagaatctctcatttttcagacagaatgattatttcttaatgctaaaagcagggttggggtgggcggcagttattttaaaaatgtttttacaattgagttcttcaggtatttagggaccttagtgtgaatgatcgtgtattattcttaatattatacaactatagaggccttcttaaaaatatttgtattgccaggcagtgatggcgcatgtctttaatcccagcacttgggaggcagaggtaggcagatttctgagttcgaggccagcctggtctacaaaatgagttccaggacagccagggctatacagagaaaccctatctcgaaaagccaaaaaaaaaaaaattattttatgtgaattggtgttttgctagtgtgtatgtgtgtgagggtgttggatcccatgaagctggagttagaaacggttgtgaggtgccatgtgggtgctaggaatttaacccaggtcctctagaagagcagtcaatgcccttaaccattgagccacctctccagtccagaggctctttttattaatttttttaaatttcatatgtaagtactatatttacataatttcctctccctccaattcttactttcctccattcccttacaaattcatagcctcttgttctttaattattttttattagatattttctttatatacatttcaaattctatcctgaaagttccctattcctcccccacccactcctgcttcttggccctggcattcccctgtactggggcatataaagtttgcaagaccaaggggcctgtcttctcagtgatggccaactaggccatcttctgctacatatgcagctagagatacaagctctttgggtactggttagttcatattgttgttccacctagagagttgcagaccccttcagctccttgggtactttctttaactcctccattggggccccttgttccatcttatagatgactgtcagcatctacttctgtatttgccaggcactggcatagcctcatacgagacagctataacagggtcccttcagcaaaatctttctggcatatgcaagagtgttgttctttaattattattgttacacatatataattataaatagtgttgctcccatggacatgtgtttagcatttgactccttgggattggataacctatgagggtctttgtccctggagaggactgatttctccttctcttggcagctgctaatagcctggagctcttaccagcattccttctcattggagtgccaattggtgcaaattctatgcttttagaaattatctatgtataaggccaggcatggtggtacatacctttatcctttatcctgggcagaggcaggaggatctctgagatttcagtgttagcctcacacacgcacacatatactctctatatatacatatgtatatatatatatagagagaggcggagggggctttcttaaaaatatatnnnnnnnnnnnnnnnnnnnnttaatattcctttattcaggcttaggggctcagccactaaaggctatgcttacaaccaaaaatatgcctatattctatgtaagttgaaaatgtgctcagaagagaaatatagttaggcagtggggtgcaatcttaagtagtttaggatgatcagttactgttggatgtagctaatactaaaattttctttttcttttttcttgtatgcattacaaagactacttttaaggggtgtgtcaggaggttttggactagatgagtttccaccgaaatgtcggagaagtcaggccagagcacaaaagccaaggatgggaagaagtatgcaacactcagtttgtttaacacttacaaaggaaagtccttggaaacacagaagactacaggtgagtagatgcagtagcccacgttatctggtttgtgggtttgttgatgcaaagacactgtgtctaatgtgtatgattagaagctagggtgaacccgtttattttagcctttttgtatgtattcacattctttccagggaataagaattaaatattttacctttgaaaatttgttttaattttttaatgatacttagatgttgtagatgtgtgtgtttgtgtgtggatatggggaagtgagtgcaggtgcctgcagaggtcagagctatgatatatccctttggagctgaagttacatagagataggtgtgacttagaacttaacagctactgttcttaacctcacagaactttgtatatatacacttctctatacacttgtgtctataggaaagaaaccatataagagacgaagaggggagtgggtgggtgtgttcgtgctacagggggaaaaaagtcctgtctttttgacctgggtcccttgcaccaccagtacatacagtgaaaagtagagcatttgctgcagtattgtgaacattgtgggctttgtttgtggggttagggggtgatgagacaaggacttgttgctgtgtattttagttagggttttatttactgctatgaagagacaccatgaccaaggcaaggcaactcttctaaggaaaacatttaattggggctggcttacaggttcagaggttcagtccattgtcaacagggtgggatcatggcagcatccaggcaggcatggtgcaggaaagagctgagaattcttatatcttattctgaaggcagacaggagaagactggcttccaggcagctaggacaagggtattaaagcctgtatccacaatgataacacttcctccaacagggccacacctcttaatagtgccactccctggggccaagcatatacaagccatcacactgtgtaaccctaaagggcttagaacttaacagtggatcaggccagcctccaacatgaagctattttcccactttcaccttccaagttgtgtagtttgaactttcttctcttaacattttaagttttttacttaaaatagattgcctgaaaacatttcaaaactagcatttccccttcccatattcccagtatatagtgttccatatttagaagttaaggggttctggtgggtgggtttgttttgttttttgagacaaattttgctggggtcccaagatggcttaatattttgagtggattgtttactttttaccttcaattaatgttgtaggttataaactgagtttatagagctctactttaacattggggactagtcagagattgttaactcctgttcatgtatattatttgttgaataaaatgtataatagagtgatgaacagtagatgttctaaggaaattgatgttactgatcttttagttgcagctcgacatgggttacaaagtcttggaaaagttggtatttcacggcgaatgcccccacctgctaaccttccaagtctcaaagcagagaacaaaggcaatgatcctaatgtgaatattgtgcccaaagatgggacaggatgggcatcgaaacaagagcaacatgaagaagaaaagtgagtcagaatctgttaagaataaaacacttctctcattgtaggaaactgccaccgctgtgcactgttcagccaatagaaacactctatgacacttataattcagagagttcttcctcagatgaaaacacaagtcagcttactctttgatgcctactaactccaagaatagagtcttggacttctcttaacactattacttagcaaaaacatgaaaaatgaacttaacattctaagaacaaatctacaagccaaccaatatttactgcaaactattatctgagtgtggaacccagcattctgctttaataagtccttgataaatgaagagttaaaaagataatatagatattataactcttttgtggtgttatatttaaagtgtgaatagacacatttagtgtaaatatataataactgtgtatacacacttttagtcgttaggctctttgagttcagtagcattagccataagcacagatgacagagtggctaataaacaggtttacttacactgcatagcctgtaccatactgcctcctctcccaccctgttcaaaccaggccttcactttctaatgggaggaagaaattgagtcagaaagaaataatattaaaaaatgaaacaaaaataaggaattggttctgttgcctaaattccaagatgcctaagaattctgactccagctttgaaactgcttggtgtatcatgggtgtttgggcattatttataaagtaagtggaaaacaagaattagcactgtctgccccaatccttattcattcagtaaatattttgtcttctgtctgtcaaggtttgtaccagattattagctgggctaaatactaagtagttattggtcagttggtaggatttacattgtttgcatggatcttatcaaatctccatgttcctgcttaatttctatagtatattcgatctcctttgtagaaattttagtttgctggagaattattttatagtagaaagggagctagggctgtgtgtacaaaaaaataataccggcattctttagtttcttgaataaccttttcatttttaagtattgctatattgcaaggattgtataaaactatagactttttaatcctgttttattcatgagaatggattagacagattgctgttacatgtttgaaatgtaatgcaatgatgaatctatcatctgacatttggagtttgcatagcctttgcccctaattatcccagtgtaaactgaatgtctgcatatacttacagttctgttgataatgtagttctttaaaacattattggtagttactttcagtatcacgttgttttggtttctttttaaacaaaatggaaaacaggcagctgtcatctcagttatttaaagggagagatgattgggagaaaacagacataactttaaaggtaatgatacaaaggcaaaccacttataagagatgcctctgtgatttattcgtattaatccatttgtagccaaacttagcagacttaatttacatacatttaaacatttttttagtgtgtaatatctgaaataatggattaatatttttttaaagagcaccagaagtgtcaccagcacagcccaaacctggggttgcagctcccccagaagtagcacctgctcccaaatcatgggccagtaacaagcaaggtgggcaaggagatggtaagtggacatgagctggggggtctggtgagggtcagtggttactgaacagccgtgcaggaaggaaaggaagagagcattgcgagaggatatggtcgcatccttgaactctattaggctagttaaatttcactgacaaaagtcatatgtgatctaatctaaggagaatctctgagttatcttctgcattttaaagaacatctatgaattaaggaacaacagacatggcctgtacccttaacatttcaatgaatacaaaaacattgtatattgatactggattcctttccctaattatcccaaatgtcttttacagaaatcctcctaggatttctgggtagtgaaaattagagaatgatcataaagcacagtagctataatacttctaaaaaatggacacatatttcatgtatagtgagttgctatttagtggtaaatcaaagtagtaaatgaaatgaaaacatcttagccttgttcgggacttggtgtttagtcaaagtatatttcagtaatccaatctaaactagttgttaaaagattttagcagagaagttggtcttcagtagtaggagtcataatgaaagagaaacaaacactcctgcaacatgtctgaaaggtttctctcagggttttgtgtcctcatggctgttcaataacttttcaagggcttaggtacagtttatacgatttattgatataaacaattattataatgtagaataattaattcatcagaaaaaagcaagaactctatcctgggagggttacttgaattatcttcattataaaagttaacttaatgtgtttttgaaaaaatgtttaggaatccaagtgaatagtcaatttcagcaggaatttcccagtctgcaggcagctggagatcaggaaaaaaaagaaaaggaagcaaatgatgaaaactatggacctggacccagtttacgccctccaagtaagaatgctttctacatgttttgtcttacaatgtcacctcatgtgtgttcctgtgtatttgcctgctttgtagagactagtgttgtattcacttaaaacagatttttttttttgtgccaacaatagtactgctgtaactgtagagcttgttggaaatgtataattacatctgatttaatctgtaagtcaaaatttgtaaggtatccaggtatcttctttgtaaataataggtgatccttttgtccttatctttgccctgttcattccctattcccttccctcttctccatatgcatgtatctgcctcagcctcccatggcttgggattataggcatatgctactgtgcctagctgtccatatccatatacacacatactatctatctagagagattggtttgttttggttttaacatattttccccattgtgtaagatctacccatttttatttttatttttttaatatacttttgtttgtattccatgattctttgctttctggactcaaaatgaaatattttggataatgaaggttactttatgtgcattataaagcataaaataaaaaaagaaataaatttttgagacacatgtaaatgttttagcttcatgttgtcatcatgaaacatttcaacagactatatctatgagattcctctagcaaaattttataggtttatattttaatgttatatacattgcattttacattttaacctatttcttgtcaatattccttgtcaaacttacatatatcataaatttttgtttaacctttataacataatcaattactcattaaaattggatcagctccactatttcttcagttagttacattttgacccaaaagttatctattgtctcctaataaatgtggcagcttgagtcaacaaactgaacccaacacatgacctcccaccatttctgaaggaatccaaaagaggcctggttaaacgttgtgactaaaggattctctcaaagccccctttgctgttactgttcatgacgtgccttccccaaaatacgtgatggggagaggctaatatgaaagagtggactgttttctagaagggggatatttgtctcttaatagtctgttcaggatttccttaaaaccagagtggttttacttgattaaagatgtaaacaagataatgtcactgaatctgctcctctggtcccatgtaattagtaagagttgactaaagtaaatggatgtgaacatcccccatcagcttttctgagttgtatagaatttcacttatcttccttccttccctctagatgcctacctgacagtccaagtgagaatagtggtttttgaaccactacagaaacactgacaaagctttatacaagcgctgataaccctcctttcatgggttgtcatggctgcctgacatagagcctttctgcttcacaatctatgactctagtctgcattacaagacagcaaatccccactcttactgtacttggtggcattttcttaaaatatgctaagcttgctgttgctgttatgttactaatattttcttaatcctttttgtcctccatcccagatgttgcttgctggagagatggtggtaagtctgctgggtcaccttcctctgatcaggatgaaaagcaacttggccaggatgaaagcacggctataacatcagaacaaaatgatattctcaaagtggtagaaaagagaatagcttgtggtcctccacaggccaaactgaatggacagcaacctgcacttgcttctcagtatagagctatgatgcctccatatgtgagtattgctaaacatggcaatcagtcaaaagaatattctactctgggactcaagaaatggggaagatgtagatctttggtctcaatagcatctaactaaagtctgattgtgagaatagtgaggtaaacaagtcacatgcctcagtagcacaagtagctttatcatgttagaccacatatttttacagcatattaagtccctgctcttaggagccaaaagcaggttgaacactatgagtttgaggccagcaggactacgtagtgtgtgagaccttgtctcaaaagtaaacataagcacaaatgttaattgcagtatcacaacttttaattattgtggaaataaaattttagtttaccagttctttgtgttaatgagtattttatattacagatttaaaattttttttaagataagttcattgggtttgctaaattgcccaactgatagttcatggccaataacaaagagcctaaaggttaagaattgtttgaattctaattatgtttttaaatctacattttgcttttttgtgagacaaggtctcgtgagtagttcaagtaggcttcaagattagtcctgtcccaggctattgagtgctgaagttagggacatgcatgctctattatgcctacctcaattaagttttacagaagagtagtggtaaatgccattctccagtcctggatacagtatttcatttgtggatatttttggttgtgttttaaaaggagaaaacatgggaaaatacatagctccattaaggtggctaaaattaaaaaaaaatgaattcttaaatggtaggtcattgttaggatcgaggtaatgactgatatttcttaggggtctcattccttccctgtgtgtagacgcctctgtgcagttcttttctttctttcacttatttgtgtcaagttgcttgtgctttgttccttctctctgccatgtcttaactgtgccagaaaagcaaaggaaattaagtattttttaaaggtgggaggttatagttcattgtgtttgaggccatgaccttaactcccccacagtgctgaaggatgatatcctaagaagtatgagagcatgactttttttaaaaaaagtaaggaaaactttataaactgacccggtcagtttgggcctaattttcaaattgtgcttgtagatttttgagcttccaggtgtggatattggaaggcgcatcaaagcaaagggcagagaaggcttcagtaccagctgcttctatcaagccagtcacccagtctacaccacaagtagatactgagtggttagagatagtttctgcagttaatgttatggcaaactccgaattttaagctatacacctcatagaattaacatgtctgaataatttaaagggggagctaacgtaaactaaagactgcatccatttttactcctttcgctatagtgctgtagccaatgcccacagatttcctcaatacttgatagttgaccttgagctggtgtttaattcaacctagtttcagccctgtgtggtaggaatggcccctttagacattacagtcacacaaaaagtcctttctaagtgtgatttccttacctaaaaagatttttttgttgttttttattgtttttttgtttttgtaagacctttttcagcagaagcaaaattatttcaggcttatgtgtctgtaaatgaataaatgtgttgagactgtctccatccagatcatagctgagtccttcagttaccagggtttgcataatctgcccccacccacttttaggcttacctttttccttgactggattttttttagtacttaattcatgtcatctctagagaaacttgactaagagcacattttctatgccattcttaacatctgtctgttatctgaagtgatttcctctttatcattgtttttctagttggtttacggatttgtggtttttacagtttgtgtcattacataagttaattatattaatgtgatatggaggttcttcagtgtcttagttaggtttttgttagtatttctagaggtgggggtgtgaaaacatatgtctttaagacaggcagatcccctgagttcacaactagctgttttagagcaaactgtaggccagccaaggctacatagtgagatccctgccttaaaaacaaaaaaaagacttcctggaatcacttttctgtaaatggttttttagtgaggatgagtggtggtctatactagcagacaaagttgaatattcatattatttgcatcaaccattcatacctcattacattttaagagctactcaaactgaacttgtgtatcataagttactttttttatcatccagatgtttcagcagtacccaaggatggcatatcctcctctacatggtcccatgaggttcccaccttcattatcagaagcaaacaagtaagacttagacaaagcctacaggggatatgtgctttaagattttttttttaacattgagggttcgctctcaaaagtataattatttacctcttgtaagctaaaactaaaatagtagctaggcgagagggagggagggagggagggagagagagagagagagagagagagagagagagagagagagagatcgattctgtctcagaaatcaaaaacaaaacccgaaatagttgagtattttaaaaatgtaattggcataaatttttgaaaacaggaaatcatgattctaaaactagtgataattctttttcttactctcctcttactgtagaaattttaggatcctttttaatggttctaattacttattttgaaatgaaaagaattgaactatttaagctactaagtatattttaatgatttctttatactcatgtcattccagggtatattttgctatagaaaaaattaatatcaaattgaaatgaactaaattccaatgttttaatactctcaagtcaatataactaaaacctgtgcattttttcctctgctctcccgttgattagaagccttcgaggaagaggccctcctccttcttgggcttctgaacctgaacgcccatccatccttagtgcatccgaactgaaggagctcgataaatttgataacctagatgctgaagcagatgaaggttgggcaggtgaggaacagttcatgaaacacttgaaactgcctggggtttagtttgacacagttagtggtgtgtttatgaactcactccatctatgctttccttcatttaccaggtgctcagatggaagtagattacacagaacagctgaacttcagtgatgatgatgagcaaggaagtactagtcctaaagagagcagcaggtaaatttgtgacagtcttgctattgatagcgtgactttgttgatagaacatgagctgttggtacaaagatgcttcattcatacggtttttgttttttttgttttgttttttttttttactacagattttctttatttttcttagcttacttaattgcttcaggatcttgttttatttatttattcattatttgttattccctaaaagcttattggcaaacagcattagagatttgggaaatggagctttttaatctctgttacttattgaagggcatccaagtaaggaatatatgggctaatgtgtaagaaacattgggcttttacgtgcccaatttgtagttttctcaggcatggcattatagtatgctatagtttcatgattggtcggtcatctctgagatacctgatatgttgaggttattttatatctgtctatctatatacatacatacatacatatatacatacactaatatatcttttgaaccagagtaaattagaatatagtcaataatattttcttttttttttgtttttcatgacagggtttctctatgtagccctggctgtcctggaactcactttgtagaccaggctggcctcgaactcagaaatccacctgcctctgcctcccgagtgctggaataatattttcagtatcacttatttatatttaggtgacatcttgagaggacaggcaagaaaaaaaagtgtattagattcatttacatcacagatgagtatccaatttgagcagctgctatactgctattttagttattacactttgacagtgtgaactaaatactccccaaaacactacagaaacatctcagtattaacatcactgagtcacaaacctgtcagtgattgctttatacattttcttcccttgaaattatatggaaaactaccccccccccccagaggaaaagtcattcacttgttcacataatttctgtttctttgttcctttcctcttctccattttggttcttcagtgaggatcaaactgcaaaaacacctgaaagcacagaaaaccgaaaagaagtagatgaagcttccagcactaaatcatcttctcagatacctgctcagcctccagtcacaaaaagtccttatgggaagggaccaccatttaatcaggtttgttgggcctgtacaggtccttatcattaccaatagtttggatgagttgatcttagaaccaaaattggagtgacttgagaaaggggtttttgtgtgatttgcaggcaggcagtgggtgctggttgtagttttgagctggattcacacataagatcctcctgcctctcctctgggtgctgaactgtcaggcatgtgatgtatagtacttgactgaggctgtgtatttttttgctgcttttattgcctgttaaatgaaattactgatatggctactaaaattaattgtcaagccaaaactgaagattaaatcaggtcaaagtagaggaatattttctcaaaataaacaaggcgctttaccatctactgaatgtcttctacatcgtgctacttgcatgggaaagaatacactgtagagaaatcttaacatgaagaaaatggagacttacaatacctggttattgtggaaaagatagcaaaaggagagaaatatatggggagcatatattttgatctcatgagttgagatggtatagcagtagctacattacaaactgaaagaggctgtaattatctaggtggtttttgcgtttgtacaaaacagatggaagaacataactgttagtaagctatagggagcaaactggcagtctttgaaagggaaaggaaattttccactctttgtagtaggtttgcttgttaccatactgatatggctgtgtggttctgtaaaaagtgattttacagtcactgattaacttctaaaatgaagacaggcccaataggttgactttgaacaggtttgtgttctcgttgagaaaattagtacactgactgtggtcataaatgtgtggggtaaatttttaaatctcttggtcttcataggaacgtggcccatcttcacacttgccaccacctcccaagttgcttgcacaacaggtaaattttaaataagtgttgatgtatactctgtatttggctttgtgaagttttcttctgttggaatgatgcttttatgtttataactttcattaaccagttgtacattgttcagtgtggcttttgcatgtttttcttctagttcatccttcttacctaacaagcgcactgagtacctcactaaggaaggaagcacagagctgatgtcgggcactttcacacttgtagtcttccttccttgttccctgacggcaggcagtcctgccacttactgtctatagagtgcaataccctgctcttcattctttttcatcatctgctctatgtctttgttctccatcatagcaaaattcttttagtaagttgagcttagctggatgactcataaatttaccatcactcccaggagtgctgcatgaacacacgtacacatctattgcctcttctaataaatttgatttccaagtattaatctaacagagaacttgtactagactatgccaagaaaaaaaaaaacaatgataataataatagtatggcacctaactcagtaaaaaggatttttagcttcacaaagaaaatctgtgactgtggtctagggagatagcccagtaagaacctgcgatacaaacatgagcataagaatatccacatagacgagaatcacacatgtttgtggtgtgcacaataatgaacaacaatgacactttaacttaaacagtattgcctgacattttttaacctctgtacgcttatatatgtaatgaacacattcatttatataaaaaccatatatacacacattcacaaagaaaaatatgagtggccagtaagcacatgtgctatctaataaccatggtaatgcaaatttaaatcgcggtaatactctttctttgcatccatcattgccctatagtaataacatataggatagcgtgcatgcttgaacagtataggaaggcagcttggcagtttcctgttaaggaaacataattgagagggtcactatcacctgtttattcaagaggaatgaaaatatgcagatgtgtgcctttataccacaggatacatatctgtcattgttcttgtaccttggactactaaacggcagtgaaatggtgtaagccaccacaaaatagcctccacagtattgtagtgagccagagagaatagcacaagagattcgtctgcatcagcacaattctagcacaggaaaaacagtgttagggttgagatatgtgaaggtaaaaagagcaggagtgatgtgatgcagctgagcttggtgtgtatcccatcctcatgggaagtctttctatccgttgccatggtatacatttacttactggtatttgatttcactatgctgctatttttctttttttggaattctaactgggcaatataggaatctccatccttctttatcctggtgacttttcacttctctatgttgaaaatcttgtgttttgtttctttatgatttagcactttgtgtactttctctcttatttttggtgtttttagcagtgttgttaaactctgtcatcgtttgaaaatgttaatgaaaataatatcagttacatgaactaaaatcttcattgtgttctggatacagtgtaaatctctctttccagacgtagttttgaaatttccttcaaggccgtttctctagcagccatcttgtcccttgcttcttactctgcagcttccttgttcgtctccttggtacccatgagctgtcattttacatatttgggccttgatttttctccctgaggaattccccttctaaggcattctgtctgcaagctactactactaaaacatgcacttaaatttctattatctctaaactgatcttttatcttagtataactgagtgagcaataatgcctaacacagtgaatgggtatttcttcacttggtgtttgacgttccaattaatttttcccttcctaatttagtatattgtctagacttactatttaagagtctttatgcacataccagaggtcaaagttcaagtttgggaagtcagttctctacttctacagtgtgggacctggggttaaactcaggctgtctaaattgtcaacagattacttctatcctccatcaccatcttgctggccctttttcttttcattgtcttgtttatgctttaacagaatctcttccttctttctttttccttctttttgacccttcccatctctccatatttatggcacacaatatcagtcccagaaagtgatcagggtgatgatggctcaggtgttaggggtgcttgctgccaagcttgacaacctgagttcactctaatgagattccatataatggaatgataagagagctgactcctacaggttgttctctgattttcacatgtgcacacatgcacacacacatagacataaaaacaaattatttcgaataccaagttcttatcttcatctggtctcttactccttcagcatcccccacctccagatcgacaaatacctggaagacaaggcccctttccctccaagcctccagtacctgataacgatgaaatatggaagcaaagacgaaaacaacagtctgaaatatctgcagcagtagagcgtgctcgtaaacgccgtgaggaggaagagcgaaggatggaggaacagaggaaggcagcgtgcgcagagaaattgaagcagctggatgagaagctcgggatcatagaaaagcagccatctccagaggaacttagagaaagggagagagagaaggagcgggagagagaacttgaaaaagagaaagagcgggagcttgagaaagagcaggaaaagcagagggaaatggagagggcaagacagcaagagaaagagttagaacaacagagagaaaaggagcaggaactacaaaggctgagagaacaggaaaaggagggcgagccaaaggaacaggaaaaagaggaaaaagttgaaccccaagagcctgttgtagagcctgcgacagaaaaccaagaaagtgaaaacaactgcaagaaaggtatggtgccccacccacatttcatagttaattatgcattctccttagttgttaatggtggagaggtgaaggcagggccttgcatgtatacttgtgatgcatcatcctctaggacagatggacagatggaacaagttttcctcaggataaaaacagtaaacaggtccttgacatagccctgactggcctgaaattgcactgtagagcaggccggcctcaaactcagaaatctgactgcctctgcctcccgaggtgctggggttaaaggcgtgtgcagctacacttgattgtcctcttcccaggtatagatcatatcatgtaaatactgagtgttaacataaatatttattgaaataaatgagaagtattaggaccttgggtttttgtcaagtaaatacatatgtgtgtaagtgaaggatttggatctgtgttctccttagagtccaggtttataagaatctgttgatagtttagtgatatgttattgatgtttttcatattgggttacaaagtgatgatttggagtattatggagatcctttttcctctttaacagcatgtttgataggattattttttactgtttctttgagcagaagaagaaccaattttcactaggcaggacagcaatcgcagtgaaaaggagaccacacaagtggtacaagaagcagaacctgaatcgggggctcaacctcgacctggctatttcaaacagtttcagaaatcattgccaccacgatttcagcgtcagcaggtaatactactaaaaccaaaaatactttacctcatatatgggattggaaatagatatcttatctttcaggatctgataatataatataaaacaaaatacataaagcataggaacttaccttagttccttttttctttgtagtacacttgttgagaattggttgttgagaagttagttgactttctctatcatgtcttttttgtcttaagctttactcatagacacatcttctacttctaggaaatgatgagatgcttatgtgaattataagaaattactgtaacttatttggtcttttgccaactctgtgctgattgtttttatctttaaatttcccaaacacctttgttttcaaatacggttacactaattaattatagaatagaaatgtcagtaagtgtgattttggttttccaggagcagatgaaacagcaacagtggcagcagcagcagcagcagcagcagcaaggtgtgcttccacagactgtgccctcacagccgtctaatggttcagtccctcctccaccacacagacccctttaccagccaatgcaaccccaccctcaacatctggcttctatgggttttgacccaaggtggctcatgatgcagtcctatatggatcctcgaatgatatcaggaaggcctgctatggacattccacccattcatcctggtgagttgggagtgactgttactacttgcagtttttaatgttgccttgtcctgtccctcctttttgtcataattccctcagcattaatctagtaagaacttaaaatacgacccctaggtctttatcaggaagttaaaagcttttagtgtagacatttgtggcagctatttaactcgaccaaagtactagctcttttttgctttagaactttaaatttttgaaatggcaattattctagttaaaatctgttactagtattctcactttgccaaatatttcaacatttaaattttatcttcatatatttattctttttttatagttttcctattatttattattatcataataacttgattcttcataagttagccaaaaagtaaataagccagttcttttgggaatccatttagaattaagccagataatctgtcatcagaatgatactatggaagatttaggaatgattaaaaagctattcacaaattatagctcattcaaagcagtggcatgtgctcataatcccaggacccaggaggctcagaagtttagagccatcttgaaggttggttggttggttggtttgtaaatctcactatttgaatgcagagttaactattttaacagcaaagatgaataaaatttgctgtaagaaataatttttcccaaaacttagccttgttggtatgattctaatctcagtttttctgttagctgttttttctatgcacatttttttttcttttaaaataaagtgaactcctattgtatgtcccctcttaatttcttagcactcatttttgtatatgtttatcttggttttgtttctttcactttacctaattctcttgtgtgtgtgaacttttctttttcttacaggaatgattcctcctaagccgttaatcagaagagaccagatggaagggtcacctaatagctctgagtcatttgagcatatagctagatctgcaagagatcatggaatttcactttctgaacctcgaatgatgtgggggtcagatccctatcatgctgagcctcagcaggcagctactcccaagtctgctgaagaaactggggatgcaaggtaataaattacttacatcattgaaagataagtagaatattgcatccctaaagatcattctgggtgccaacagtatcactcatggacaaaggtgtttgccattaagccagatggccagaatttgatgtttggaacccatatggtggaaggagagaactaactcccaaaagttgtcctctgatctccacagatggttgataataacaaaagctcttcccactctatcaacacacacacacacattaacatttttaaaggattagattctgatttaataccaagccataaatgtgcttcattttatctttgtgcatattttttctttttcttgtataataattttaaatcaacgagggcaaattagtaaaaacaggaatttgcctttttttttttttatagtctagccaatgggctgataagaatctagtagtgatgagaaatgatactttcaatccttagagaaactatgtaaaccacactttaaagcaaagtgatagtttataatgggcagtggtgtaaactctcatcgatagccagatggctagtgtttcttttatggggatgtattttagtgattatgttgtatagttatttgtgattggcaaattgatagacttgctctagtatattagttatactaactaattggtgtattagaacttcagtatacaagtccatattactatctgcagttacagatacagagcttcatattgtgtgactgaaagtttaccccatcatttataacagcatctccacgtttctgactgccctaagccctctagtaatcttcattctatattctgcttgaatgaggttggttgttatatttgcaccctgatacaattggtgcccttgctaccagcaaaactcttatctgcattagtgtttcacagttatcttttcttattttccctgagtaacatcgtcataatttcttcattcactcaatgatatagatactctgtgttcttctctttgttaagatatttttaattggggaatgtcaatgttctttatacttaggattcattattttgtattcaggggtggggttgtaggggtaatgctgcagtgaaggggtatatgtacacatgggtaaggttgttatgttggtaatacctttgaattctcatcatcacaggcctgaaactgcaatggaccatgagcatatgactgctgcttatcctgtagaacatagtcagttggaaactcattcaaaaacggacgttgctagagactcaactgaaaccgaagaacaaaagtttttaagcagatcactggaagatgtaaaacctcgccatgttgatacaaatactcagtctgcttgttttgatgtaattgatcagaagagcttacctacttctgcagaagagcggatctcagcgctagaaagtcaacctgcccgaaaaagaagtgtttctcatggatctaaccatgctcagaatgcagaggaacaaagaaatgagccgtctgttagcatacctaaggttatcaacagatgtatggattccaaagaaactgtagaaaagccagaggagaagccaagaaaagatggctttctgcgatcttctgaagggcctaaaccagagaaagtctataaatctaaatcagaaactcggtggggtccaagaccaagctccaacagaagagaagaaggtaatgataggcctgtgagaaggtcgggtcccattaaaaaacctgtacttagagatatgaaagaggagcgagagcagaggaaggagaaagaaggtgagaagcttgagaaggtcactgaaaaagttgttaaagcagaaaagccagaaaagaaagatcttcctcttcctctcccccctccagcaccagctcaacctcagccacagccattggtttcaccaccagtacagccagaaccagagaaaccaccatcaacagaaacatcaactttgactcagaagccatctcaagatgagaaacctttggaacctgttggtagtgtccaggtagaacctgtagttaaaactgtaaaccagcaaagcgttgcagcaccgacagtcaaagaagaaaagccacctgagaaagtcattaacaaagatgttggaatagaaagatctcgcccagattctagactagcagttaagaaagactcatctttacccactaggacctattggaaagaagctagagatagggattggtttccagaccaaggatacagaggccgaggcagaggcgagtattactccagaggtcggagctatagaggctcttatgggggtcgtggcagaggtggtagagggcacactcgtgagtatcctcagtatagagacaataagccaagaacagaacatgtgccttcaggacctctcagacaacgagaagaaagcgaaacacgaagtgagagttctgattttgaggttgttcccaaaagaaggcgacagaggggttctgagacggacacggacagtgaggttcatgaaagtgcgagtgacaaagacagtgtaagcaaagggaaacttcccaaaagagaggaacggcctgagaacaaaaaacctgtcaagcctcagtcttcttttaaacctgaaaaccacgtccgaatagataatcggcctttagagaaaccttacataagagaggaggataaatctaaacctggtttccttcccaaaggggagcctacaaggcgtggcagaggaggaacattcagacgaggtggaagggatcctggaggccggccatcacgtcctgccaccttaagaagacctgcttatcgagacaatcagtggaacacaaggcaggcagaacctcctaaacctgaagatggagagccaccaagaagacatgagcagtttatgcctataccggcagataaacgacctccaaaatttgagcgaaaatttgacccggctagagagaggccccgaaggcagcgacctacccgaccaccaaggcaagataagccacctcgatttagacggctgagagagagagaggccgcttccaagacaagtgaggtgttggtaccctcaaatggcacagctaataatgttgttcaagaaccagttaatccacctgcggacatttctggaaataagacaccagatttgtctaatcagaattcttcagatcaggcaaatgaagagtgggaaacagcctctgaaagcagtgattttaatgagaggcgagagagggacgagaagaaaaatgctgataagagttcacaagcagttgtaaaggctggtgaaagtgttttgcctccaaaaagggaaatagcgaagagaagtttttctagtcagagacctggagttgatcgccagaatcgtcgtggcaacaatggcccacccaaatcaggaaggaatttttcaggtcctaggaatgaaagaagaaatggcccaccatcaaaaggtgggaagagagggtgagtactgtaatttagaacatgcctggaaagaaggtacacaggatgccaggctagataaaagaccctgtattgctgactgctgttaatctgttatgctaagacacttcttctaaaagggttttcttggaaattatgtatagagctttagaagtacttgtacatccagaaatgaacgtacagtttctgtagttgctttgtgctaatgagtagctctctgtccttagtttctccaggtgtgttttaagacttgatgtgttaaaaccacattactctggcactctgtgctgttatctcagaaatccttggtgaattgtcataaattgtattcccttctggagttataatagtcccagaaagacaatccctgcatgtctactatgctctagtggccaacatgagtcctctggcaatgggtattaattaatttttaaaacttcatgtctgagggtgtagtagcttcttagttggtagaagtgtttacgtagcactgcataaaactaggcatggtgcttacgtgtcatctcagcatgtgggaagatagcgggcagggcaatcagaagttcagggtttatccttgactagatggttcaaagacaacctgggagagaaagtgtgtgctaaggttgctcttttaatactaaaatgttgattatagcgttaatattggtttcagtattgattgggtccattcagatctttgacgtttattataaaagatggaagctttatataatatgaagagaaacaagagtatgggctattatagcacatagtataccataagcattcgtgggttgatggcttatgaggctaagagcactgatagctcttccagagcatctgggtttgattccctgtacccacatggtagctaactccagttctgggcatccaactctctcctcttgcttccctgggcagtgtacacacgagtacagacataaatgcaggcaaaacacctgtacacataaacataaatcttaaaagcattgtttaggaataataataatattgcacgtaatctcaatttcttagttgtataaaattagtattttcaaacaaaattttagagtaatggaccaagtttttttttctgaatacatgctcaatatagatttcactttgaatgttcaagagtcagggtaacaataaaagcaacacaataagtatttagccagaccaaattattagaatttcaagtactactaaaaaaatcttgatttgatttttgtgttgtgtagatagcaacaactctataaatttgtagaaactccagtgaatggttgtagttacaacagactttggaagggcccatatggaaagaatgaagtcatttcagactgttaggagtcatgtcagacacaaggcaatcttgagaaatcgtatagactgatacaaaaattaaacagtaaacccatttttatgttatattttcatctgggaatttattaaaatagacctggaattgctatgttgttatattaagggacaaaaactaaggatatatttatttgcctttgaagtgagttttcatgttaaaggtgtttttaatatggttccatcaggacataaatcggataaaacttaacgtgtatatatgctaaacaatgtaaacatttgcaatgctgttttaaatccttattttgtacgctgcccactttaggagccgatctagtactgacttgattacagaagttctttttgatatatccatattataactcatttataaaatgacaaacagacccagttacctcctggagataattagaattctagacttaaattgttggggagaacttcaaagaactggcctgctgtattggagctttagtttaatgaaggtcagaagctgctgagagtgactgggtctttttcagtgctgttgtttcttaggtatgactttgcaaactgccaggaaacacagctttgttttgttagagtatgtcaaaatcatctaaagttattttctttaggccatttgatgaccaggcctcaggcacagctggtgctgaccctgtcagtggtaactctgcacaccaccaagaaggtgtgcctaatggtgcaggacagaagaattccaaggatgctgctggaaaaaagagggaagataccaaaccgggtcctaagaagccaaaggagaaagtagatgctctgtcacagtttgacctcaataattacgcaagtatgtttcagattcttttgttttacttcttggtaaattgaagcaaatactgtgaaaacataaggaaggacaagttgtgcatttatgttagacaaaataacttgacttagactaaaagaacattattagcctttagcatgttatgaacattgggtataatttttgttaatgatactcaggaagatttcactgttctcattggaagaggcttgaaatggattaaaccagtaaaattgcaaaacatgtttgagaaagcacagaaaaacaaacataaagtgaagattttaagttagaactaaagcaattctgaacatttcttcttaaaaggaaaaaagtaatagtcaatacaagcagagaataacaacgggagactgactgtgattgtgggtaaactaaggaagctacaaatgaagacatcaaatatggataataagcaataaggaaatatttggtgaagaaattagtacaaattatctcaagttagatgattttacttgtaatagtgtatttgtcattcattcagatgaaaccaaagcatatctgagatttcttaatgaggtagtgataatggaaggttaggtgaggtaacagttatcccaatatgagatgtaggtgtcttttccttgcttctaattttgtgtggttttattggtatttgtttttattaaacccttacttgtttggactcagatctcagacattgtttctaggccagtggttctcaaaagtgtggttctcgatgatttgtctcagttggaaattgaaatgcaaattcttatctaccaaacatattgaatatgattttgagaacttttgtaattcaaatggggggaaatgaaaaagaaataactgatcttaattgcatgtttaggaatttttagctggattatttagaaatataagtgattatccactctgagatatttgacagtcagttgtcagaactggggtgaagtactgattatatctagtaaaatagaggaacagagatgccactaaaattctgtgtataaaacaaccagaccatagtgtgaagttacaaggatgttacctcttttctcagaataccttgtgttttctttacccttttgtgccgatatgagatggatgagtgatgaagtagagtgggtatgctgttagtgaaatgacacaggcagcctgcttctgcactctctcgcagaagttcctgtccctcctgctccttccaggccgctcagagagggccctgtctgacaccagaatatcactatcccgttttcatagaggcccgccttaccgactcacccctacccccacccccaaggagccatagatgccatcttgagaataaacaaaaagcctccaagttgctgaggctagcactctcactgataaatggctaagcccttcttcccaggtacagctggcacctgtccttgggaaagaagcacaaaaaacaaacatccttgggaagattagggtctcacatttagatcatgaaaggaaaataatcaggggtcacaggggactatgacagtggctagtcataaaacacactagttcctgatagcaccataaagttactccccaggtcaaaagagttcccctcctcccagttgagagattacaccttgctgcctaagcaaacgatatcatgtttgaaaactgacttgttgcctcccccatcgccataaaacccaaagaatctctgactgtgctgggtcacactcctgtcctgcaagtgggaaggtttacaatccgagtctgactggtgttaaaaagagactctttttgtatctttgcattgggcccagcagttcttagagctctcctgggggtcccatggagacacaacattagttactatacaagagttactagtagtggtagccctagttgatctggtaaacagctaccaggcagttcctgggcagctgttatcagtaagccgaacaaagaaatgcttcaggcaggatgacatattttcactggatgattgatgtcatggaatttaaaattaagcagtatagatttttacacttttccacttaatatttttggcccatagctgaagtagttcaggccctgttaagtgaaaggctgaagtgaatttaggattatgatgttagtcatgtgttagcacatacctataatgctaactttaaggtggagacatgaaaatcaagagttccaggttgcatagtgagttctatgtcagcctggcttacaaaataaaaagttatctcaaaacaacaataaatgatagaattgtgataagtttacttcatcaatctgaaataataggacatccccgaaagcccgttttagtgtttattttacatttttccttggtctgtacataaaattgtaattaaaaaaaatagaattttaggttctctgcaaattccttcagtattttatatctgtagccaaaagtcacgtctcttctgactttcaagcattatttaacaggtttagatttggtcttctgtctacagtatagtaactttaggcaaaattgtcatggtttgaaaatacatggcagtaataattcccacttcttagaatgatcatgtgtgtatgaagtaaagtactactgtttggtgagcatcactcatatctgaggttgggaagacataaaatacttttggtttatttttattttcaaaagaaactgtgttgcggggggggggggaagctcacacacctctatgtgttacacatcataagggaaaaataattctactggaactggtaccacatgtgtataatcctgacacttgacaggtaggggcaggatctggatagagttcaaggccagcctcggctacacaagtttgaggctggtatttgctacttgagaccctgtttcaaaaccaaaagggtctatcaatcaaaccatgccattttaggttttctaatctatgaaactttttcagaaagataaaatactttcttacagggtaggaaataagttatactctcaaattaaaaaatatttttctgtcgggcacagtctttaactccagcacttgggaagcagaggcaggtggatttctgagttcaaggccagcctggtctatggtgtgagttccaggacagccagggctatacagagggaaaaacaaaacaaaacaaaacaaaaaaatcttttccacatctgcaggtgttgttatcattgatgatcatcctgaagtaactgtaattgaagacccccagtcaaatctgaatgatgatggctttactgaagttgtatctaaaaaacagcaaaagcggttacaggatgaggaacgccgaaagaaggaagagcaagtcgtacaggtttgagctcagcattttattgctagctttgtctgttgatatccagaacttgttaacaaatggtcaggttactcaggtctgctcagtcttagaagatggctgagtagcttcacacctgaccttaagcaattaattttaaaatgagctacgactatagcttgctattgtccttataacagaccatagttaattcaacatatatttttactaatttgttctatggtagaattcaatttgttttaaattatgttggaaattgaatgaacacaagtgccctgatccagaagtaacttttgtctttctcatttgtttgtttgtttgtttgtttggtgaaggtgtcaaatgtacttcaaattttgttagtttatttcatattttagagggaagagtaacctaatatataaaattatattttgtctatattctccaaactatcttgacttctaatactttgtaaactcattactaccctaagggtgtccaacttagaaaaatgaaatagctaagttagcagtaggaagttctaaaatcactaggaagtacaaattacatgtatacactgtttctttgggtaaattagtgacaaaatgatctgtttgtttaaggtatggagcaaaaaaaatataggtgaaaaaggaagaagtcagacttctaagcttcctccaaggtttgccaaaaaacaagctactgggactcagcaaatccaagctccaccctccgcgccagttccagtgtcttcctcagctccaggcctaacagccccagcagctgcagctcctgcctccaccccagctccagttcccattttggcatcagccaccgctctagttccagtgtcaaccccagctccggttctaacttcatgcccagctccagttccaacctcagcctcggctcctgttccagcatccacttcatctccagtcacagcctcttcctcatcccaaccatcagttccagctccgactcctgtcttggcctcagcctcaactacagtctctgtccctattctcacctcggcttccattcctatccttgcttcagccctagcaccagctactgtttcttctccaaccccagtggtctcagctacagctgtgccatccatttcaacaccagccgtcccagcctcagccccaacagcctcagttccccttgccccagcctcagctgcatccactgtcccacccccggcctcgacagtgcagacccagacccagacccagacccacaaaccagtccagagtccacttccaccttcagcgccatcttcaaagcagccaccaccctcgattagattaccctcagctcagacgtctaatggcacagacttcgtagccgctgggaagtccatgcccacttcacagtcccatggctctctaacagctgagttatgggacagcaaagtggctgctccagctgtgctgaatgacatttctaaaaaacgtaagtatgcaacagggacgtgtgcggtgggaaaagacagaagtactaaaatttcttttatatcttaattaggaagtcttagcttcctttattttagtagcttagtttcctttcctttttatttctctaaaacagttaacaggatacttttctccattgaggtttcatatcaccctaactaggatagttatcgggaacaccaacaaatgccaattggggggggaaagagaaagaaacccttatatacaactggtaaattagctcagccaatgtgaaaatcagcaaggaagtttttcaacaacaacaaaaacccctagaattaccatagaatctacctagtccctttctggatgtatatccaaagggatttagattagcagagaaacttgtacattgatgataacagtggggacagtgaccaagataagtaatcatgatctagtagaacacagtggggtcctactcagccaggaagaatgattctgtcatctatagggaaatgaatggaagtggaaatcagcatgttaagccaaacaaagtagattcacaagaattttgtatttttcttcctgtgagctttaggttgagtctgggtagggttcatgtacaggtgaaaataaaggtgaatggggggaacttaggttaaaagtgtggttttctcaaatggaatctaatttgtataaggatagggaaggaaccatttaacataactagaaagaagggcaacgtactgcaataagtgtagagcgtgtgttttgtggactaaaaagtaataatagggatgtgtaaaacacctttcatttgggctgccttttggggtgcgggcatttaagaatctcttaggcagtagtggcgcacacccttaatccaggaggcaggggcagacaggtctacagagcaagttccaggacagctagggatgcataaagaaaccctatcttgagaaaaaaaaaataatttgtgatatgctgaattgttttattgtgtgcccaccattgtaaaagggttgaatgtactagacttcagcatctaaattttaatggtcacatttcctctggcttctttttagtaggtcctattagtccaccacagccaccttcagtcagtgcgtggaataagcccttaacatcatttggatcagcaacttcatcagaggtaagaatagacttactggcatagatgggaagttaatgacatagtttttaaaataatttccaaaacttcattgtacctaattattaccttggggccactaaaacagattaaattcatgcccagaatttctgccctattgggtgtgggttgggttttgagtacatttctatcaggtacccagataatgctaatactgctagtcctccatattttataggctgctaaaggttaaacatttgtttcattctaatgtccagaaaggacctggtagaaaccaatacagtcactattttccaggcctacctcatattcctatctaataggataattacaaaatttcacagcttactattctatcatttcttaaccatctgtaatattggtgaatgaacatttatgaagtgaatgaacatttatgaagtagttttgatgtgccagtttagtctcctttttgagtttacaaagctggcacagataatagaagcaaaaggcctcatgggagaaatcagcagtatacttgtttagtcaagatgacagcaaagaattttcccaaagtatatggaggtaagcttaaatgaccaagataatttaaggccaggagatcctacttgtgtgtcatttgattgaagatttggagaatataaagaaagtagtttattcagatacctgagaaaaagtcaattcccagttcagggaatagtagttatcaaagccgtgaggcaagagcaagcctgatgggagctggagagttgactcagctggtaaaagagttactgagttcaattcccagcaaccacacagtggctcacaaccatctataatggaatctgatgccctcataggtctgaagacaactatagtgtagtcatgtatataaaatgaataaatctaaaaaaaaatttttagcaaagacaggtctggtgtgttcgaagtagttcagggaagtccaggtgagtggaatgaactaagagaaagaaacaacagagtgtggggaggttttaggggcttggagacatggagacatggagaaccattggagggtgtgatgcaaaggagtggcagggtgtgaatatataggttgtttgtcttatggatgagggagtaaggatgacattagtcaaatgattaatgtgggatgtcatgagaaggtgggccataaacccacaactgacttggtgtgaacagcaagaaagaaaaagtttttcgttagtttaaaatgagtagatccgaatggatcgtgattaggtgtgaggataaaaaggccatagagttacatttaagatgctatgcctgggttcaagtgcttactgcttttgcaaaggacccaagtttggtcccagcactcacagcaggtggatcaagatacctaaggggtctgatgtctctggcacccattggtactggtactctcgggtatacattccttcctacacatgctaacacaaccaaaacttaagtggacatgtcaattagtagttagctatcagagtgtgtaaatcaaagaatgtctgatttgaagattttacttgctaagtcatcaatatatcatggggttggatgaaattaccaaggtaagatgaattataaagatgcaaaagtgggaaatctaaactaagtattgaggctttccagctcagagaaatgtgggagatgttgggtgccagctgctaaaagaagtatctgagagaaaagaaaggggatggatcgttatatccagtagtgctgatagagcaagtggtacatctactgaattggcagtaaaaattaatgctgtaggcccattactgacatgaaaacacattagcataaaattgagaaaatatgaggcgaataaagagagcttcagggtacagttgttcactatgtggaattttggttggaatgtcactcggaggccacaaatgccatggtgtacacataaagtatcatctggtgacatcgtagtcgtcttagttttagtatgctgtaatatgtgcagaacaaaataattcccttgtgatgtatttctcattttagaagtcttccttattaatctaccatcccagtattctcacatagcaggtctggaataggcttcatcatttattttgttattaaaagttctctggggaactcagagtcactgtgcttcctgtttgagagcctttatttgatatttattgttgatattggctttgttgttgttgttgttgctgttaattttgtgtatgaatacactgtcactgctttcagacgcgacagaagtgggcattggatcccattacagatggttgtgagccaccatgtggttgctagaaattgaactcagagtagtcagtgctcttaagcactgagccatctctccaacccctgatattggcattttttaaagattcatcatagagtgcatttcttgcaaagtcagatgattcatgctgatttgaaggagatagtgtagaaattttgttttgtttcttggctgcagtagttgtcctgtaggcattctaaaaccatatgttttggtagtgtcttaattatctgtcataatttgttcatcatcctcatgttctttgcaatttccagctttttaagtttgcaaaattgacatttcagacaatggcaagaattctctaatgatttcccatttccttttctgtgagtacacatgtgtacatgtatcacacatgtgtgcacgtagagattagtggtcattctgagtatctgtcattctttggaattcacagaaaaatcagaaagctatttattgtagaagttaacagcacaaatggccactgaggccagagcacagcagttcctgagcagtgatggaaggcagcatggaagaggctaggtgcatggagcagttaatgaaaaagaaagctggacacaaaatccagatttgctatggtctaacaagttgctatttccttttatttctggcattactttctattagtatttattcctttccagtatgttttgctcaggaatttcctccatctagaattcttctatcttagcttttcttacattccctaaggaactttttcgttctttcactttatctaataaaaccaaagtgagattgcctagcacaaagaatgtgttcagaaaattcgctttttaattggtgacttgactctacctgtatgtatattaccttcccagtcacacagtgctgctttgttgaggtttttatttacgttactatcagagcagacttacttaagccgaagtctccgttactatgtcgaattgcattaaacatgcttctgttgtgctttttatttgtggcactgcatacatttttttttcagtcaagtctgaatttgtttactgtgatataccaagtgttaaaacattattttattagggaacaagaaatggtcaagagagtggtgttgaaattggaattgacacaattcagtttggtgctccggcctcaaacgggaatgaaaatgaggtggttcctgtgctttcagagaaagcaactgataaagttcctgaacctaaagagcagcggcagaagcagcctcgggcagggcccattaaagctcagaaggtaggtgctgttcgttagggtgatgtgattctagaatggacatactgttctaaaatttaacttcgtttttaataaatctttcattatattttgttataacattggctttagcttccagacttgagtctggtagaaaacaaagaacataaacctggtcccattggaaaggaacgatcattaaaaaatagaaaagtgaaagatgcccagcaggtcgagccagaaggacaagagaaacccagcccagctgtggtcagaagcactgatcctgaaacagcaaaagaaaccaaagcagtctccgaaatgtctgctgaaattggggcgatgatctcagtctcctctgcagagtatggctctgatgcaaaggtaagtacacactgactgcttatttatgagtgacaggaacattaatcatggacttcttatgcggagcatttgattataatggtggttgtatcgagccctttttggtgacttttgttgttgtttggttttgggtttttgagccaagatgtagccccagctggctggctgccgtggacctctctctctgtagaccaggctggtctctaactcagatccacctgcctccgcctcctgagggctggggttaccaccacctggcatacagcaaacttactttgtgatgttctatcatacaatgtaaatgtctctgcaaaaggttacatttttacagaagtatatctgtattttgctgaatggcttaaatagaaaactgtaaaagatcagaattgtctcccttaagtttgtaagcattcaaagttgtctttgtctggtagaactttattttgccttctactataattcaaacttaaggtgagacacacttggaacacatcactgtttctgaggttgaacactaaaagtattgacttgtttttggttgctacattgaacgaaagatatgtatcttttaaaatacagtcagctcccttatatctgtgagttcaggatccatgaattcaaatctggataaaaaatattctctctcaaaaattggaggtgttttgttttgggtttgtcttcattaaactataacatccagtggcagaacatttcactgtattccaggttattagttatttagagaaaatgccataaacctaagcatctgcatctctgcaggcccggtatgtaacaaggtgcgcctcgaaggcacgttctgttaggtgactagaggtagatagacacttgtagtcattaggggacataactcatagaaagaaatatttagttttgctgatagccttctacctcatgctatgaaaatagattttaaatatgtgtaaaagtctagcagcaactgagatgttgtctcttgaaggcaggcgggttgatgctctttcagcctactgttagttggtggattcaagttttagggcatagtggtttattatctctctccttctaaaatagctttacttctattagactgtcaaaaatggccgataaattcagctttgttttcttttactcctccacaggagtctgtaacagactacaccacaccttcctcttctctgcctaacactgtggctactaataatgcaaagatggaggatactttagttaataatgtaagtaaaccataagatttagcaggtttggataggaacctaactcatccatcactgtatcttaagcacactgttgtgaacaatgtttgacttgagaaatgagttgatggtcattttgtattttgagcaatatataagtatacctacttttaaaatcaaagtttaggcctccctctcctctcttcccctcccgtcctcttcttcctacaacctgttgaagttgtcagctttcaaaggcttgtgctgggacttgatttttattagcactcatcctattaacctagtttggtaaaaagttttggtttcacccttacatactatagttaattttatttggttgggtaattttgtccacaaataagactttatgattcaatggagccatactcgttagaagaataaaagaaaataaaatagaaaatagaaaataaaatataaaaccccagtttctcgtcagtagaataaaagaaactggggttttattttgttttttaaaaacaagtattttcaaattgaagtacatagatctggccttgcttttgtggaaactgagctgtaatatgaaaatatgtattccacagtttcttaaattatctaagattaggtgatgttaagttgtgtgggagataaagccctagttttaaggcttgaatgttttaagtcagtacagtttatcattttgcctacttcagtatagatgaaaaaaactagtctaaaaagtaagttgctctggcctcatgcacagcacatttaaaatttcttgtatagttcttgcttttgagaataaataggaaaaattttggttacctgatctcccctttgaatataaactaatataatcaaaagctatcatattcaaatgatgattgttttttccaaaaatatttttatatctatctataaagagttcttcaaaagaactttatcattttcaatataaaaatcctgattgtcattttatatttttttcctcatgctgtctgtccatccctctagcatcaagtatgtgggattttagaaaggtgagctacattaggggtcagttcatcaaattatagtcaaatggaaagactcctacagagctgtaggaaaggggtggaaaggaggcagttgtacttgatatttataagactgcttcatgaacctaagcctgtaataatctactcacaccatcaccccctttatgaggagagtttcctatataataggaaacttagaagaaaggacacttgttgagtttaaatgctggttccactgctagcttatctgtaatgttacagtaaagtatatgcttaaattgtgctatcttttctcatttaaaaaatataaaatgtcactttttcattctctaagcttgtagcattttgtcattgaaaaatatatatgctgatgagcacttctctgtgtgctcctaaggctgattagcatatgactttgttcactgacagatacggggaagaagacatgcagtctcatctataggggaatatagtctttatttgcttattaggagtaagatatctaaggcacctatgaatggaaaaaaaaaaatttaggttaaagagtattgtaaagtcagtgtagatgacattaatgttgtttccttgggccaggtgtggtagtgattctgtggtgactataaagtcttccacggaaaaaaattgtaaggactttggagatgtcttttcattagtctgttggaggcctccattttaaaatgcagaactttggtctttaaaaatacacatctggccgggcattggtggcacactcctttaatcccagcacttgggaggcagaggcaggtggatttctgagttcaaggccagcctggtctacaaagtgagttccaggacagccagggctacacagaaaccctgtctcgaaaaaaaccaaaacaaacaaaaccatatctgttgaaactccatataggcttcttttttaaaaaaaaaaatgtttatgtgtatatgtatgagcttgaatgatgcacagcttgtatgcatgagacaaagaaaacgttttagacaacacttgaactataatgtgatgaatcaccaggaactctgaaccactgaggcatctccagctccaggagaggcttttaaaatcaatatcttaacttgtgtggtagttacagttgtccagcactaaaattattgtgtattttgaatgtcccacaaagttaagtacaggcgacaatttttgttaccatggtatagctggtgtcaagatttactttaaaatcttaggtagaatatgttttgacagatctctatttgatatgtagtccaaagtatctcagagtgaccttcttagtatctgaaagaatgccagccattattttctgaataattgagtaagtcatcaaaagcaaacataaagcactgcacagagtaagggtacgacatccagggaatagtgcaccacctccaagtttctaaaactgtttgctcccgtcatctagagtagaacagtttgctgtgatgaggtaagggtatattcgatactttgccccagaggttactctggttttttaatctagggaagagctttgcactgtgtgttaaatactcaagataggaacgtgtacatacttcatatatgctgaaagctgcatttcttagaactttagtgcacagagtatggctcttggatcagtagtagtatcaccaccccaccgccctgaggaagatttcacttctagtataaagagtgctaccttgagtaatatatactttacaactgacaagttattttttcctgataatttgtatatatccaagtggatagtgtttctcttaagaagtttaacataattatcaccctctgtaagcattgtaacttaagtaatcagatattcctttttggactgatggggcttttgtagcctacttagattgtgatatgttgcctgccttttcaggtgcccctgcccaacacccttcccctccctaagagggagactatacaacaaagctccagcctaacttcagttcctcccactactttcagcctcacctttaaggtatgtacaacatccatccttaaggctccttaattgctgcatgcaaagaacgcaggttcacaattatagtatctctctctctctttctctctctctctctctctctctctctctctctctctctttaatgacatcaaattataccttaaaaatcatgttagtgctgggcagtgggtggcgcacgcctttaatcccagcactgtggagggagaggcaggtggattgctgagttggaggccagccagggctacacagagaagccctgtctcaaaaaaagaaaaaaaaagaaatcatgttagcttttaacactgcttggcaatgagaggtcctgttgtgcttatacatcttgtcataaaaaatagacttaatagcttatgatttgtactcaaatacaaagtgctaattataataatgttcttttttcttataagtcatttgtaaattgaatggatataggaatatgtcatgaaaaggctataacataggcatactttataagcaaaactgagaatttttggtttgaaatactaaagattgaacttgggacctcacatttgaggcaagcaccttaccaccacatcccagtcctttgtttacttagacacagccactttaagtagcccaggctggcttttaacttgatggtcctgcctaccttagatagcaagggttacagtctgtcctatatcactagctggcactatttgctttgtttttctagcatcttattgtcctgatttttgatctatattaattctttatagaaaagctacttgagattattgtaagtctctgattcaccttggcattagtaaattaatggttaaggggtgggggagtggaattgggtttgtgtgtgtatgtctttgttcataatcctattcagcatggtatttaatgtataaaggcaggctttcctgattagattatagtaaaccttttgatgttatacactagaggaagaagctaagttgttttagtcatttggccaatgatcatttctaaactctttctatataacctcatgactagctctttgtgagaactatgtcgggtcccagtccttactgttcagcaccaattcttgtttggccttgctgctaattttctactcagaggactgtctcagtcttggccttgttttataattcagatgattttgatgattatattgatcaaaatatcacacaaaatatcttgtatacttattgttgagccagttattaattctttagaatatctattgggtttgcctttttgactcatttttaacattccaaaactattatacacaaaattaaaattaaataagcttaacctgtcatttctttacttttgtgtctacacatacacacatacccttttatcttggaaaaatatttagttgtggaaaagttctatatgtgcattattgccagcatataaaatacatacttagctaatatacttgaatttccaaaaacaaactgtttccttgctggctaagaagtgaaatcaagccaatatggtcaattatatggtcaataatatgtcatataatgttagttttagtatacttttcaaaatacttaacatacttttattatgttcccaacaaaatgttttgatttacagttattatcaacagattttagtgaagattaaaagtgaacatttcctagataggtagattatttacttttatctcagaagaaatctcctaattaatcaaaaatgatgtcttcagacttttctcctcattgtattatatatggagagtccaggtataacgtaagacttggatgcacatgagcaaagccagtcttccatcagaagccaggcagaaacatcagctattccttactggatggaggtgataccacaaacctctggctgtgggttccatccttcagaacagctaatgaaaaactcagctaaaataccagagtacataccctgaataagagctaaaaaatagagggcagtgcaggagcagagaaagaggtctctgtgtgggtgctagtctagacttaggaaggatcttacaaaatgggggatgaagttggggttccagtcccaccctactctccacagcttttactttaaaataaaatacacttgaaaggcatagtgaatgtgagaaatatatttgttcttaaacatagaagagtcatgcaatttgagtgtttaactgtggtggtctgcatagataaattgatgagttgtgtgatttttaaaaggtttctaaaaggtttattaaggtaggttaaaagcttagaaattaacaggcggggctggtgagatggctcagtgggtaagagcacctgactgctcttccgaaggtccggagttcaaatcccagcaaccacatggtgactcacaaccatccgtaacgagatctgactccctcagctacagtgtacttacatataaataaataaatctttaaaaaaaaaaaaaaaaaaagaattcatgccaggacagccagggctacacagagaaaccctgtctggaaaaaacaaaaaaacaaaaacaaaaaaaaaaaaaacaaaacagaaattaacaggcgatgatggtaatgggcagatctctgagtttgaggccagcttggtctacagagtgagttccaggacagccaagactatacagagaaaccctatctttaacacacacacacaaaaaccactttaaaaaacaaatttagaaattggtatttaaagggttaaacttgtttgttagtggtattaaagatgctacgtaggaaacgcaccgccttacaaatcatcttaaagattatcttgggtttacctttcatcacagtattttttctggtaatacaaagaacctttttgcctccatatgtggtagaatcttgctctgctcttcaattcagaaatcactagacacataaaattactcaacatttgaacaatgggtagtctaaattgaattgtgatctaaattgaagagaaaatgagagagatctacatctgaaattttaatattaaaaggggaaattaagaaataggtggcatttgtgtaaatctcagggcttcagagatcaggagtcaagtgttcaaagtcatctttcagtgcacagtgagtttaaggcctggccatgctatgccacagtgaaacagtgaaagcaaataagaggaaacatgggttgttatatcaattactatttcagttataaatacattgtttcaaattatcttttaatcaatttaatattgcctttttgtttttagcttgtaaaacatagtgggtagaaaaatttagtttcgtgtatgtggcaggcattattgttatctgaaagttagtaggcactgctgctccattttaaagatctcattctgtcctttaaaacatgaaaatccgtgtgaaccagggccacaaatatatatgtccaagacagtacttgccctgttacatcaccatgtgcctttgaaaagtgttgatttaaaaagaaggaacaggggaccgtgttatataaggccttttctgacaacaggcagaatattaagtctctcccatggaagacccattcttctttattacactggtgggaggtagggccatttgttttttgataagtgctttaactatggttcaatgtgtatctcccaaagctttcaataagctctgttaaataaataaataaataaataaataaataaataaataaataaaaccctttgggtagaaagtttgaaaactctcgtgctgacactatttagaatctccgtactagggtatagagggtgttgtctattggtttttcttgtttttttaccttgtttgctttaatagacgtcaattttattgcagatggagtctgcacggaaggcatgggagaattctccaaatctacgagaaaaggggtccccagtaacttctacagcacctcccattgtgagcggagtcagcagcagtgccagtggaccaagcactgctaattacagctccttttccagtgcatcaatgccgcagatcccagttgcgtcagtcactcctacagcatcactatcaggtagaaatgtgtcacagttttcctgtatacctttttgtttgattgcctaatggcaattcctagacaagcactgtaccactgaagcacacccctagcctaaatgatgtgctgctcccaagcagacgaaatactttatgaaaacagcttctcttacttgcccttttacttctgtctcagaattttaatgtgactattttattgattgcttagtaggaaagattttaccaaattctccctcattgcataaaatcctgtcttccaaattttgcttttgttttcagttttactatacccaagtaattaaacacagagttcagaaaaaaaattcctaccacttttaaaagatttttttttagtatatctgatttaaaggtattaatggaataaattatattttctaatgaaaagttaggtgggtagtgttactactgtttgatgcctgggaaaactttgtcaggctggagttagaatgaactgttgttccttacttacagtttgtgttctaaagaatggccagtgtttgcggatgcttatttgtagggaagttcatcccgttccctagccatgctgcttctgtttcaaagcagactttatcccaggcttctacagtgtccctgatgttcccaaagcagtggatgagaagtatgcccgcacagggtgtgcttgctgtggtttttacttggtgatttatttggtgttttttatttggttgcttttgcctattctgccattgtactgatttgaagaatccaccccactctaccattggggtctgtctgggctgtcctatagcagtttttctaatatctgtaataagtatatttagacaatcccaaagtggctgtggtagtatacgcctgtgatctcagcacttggtggattgaagcaggaagacaactatgaaggcactgtctcaaaaacgaaaatgaaagaaaagaccttggagatgattcctgcattgtaatgtcatgccaaatagtgccctaatgacattttttttttctttctttaaaatttgtctagtcattccccactgcccattttttagactaccttgaactcctctactttaatgggaattggtattaaacaaacaggaacttggtaggatgagttgaaaaggtcttcagtctttctttggaatccagtggcctattttcaggtcaagctaattgtctctggtatattgttgaacaaacagtgacaaggataaaaggctgtccatccttcatactgacatgatttttcccccttcttcccttttcaagacaaggtcacctgtattcctagaactctgtaggtgagaataagattgtgcctgtacctcctgagtatggagactacagtaccatggctaggattgcaggcttgtgctgcctggtctgcagtgcactgctagcccctgagacactccaaccccctcaaggatttttgttctgtggttgcttgaagacttactgtagataaaacccatgggacccatagaatcagaagagtgaacatgctacatttttctcctttcttcaaatacaggagctggtacttacactacctcttcattgagtacaaaatctacaaccacttcggaccctccgaatatttgtaaagtaaaaccccaacaattacagaccagcagcctaccttctgcaagtcacttttcacagttgagctgtatgccttccctcattgcacagcagcagcagagcccgcaggtttatgtgtctcagtctgcagcaggtaaggtttctaggggtggttatagaaatttagaaaatggacgctgtatgctcttttcgtctcgtgactcttgctgcttagatttatttattttccaggtgtacttctaggtttgagtcccttccatccatgacaagaattctggaacttttagaagtggtgtgggtgtatgtgggtgtgtgtgtgtgggggggggtgtcggtctgtctgtctccacttttgtcttctacatttatgacaagttagtgtcttataatttgcaacataattgatccatgttctgcagtttcactacaatcaccaaacttcattacttgaaaaataatacataatgaagttcttggtagagagaacatacgtataccaaacaagaataacactgtatggtgactgttcccgttgtcaccctgcactatcagtaccgtctgttaatgcctggtgtctgaagatgctgtattaccagtagtgcataaagcacctacagccgaaggtcttctaagaagctgctaagacttatactaaagcatgtactgactgtgttatagataggagtcctaattcctacctgcatcacaattgcttgttgaaaacatggaaagataataatcactaaatgctaattgttttcaatattgccctattctactctgtagtttaatattggagtagatttgctggttcagtggtcaggttcgtttcttgtgtgaaatattaccagtacgtagctaattgagaacaaatgagagcatttattttgtatggccaagtagcaccaaatttacaatgttttatttacatgcacttttctactagaagtttgatatctttttacatttatgctttttcagtgacttttcagaatgctcacatttgaaattggccagaaaaaaaaatttttttaactgctataagtaatttggtttactacttggaaaatcctgaaatttagataatagtgattgttttttctgatggtctagctcaaatcccagccttctatatggatacaagtcatttattcaatacgcagcatgcgcgattggctccaccatccctggctcagcagcagggcttccaacctggtctctcgcaggtaaacatcctggtcctgtagttcttcatgcttatggcttttctgtcttgggctttagtgttagattcacttaagttaaaatcggctttgaattaccttgaataggctattaacaaaacttggagacatttttgattcccacattaccagagtttagtataccagtgtaagtcacaggttaaaaacaaaattggttttaaggagttgctgatcaatcttacttttatgtctggagtactgttttattttcccagtcttgtattttgtgtatatgaaggttgtgtctatatattacatgtgcattttctttttattgcattgcagccgacatcagttcagcagattccaatccctatctatgccccactgcaagggcagcaccaagcccagctgagtttgggggctgggcctgctgtttcacaggctcaggaattattcagttcttcaattcaaccatacaggtaaattgccttaaaagttgtttctgtcatttttaataaaacaattgaaggttatgaagtatctagtgctaatttcttttccccaaaccctatttttataaactaaataattgtgtacattatattttcaagcctgtgcctggtgatttcaactatgtcttggtttcttttgttcttgtactttgttcatatagaattttcataacctgtgaactctcttagagtgattttttttttatctagtcatggtgactcacacttagattcccaattctcaggaggcagaagcaaaaggatcgttcagggccagcctgggtcataaagagtgattaaactgcagttagaaggggctgctgctttactttctcccatactggtctcaagactatgtgtaacgtcaccaaagagaaaactaagtttgactctcagttttgtacagaacatgtaaaatgtaaatcattattataattaaaaggtaacatgtaaactgttcgttgccaagagcagtcttttccctcaaacttttgtatttggagttctgttgcaaacaggagttaatcttgaaacaagtagtcaaagaccttctcttccctgcttaattactgatttgagagtacttggttatttgagacacaagattttcacaattctaaataaaattagtgtatagcatgaccttctcctgcttgatacttttcatagatcgcagccagcctttatgcagagcagtctttcccagccttccgtggtcctctctggtacagctatccacaacttcccagctgtccagcaccaggaacttgccaaggcacaatcaggtcttgcctttcagcagacttcaaatcctcagcccatccctatactgtatgaccatcagctgggccaggcatcaggactaggaagttctcagctgattgatacacatcttcttcaggtaagactgtgcctttaaacccagatcctttgggcctggatttaacttacaaagaaaaatatctgtacaagctaaatattctgtctcctgagtgctgggattaaaggtattcaccaccatgcctggctgtgatctttcctcttaagatgataatgttgatacaaattgcctgggacttcttctcagtttttcttctgttttttggtaaatttttctaggcaagagcaaatcttactcaagcctcaaatctttactctggacaagtacagcagcctggtcagacaaatttttataacactgcccaatcccccagtgctctccagcaggtaaactatggcatggtaaatttcctcacttttctatattattctttgtattgattgttttgttgttaatttgacatttatatagaaccaagatagaggaggtggttttcagatgtacaccggaatgtcgtgggaatcccattaggtctattggaagtggaaggcgcttccttgactcctgtaacagctcctcctcctcctcactgcattctaggttcacttggtttatttaagctgggtttataagaaaggaatccatgcatatggaattttgaaaatcatttattaaagaatatagtacattcagtgttataggtgaaagaagactctaagatagtgctttaatcctgcacaaacatcatgaccaagaagcaagttggggaggaaagggtttattcagcttacacttccatactgctgttcatcaccaaaggaagtcaggacaggaactcagaaagcaggagctgatgcagaagccatggagggatgttctttactggcttaatataatgtagcagagtagcactaagggcagcatcttaaatgccctagtataattggacttttcaatgggaagtgacattctggtagaaggctagaggagaaaagcaagccattaatcttttgcttgcttttgtaaggatgacagtaatatcaacttactgtcaagtaagagttgttttatataaactgaaaagaccttttacttataaacactcaatttggtgaaacctgtaaataatatagaaatattggtgaaaggaacttgagcgattttaagtgtatattttctggtatttgatttgtgctctgagtatattcaaagttaatacacggtttttttcactatagttaacatatacaaaactgtaaatcttgaccttggtgtgataatgaaagcaccaaatcccacatttctccagactagtaagacaacagattgtcccacctctcatacaagaacaggtatagttagggctgatgggctgggtgtgctgcttcatacctttaatcccatcacttggaagacagaggcacacgaatttctgtgagttcaaaccagtcaggactacatagtgagaccctgtcttaaaggggagaaagcagagctagttacttaacctaaaagatttgtatatactatatatatttgaaagtattttacttacatttttaatttgatgatctcttggttgttggtatttatttagacacaggcacacagtaattacaagcaaatggttacattttctttttgtttctttttctaggttacagtacctttaccagcatcccagctttccttgacgaattttggatctacaggacaacctctgattgctttacctcagacacttcagccccagttacagcacacgaccccacaagcacaggctcagagtttgagccgtcctgcccaagtaagccagcctttccgaggattaatccctgctggaacacagcatagcatgatggcgaccacaggaaaagtgagtgaagcttggttagtgcccatgaggctgtataactggtgggtgtcagagataatagatctgtgtgcttgttatatctgtgttgaaagggctgtaagattgctcattgggtaaagttgccactaccaagactcagttcaatgccacgaagccacatagaaggagagaactcataattcaaaaattggcctccgtattgagggtgattaagtgtgcacacaccaagtacataagtaagatctaatataaatcaaacatcagtttttacaaccccacagaaaacctcaagagaatgaatgtatgcttttatttttcctacattatttactacttttcttatacttcttagttttgtctaataacaaagaattcagttttttatggaagcattagacgttaaatttctcagacctatcaggctgcttggtcctttggctatagtaaggtttttgttttaaccactttatagtttaaccatcattaagcacaacacattgctcacagaattagagggaatgttaactttattgtgccttttttttcttcagatgtctgaaatggaactaaaagcctttgggagtggcattgatatcaaaccaggaacacctccaattggtggtcgaagcaccacgccaacatctagtccattcaggtaaggtggacatttaaatctgcttaggacactacataatattttgaaatttttaaaattcagttgttaaaatccttaaggtgttgccaatcctatgttaaacagaagttattaaaacatttattttactaattttatctaagatgttaacaccgttactttttttttcttttttctttattttgctccacatcccacatcccctgccctccccacccagtctccacgtggatgtcctcacccccaccccacctgacctctaaacttcctggggcctccagtctcttgagggttaggtgcatcatctctgagtgaacacagacctggctttcctccactgtatgtgtgtgaacaccatatttcaagaacattctgttgatacaagtataggaactctctcttacttttgctgtccttaatagtcttaccatgttcagccactaaatgtgatggaaatccaaacgtaaatgcctttaaaatgtagcagcagcattgtttacctggcactactgtactaaccatgacttcttttccaagggctacatcaacaagtccaaacagccagtctagcaaaatgaacagtgttgtgtatcagaaacagttccagtcagcccccgccacagtgcgcatggcacagccgtttcctgcacagtttgcaccccaggtaggcagaccccagggggtgagtacagtgcttgtaatgatggctggtttgactaagggtgtggctttacagtcaccatgtaggtgagcagttacggtgtgcacctgggaatgaaaacttgtctggttttaaaaatatgatactgaaaaatagatgcagtagtagtttagttttatagcagacatgagaaatgctcaagatccccacacggctctgacagtttcaatcctgtttcttttgtctttttggaagcagtttgattttcagtgcagggtccccgtgcttaggtttccagacccaccctcaggtggctttggtccttatgctacctgcacagttgaagaaagtttgcgggaaataatgtgcaggcctgagtttctcctcccctggctgaatcattggagactggttaagattagtaagtcacaaactaggattggttcccaaggaacacatttgttgagttactgtaactgtaccttcagattatgtttagtatagaagtgggcttttctgcaattgtccctttctctctaccccttagagtttccatctgaagtgccatagcatgctttgcctaatttttctgttaaacttgataagcatggcccatttattctttgtccttattaatggaatggcacgatccaaaaacttccactggcagaatgggcacagatttactctgggataagccagcctgatctagttggccttttttttcctttcctttttttttttttctttttttctttctttttttttttctttttttttttttttcccttttttcttttttttttttnnnnnnnnnnnnnnnnnnnncagcctaacctggtccctccattggtaagagccccacatactaacaccttccccagcgcctgtacagaggccaccaatggcactggccagtcagatgcctcctccgctgaccacaggcctcatgagccatgctcgtttgccacatgtagccaggggtccttgtggatcactgtctggagtcagaggtaatcaggcccaggctgcgttgaaggctgaacaagatctgaaggttagtacagtattgatggccagcagagcaagagtctgtctctgaaccctgtcggaaatgccctggcccatagccgtgtatccaggcattcgttgtctttaccagacttaaccaagctaactgctttttgttcatcccagccccctgtttgtttttgtttttgttttttttctcccttccatccttaccttttcctcctttttatgaccccttcctttgccactatagtcagaaaacaaattaacattttaaactatattcaaatggattgcttgtgaaataagtatctgagggaaatctgagtttggatacagtattttaaatattaaaaaaaagtaatatggattgttattaccagtcaccctgtattatttccttttttttttttttttcctaccttcctgccctccctccccatcccaacttaatacataatcatgattttgtgaactctggaatgggtaagacatgttagctaccttgattcttatcccttcagaaatcatttgagtaattttcatcttaaacattccacatcctttttttgcatgccacctgtggtggccatattccagaatgcaattatagatgaactcagaaaagcactttgggatccttcatggtaaaaggcacaaacagacatgggtttgctgaggccactaggagtctgtgtggggacagtttttagcataattctcacccgtcttcctatacagccaatttgagcttgtttttctaactacctagggctgactttaagattcaagagcggttttctcaccacgtagattaggctagagcagagatgagctttgtgcgtatgagcaggagtgtgcacagtaaggcttcactctgagttagaggcatgtttgtgataatactgctaaagaagtcagttaactgactaaagtcccttcgtgtttctaaagcttaggaatccaattaaaggttaccctctaggagactgcctaggacccattactcagttttgttaggctgtgtgcctagggtttccgtctgtctgttactactaaaaagtgcttgcaccaaaagcttagcagattgtgtagccttccactcccggctaattgccacttgatctttaaacattcttatgttaaaaaatgacattagaacataataatattagtggggtgggagagtataaatttcttataaactgttttagttagtataggtttaccagtagaacatgaaggagctcttgtggtttttggttttgttttgttttttattatatgcaaaaggagtagaaagttaagtttaattggatatagtatagcactataattacaggttaatgtaagtatattctttggggcacattgtcattgaaacggattatttaccagctcagaatgtggtaggagctatcagaacttagtgatcaagtgaagtcgtagttactaatttctgatgctcttcccctgcagaagagagctgtgggaagaggactcagccacaagacatttggtcctaggtgttggtaatgccacaatataagtgcttccttttcattctattgtagaccacatgttgataactagaagttttaagtgttacgttacatgtatgctttcagactgtgcaagcagcctccccaataaagtctggtattagtgagctgttcccaaaagagagagaatcggcagcaatgtgtattttattgtttataagagggcagacgctagaaagatggtggggggtggccttgtttcaggtgttttgttttttttaaatcacatagaatattttcagagctaggagaaacctatgcattaaaaactgaaagatcgatggggcacaaacttagggaaaactgatttttgtgattggtacaaaaatttgaactgagattgatttgacaggctttggtaatgttaggtaatgttgcagtgctttcagtttttgttttcttatttttaaaggcaaagcagagagcagaggttcttcagtccacgcagcggttcttctctgaacagcaacagaacaaacagataggaggcaaaacccagagagtggacagtgatacaagtaaccctgaaacgctgagtgaccctcctggcacctgtccggaaaaagtagaagaaaagccaccccctgcacccaccataaccaccaaacctgttagaactggaccaatcaaacctcaggccatcaaaaccgaagaaacaaaatcgtaaaggctgtggtttattggggatgggtgggtagggaaagtgaagtcaaataatgccagccagcagccacaggggtaaagtggtctgtgacatcatcctgtgagacacaaggggcatagagcatttacagtgacagagctgctgcacagtgaggctccacaggctcgcacctccggtgtaacatttgcatcttcagttggtttgtatacaagtacgtaaacagtctgtaagtgcatacagtttagtcctaaggagcatgaaacaccagaagtaggaggaggagagcgatagataccacagagtagctcagctggacactgggtggtcccatgaatccatcagctgtggctcttctgctcccttgtgttctttggatgtgtctatggctcttctaggcttgaaagtaaaatgatgctaactggtgctggatagaggagccttatcttttattacggcagcttgctatttttgtaacatggtgatttggttgaacacaataaagtacagtagtaactgatctcccctcttcctggatgagtgagcagatgattgaatattgatgtcagcatccttgaacacactcagatgagcaacatagagcttctgcttctatttaaaatgatgctgggtttgattgtggtccgaagctttgaagcactacttggcgtctccttccttggaggtctcaccatttaaacataacatttgataacgtgttggtaaggtgaggtctagcttgtctccactaggtcatcttcatatgaatccagtgggtatacggttttgttttagggatagttcattttttaatgacggtttttagctgacattcatggagagaatgaatccttagaactgtgccgctagtgaaaggaaatcctgtctaagagtgtttctttacagagcagtgtcacaccatcctttgggccctctgctggaaacatagaatcaagtctcaaataatgccttttaaattgtctcctctagtattatagatgtaggacagtactgtatcatacctctgtgaatgtaacatagcttgtacctgctttatgatacgtagtagtgaccgtgctttatcagagctgttttttaatgatgttgctcagaatgttttctttccagatgatgattgagaagctaattaaaaaaaaaaacagaaacaaaaaatggtgccaggtaccacaagagtaacagaactgtgctgttttctgggattttgttttttacttttttttttttttttttttttgataagagtgtgctggatgtctctacaattttgttcaaatgactgcagaacctggaaaagctgttgctgctattgatgcataacatactgctattattggtctttttatataaatataaatatatatacatatatataatttgaattttttggaaactttagctgtgctgtcaactttggaaaaacgtatcccagtttactgtgttgagttggcattgtacagaaattaacagccatattggtctagaaatgttgaacttaatttttttttccatttgtacaggggtaacgcactgtattaaatatgtaaggtcttatctacgtgggtttgattacaaaaactaataaagtattctctaaataatgagtcttggaacttctaatctattccaaagtcggaagcaaggcttgttagtgtaccaaaggtcctagccgttatccaaagagttagggactgccctgaggtcaagaagcttaaagctcactcagtcagaggtggtgttgagggtaatagttacagtttctgttcttgggatgatcaaactttgatggcaagatggcagcaggatgatcaggagttaaaggccattctcatctaggtagtaagtttgaggcccatctgtatgtgtgtgagaccttgtcttggagaaaacctagggagacacgtgtggtagtgcacggctgtaatcccagcactcgggaggcaggggcaggcagctctgtaatcccagcactcgggaggcagaggcaggcagctctcttgagttccaggccattcagtgaactccaggacagccaggcctacacacagaaatcggggtcgggggcagcctagaactggagagtcagataaaaaaaatctaagattgctcttggtttaaactgccaaatagaaaaaatgtcttaccattcttggataaaaatggaaggaccagaagtggacctgaatgtgtatttctcagtattttcattagcatgttcacagtcattaacgttaattactgagttggcaaagctgagggagattttaattgtttatccctatatgtggaacataaaggcttctagagaattttagcagaactaaccactgaataatatatgtatcactgagtcaatatattgtggtttctaaacattcaaggacattggctaagctttttaggtctgtggttttctgaatgttgtggcttattctagagaataatcaggagaaggtgatgacagggtcagaacccctgttaagagggttttgtcacattggccttcttactaagtcactgtcgcccaactgttttgtatattctaaccttaagttcctaagttttaggtcatagaagatgaaaagcctgtatagcttacagtgtgtgtctctgcatgcatgtacatactactacactgtgctaaaataaaacaccactgatacttctgccttgtctgcaatggaaaatggtaacaaaagcctgtccaatggaagtaaggaaatttataaattggcctgtgggtcaccacaggagtccactactactggaaattatgtatttacattacagttcataaccgtagcaaaattacagctataaagtagcgacaaagtacttttatggttggaggtcatcacaacatgaggaaatgtattaaaggttgtatcatcaggaaggttgagagccactggtgtgagtgccacttacggtccttaactgtaaaagggggtctggggcttttcactcaggtagtggtgaaagtggtggataaggcaagggtaggtacagtttttaaagttcttttcatgtcaatcctgggctagagatgagatctgaaaggctgagtgagactgtattgtatgcttgtgagttaggagcaccagaatggaacgtgtttaggtaggtgttctaatagttcagtcactggtttgttggggtttttcccacttgtgttgtcatcgtgcattatgtattcagttggtaaaaaatgtagtggttcaaaataacaagtatccaggttcttttgggtcaagaacgtgttgctttggtgtggtgcctttgacttgaggccctcaaggtgaattgtactgcaaagtttcagatgtggagaggtagcaactctcccacatctccatgaatgtgaatcagccaggtctgagagagagtcgagcacagtaaggcacaggcaaggaacataaatagtgggcaattggaagtgaagagtcactttcagggcttaaagcaaaggggaaaagataaaggagactcagctacacccaatcctgggcctctgctgaaatggaactaaagatgagttcgtctccctagctcactggtgccatcttagatgttgcagtctcacagtgttggatctgcacctttaatccagaccccataacctgagtcatgtaacaccacttggagctcttggtttaagcagtctactgtgacttcacagctaccatggtacctggcttaacattttgtcaagtacattatgtcacacatacatacatacatacatacatacatacatacatacataccatgtagaacaatgccgtccatcagaggtaataacaggtctttgttctgaggattgattgaccccagatttctcagggttgctcaaaagatggtcctttgttcctcctcccatcaccatcccttttcatgacagctgtctccttagctctcaaccgtgtcttgaaaaaacaaaagttaaaaaaaaaaaatgccatcatgttcagatatccatatgtcagcttccctttctgagcaagaacagaagcctcggcctttctatatcagtagactccaaagtccccaccttactctaaatccatctgtctaagggaatggcctccctggaagtcactgcagcaagatttgtgcttgcactgcagaagcagcattgtctacctgggaactgcagcccagcctctgaaatgaaccatgaacaccagagtggatgccagaggtgggctgtgacaggtaccagtcactcctagaacagtctgctttggactgctttctgcatataccctcagaggccctttagcacagcaacttccctggtatttcttacagacacatcatgttggcagagtgcatctctataaagggacacccaacttggttgtcagggctcagttgatgggagcagcttaagaggagttgagacactggcaagaattctgtccagcagccatcaaggtagcagagggctggaaagaggcaggactattccaagcaaccccttcttttctggttagtttgaatctagcggaggaaacaattgtttattcctccaacaagtaaacaaagcaaggataaatagaagcatctgtccatctcaacaaagaagggaataacttgctgacttgtgtatttgtcttgttctcctttgctttcatctttcttcctatatcctttccctcttttcctatctgctgttcttttcaagttcctagtctgtccaataactacttgagctcttttctctctttagtgtgggtatcattgtttgtatttaaatgtctggcttgctttttcagttcacatgttacagtggtccattctgaataataatgaaacctcaaaggaagatatgggatatgaaaatgccaaggatgggatatacatataaaaggcttaatgaggctgagacaatgaagggtccttttatttaaaagggtgggggggggctaggattgtgaaaagaggaggtacccagaagtacctacctcctcctggggaacttgtgctggaagggatgttacttcctctaggggggctaggtgggaggaagaggtttaaaaggaaagggagggtgtgccagactgcagtggggggagggggaatacaagcactacattgcatagttgtatgaaacaagggggaagctttagttaaaaagattccgtatgaaaccaaaaatgatatccaacccatttgaacaaattacaaggagacagtacatttgtaaagggaaaaagaaaaggcaaaaatcatccctccagaagttcaagatctgaatctaaatattgaatgagtgaaatgtcaactcaagaattcagcctgatttaggagctgatccatgactacaacaaggagacaaggagtcagtggctgtggcctagagagatgtgaatgagaaatatgtcagatttggggggtgggggggagattaatcatggaaatggaaggctcagaaaatcaagtttaaaagtcagtggatctcctggctggggtagtgtatgcctttaatcccagcatttctgaggcagaggcaaatggatcaaaagtctaaggctggcctgttctacaaagttagttctaggacagccagaggtatacacagagaaaccctgtctctaaaacaaaaaccctcaatggatcaagtaggagaaggacacgggtaaagtgtcattgtgctagcaataaaggaaaattataactgcaactttcaagaccatgactgagagagatcaagcctgagtctttggtatagaagaaaaacgtattcagcgaaatagtagcagaaaatccctcaaatctaggaaaagatgaatactaagaggcattaaaaccccaaatagggaccaatgagatggctcaacagttaacactggctactcttccagagatcctgagttcaattcccagcaaccacatggcggcttacaaacatctataaagggataagatgccttcttctgacatgtagatatacatgcagatagagcactcttacatttaaaagtatatatagactagggggctggagagatgtctcagtgtttaagagtactgtctgctctttgagaggtcctgagttcccagcaaccacatggtggctcacaaccatctgtaatgggatcttctggcatgcaggcatatatgcagatagagcctcatatataaaataaaaaaataaataaaatcttttaaaaatagactaaagaaatagactctccttgtcacacaattaaaattctgttgtagctctgataatagaatgctgcaaagagaagcaataagctaaaaaggcaaattcactagaattacatgagtggaaaccctaaaagtcaaggacatgtagaataattgattttaagctctaagaataaatagctgacaaacttattcaacaaaggtatcttggagtctttagaaaataaggaaattccaagagaaagacaaattaaagcagcccttgacactaaaacagcatacaggagaggcacttgctggaaacctatgcacagaggaggaattcgcgctcagaaaggaaagatctcatgagaagaatagccataagaattagaaaataatcaaacaacaaattggtaaagccagtattttagtcagggttctttaaatgaacagaactaagaaaatgaataagtaaatatatattcatgtatgtgggatttattagactggctcacagggtgtgtcaccatgcaaaggctaagaatttcataggtgttcagcctacaggcaggacatctcagccatcccaatctggctttggagtcctggaggagttctgaagagctcctgtcttcagtgtgttctggaatcctgaagctgggtttactactggcagcacccacatagacgaacttgccagcgaggatgggggcaagcacagtctggatggactccatgactttaacaggaaaacatgaagttgggaggtgggttgggtctgggaggagatggggggagtagtagagatgaataggatttttaaaaaatgtacatgtgtatgaaattctcaaaaaaataataaaaatgttttaaccaagagttgatctttgaaatggtgaacaatattagtaaactcttaactaaataaataaaagtcatcaatacaattaagaaataaacataaaagacatcaggataagaggggaggaaaggagactatttaaaagagcttcagaaacccacagcaaggaagaaggagaagaaaggaggaggaggaggaggaggaggagaagctgctgttgttgaaaacttgagagaaacatgagagagatgtaccagagagaagaaagtgaacagaacacagccccagccagcaggctcccagaatgcaggaagggaacagaaatctcatttaaagggtaagccgctcagccttgtgcagttcaccagagaggccatagctctaaatcctcctcaaacacagttgcagagtgctctgactggcagaataatcaacagtggaaagttcttgctccaaaggctgtggccaggggtcagcttgaaagacagcctattgcttcgaattgagctatcctaaggacttgagaccagagaacagtctgcgtgagacagctcgggaaacagctgggggtgaggggtgctgggcaatgacaaagtggggaagtagaagtcataggaagttaatccatttctgcaagcgcaatgtctaggtcccaccctcagtgcctgggataagacctcatccactgagaaaactgcagactgatcatccagagcctgacgttagcccgtggatcagcaactggcgccagagaactccgaagcgggtcatgtgacatccttaggcacatccctctagaagggttaattcgtgcttggtgggttttgaaactacaaagaaaagtgtgtccatccnnnnnnnnnnnnnnnnnnnnnnnnnnnnnnnnnnnnnnnnnnnnnnnnnnnnnnnnnnnnnnnnnnnnnnnnnnnnnnnnnnnnnnnnnnnnnnnnnnnnnnnnnnnnnnnnnnnnnnnnnnnnnnnnnnnnnnnnnnnnnnnnnnnnnnnnnnnnnnnnnnnnnnnnnnnnnnnnnnnnnnnnnnnnnnnnnnnnnnnnnnnnnnnnnnnnnnnnnnnnnnnnnnnnnnnnnnnnnnnnnnnnnnnnnnnnnnnnnnnnnnnnnnnnnnnnnnnnnnnnnnnnnnnnnnnnnnnnnnnnnnnnnnnnnnnnnnnnnnnnnnnnnnnnnnnnnnnnnnnnnnnnnnnnnnnnnnnnnnnnnnnnnnnnnnnnnnnnnnnnnnnnnnnnnnnnnnnnnnnnnnnnnnnnnnnnagggaggcccagcccagaccatacgctgcaaagctgtgtgaccagcagaggtcagtagtacataaagaagggaagctactaagggtgaagcctgtcgaggcctctgttgattatgtgtttacccaatataggcgaacgacagcatgaataccaaattcaactgaccctcttccccgccccaccaccatcaccttgaatccagaagtaatcccgacgtttcatctgttattctttttgtcccttgagtttaagatttatttttattctatgtgcatacaagcttgcctgcatgtatgtatgtgaatattgtgtctgcctggtgccccaagagagagatcctggaactggagttacaaatggctgtgtgcggctttgtgggttctgggaaccaaacattgatcccctggcaaaagcagcaagagctttaatcactgaacacccctcactctgtctctgtctgtctctctctgtctctgtctctctgtctgtgtctgtctgtcagtctatctgtctctgtgtgtgtgtgtgtttgaggaaggatttctctgtgtagccctagctgtcctgggacttgctaagtagacttgtgtggcttccaactcaaagatccacctgcctctacctcctcagagcagggattaaaagtgtgcactaccaacctggtgtgaaccgtctcttaagcaccctgttatcatcatcatcatcgccgccaccgccaccataatattttaaagactcttatgttttctttctattcatctttatacatttgtctactcgttagtaggcaaacgtttagttgttgttgtttggggggggggctttttggccttctgttttcacactttccctttatgcttttagtactattacagtcttgccccactctaggcttttaaaactttgtgggtttttccccccttcttacattcatgtaattggggttatggacttctctcattattggggattttacattcttttttgatgtcttgagctttttcctctccttcagagctttctgttctgtctcttctcacatgtttgcttcatttctttcccctctccctgccaggctcctttatgttgtccatgtgtgcttccatgtcatgtacactttgacgttgttgcttttgaagccagttgattcctctattctgctgcgggaggtttacccctcaagagtagagcaggctactccgtaagaaaaatacacaaagaaaattggaggggataaccagaccaacaaggaggaggaagggaaggaggggannnnnnnnnnnnnnnnnnnnnnnnnnnnnnnnnnnnnnnnnnnnnnnnnnnnnnnnnnnnnnnnnnnnnnnnnnnnnnnnnnnnnnnnnnnnnnnnnnnnnnnnnnnnnnnnnnnnnnnnnnnnnnnnnnnnnnnnnnnnnnnnnnnnnnnnnnnnnnnnnnnnnnnnnnnnnnnnnnnnnnnnnnnnnnnnnnnnnnnnnnnnnnnnnnnnnnnnnnnnnnnnnnnnnnnnnnnnnnnnnnnnnnnnnnnnnnnnnnnnnnnnnnnnnnnnnnnnnnnnnnnnnnnnnnnnnnnnnnnnnnnnnnnnnnnnnnnnnnnnnnnnnnnnnnnnnnnnnnnnnnnnnnnnnnnnnnnnnnnnnnnnnnnnnnnnnnnnnnnnnnnnnnnnnnnnnnnnnnnnnnnnnnnnnnnnnnnnnnnnnnnnnnnnnnnnnnnnnnnnnnnnnnnnnnnnnnnnnnnnnnnnnnnnnnnnnnnnnnnnnnnnttatggtgccaagcctcaaatcctttgcatgaccccttccagtcctgggccatcaactacagctgaggctataccttcaccagtggccttccatgacctctcaaagtgccaagcctcagctgttcttcatgacaccttcatgccttaaaaaccagtaccgcctgggtgattcttacacattaccaagtccagctgcaccacgaggtacaaccttggctatctctggaacacagcttctttgtgctcccagaaaacacttcccagaagattttacctcggtgatgctggtctcttcttaatcactgctaattccttagctccagctaaccagcatcaattgtcccaggagttccttccactcttaactctagagccagagccacatggctgaagctgccgagttctgctgcttacaggaactagaacatgatccccttgtactattacattatcactagctttatgttttctaaatccttcactgcctaaacttggctatcctagttcttgctctgtagattgaccttgaatgcagagatcagcatgcctgtctcctggggattaaaggtgtgtaccaccatgcctgaatctaaattcagctgggtaggctcttgccccaaggtcccactcccttaatctgttatttcctaggacacaggattttgctccatttcacttcctggtatgcctttactactcagaccatatattttatattttgcctttctaagcttgttcaaacttctccttgtgagatttaaccagagaacagtctctgctgggcttttttgaaacttcctttgtcaatgcaattaatgcaattaatccaagtctcttcaccttagcctcaggcagacttttcagacaagagcaaaaagtagccacattcttcaccaaaataccacaaaaacagtctttatgccacatactgaaatgcttctcctttgaaatctcttgggccaggtcaacacagttcaaattactcccataaacaaagtcttccatattcctactaggatgacccattaagccccattcaaagcattccactgagttccaaatccaaagtccaaaaatccacattctttcaaataaaagcatggtcaggcccatcacagcaataccccactcccagtaccaacttctgtattgggttttactgctgtgaacagacaccatgaccaaggcaagtcttataaaaaacaacatttaattggggctggcttacaggttcagaggttcagtccattatcatcaaggtgggagcatggcagtatccaggcaggcatggcacaggcagaactgagagttctatgtcttcatccaaaggctgctagtggaagactgacttccaggcaactagggtgaggatcttatgcccacaccctcagtgacatacccattccaccaggtcacacctattccaacaaggccacacctccagatgatgccactccctggtccaaggatatacaaaccatcactatatatatataaatatatatatatatatatatatatatatatatacacacacatatatcttttaaaaa

SEQ ID NO: 626 - DNA, 8675 bp, Mus musculus
tctcgctcgctctcaccctctcaggaggtagcgaaagtgctttggcggtttgtacggcggtggctcgggctttcgggaccgagcggccctgcggacggtctctcgaggcaatctcccctcccctgaccctgatccgtccggggcgagccccttggaagcgcgcagacttggttctcaaccctggcggagtgatgaacagtagatgttctaaggaaattgatgttactgatcttttagttgcagctcgacatgggttacaaagtcttggaaaagttggtatttcacggcgaatgcccccacctgctaaccttccaagtctcaaagcagagaacaaaggcaatgatcctaatgtgaatattgtgcccaaagatgggacaggatgggcatcgaaacaagagcaacatgaagaagaaaaagcaccagaagtgtcaccagcacagcccaaacctggggttgcagctcccccagaagtagcacctgctcccaaatcatgggccagtaacaagcaaggtgggcaaggagatggaatccaagtgaatagtcaatttcagcaggaatttcccagtctgcaggcagctggagatcaggaaaaaaaagaaaaggaagcaaatgatgaaaactatggacctggacccagtttacgccctccaaatgttgcttgctggagagatggtggtaagtctgctgggtcaccttcctctgatcaggatgaaaagcaacttggccaggatgaaagcacggctataacatcagaacaaaatgatattctcaaagtggtagaaaagagaatagcttgtggtcctccacaggccaaactgaatggacagcaacctgcacttgcttctcagtatagagctatgatgcctccatatatgtttcagcagtacccaaggatggcatatcctcctctacatggtcccatgaggttcccaccttcattatcagaagcaaacaaaagccttcgaggaagaggccctcctccttcttgggcttctgaacctgaacgcccatccatccttagtgcatccgaactgaaggagctcgataaatttgataacctagatgctgaagcagatgaaggttgggcaggtgctcagatggaagtagattacacagaacagctgaacttcagtgatgatgatgagcaaggaagtactagtcctaaagagagcagcagtgaggatcaaactgcaaaaacacctgaaagcacagaaaaccgaaaagaagtagatgaagcttccagcactaaatcatcttctcagatacctgctcagcctccagtcacaaaaagtccttatgggaagggaccaccatttaatcaggaacgtggcccatcttcacacttgccaccacctcccaagttgcttgcacaacagcatcccccacctccagatcgacaaatacctggaagacaaggcccctttccctccaagcctccagtacctgataacgatgaaatatggaagcaaagacgaaaacaacagtctgaaatatctgcagcagtagagcgtgctcgtaaacgccgtgaggaggaagagcgaaggatggaggaacagaggaaggcagcgcaggacagcaatcgcagtgaaaaggagaccacacaagtggtacaagaagcagaacctgaatcgggggctcaacctcgacctggctatttcaaacagtttcagaaatcattgccaccacgatttcagcgtcagcagactgtgccctcacagccgtctaatggttcagtccctcctccaccacacagacccctttaccagccaatgcaaccccaccctcaacatctggcttctatgggttttgacccaaggtggctcatgatgcagtcctatatggatcctcgaatgatatcaggaaggcctgctatggacattccacccattcatcctggaatgattcctcctaagccgttaatcagaagagaccagatggaagggtcacctaatagctctgagtcatttgagcatatagctagatctgcaagagatcatggaatttcactttctgaacctcgaatgatgtgggggtcagatccctatcatgctgagcctcagcaggcagctactcccaagtctgctgaagaaactggggatgcaaggcctgaaactgcaatggaccatgagcatatgactgctgcttatcctgtagaacatagtcagttggaaactcattcaaaaacggacgttgctagagactcaactgaaaccgaagaacaaaagtttttaagcagatcactggaagatgtaaaacctcgccatgttgatacaaatactcagtctgcttgttttgatgtaattgatcagaagagcttacctacttctgcagaagagcggatctcagcgctagaaagtcaacctgcccgaaaaagaagtgtttctcatggatctaaccatgctcagaatgcagaggaacaaagaaatgagccgtctgttagcatacctaaggttatcaacagatgtatggattccaaagaaactgtagaaaagccagaggagaagccaagaaaagatggctttctgcgatcttctgaagggcctaaaccagagaaagtctataaatctaaatcagaaactcggtggggtccaagaccaagctccaacagaagagaagaaggtaatgataggcctgtgagaaggtcgggtcccattaaaaaacctgtacttagagatatgaaagaggagcgagagcagaggaaggagaaagaaggtgagaagcttgagaaggtcactgaaaaagttgttaaagcagaaaagccagaaaagaaagatcttcctcttcctctcccccctccagcaccagctcaacctcagccacagccattggtttcaccaccagtacagccagaaccagagaaaccaccatcaacagaaacatcaactttgactcagaagccatctcaagatgagaaacctttggaacctgttggtagtgtccaggtagaacctgtagttaaaactgtaaaccagcaaagcgttgcagcaccgacagtcaaagaagaaaagccacctgagaaagtcattaacaaagatgttggaatagaaagatctcgcccagattctagactagcagttaagaaagactcatctttacccactaggacctattggaaagaagctagagatagggattggtttccagaccaaggatacagaggccgaggcagaggcgagtattactccagaggtcggagctatagaggctcttatgggggtcgtggcagaggtggtagagggcacactcgtgagtatcctcagtatagagacaataagccaagaacagaacatgtgccttcaggacctctcagacaacgagaagaaagcgaaacacgaagtgagagttctgattttgaggttgttcccaaaagaaggcgacagaggggttctgagacggacacggacagtgaggttcatgaaagtgcgagtgacaaagacagtgtaagcaaagggaaacttcccaaaagagaggaacggcctgagaacaaaaaacctgtcaagcctcagtcttcttttaaacctgaaaaccacgtccgaatagataatcggcctttagagaaaccttacataagagaggaggataaatctaaacctggtttccttcccaaaggggagcctacaaggcgtggcagaggaggaacattcagacgaggtggaagggatcctggaggccggccatcacgtcctgccaccttaagaagacctgcttatcgagacaatcagtggaacacaaggcaggcagaacctcctaaacctgaagatggagagccaccaagaagacatgagcagtttatgcctataccggcagataaacgacctccaaaatttgagcgaaaatttgacccggctagagagaggccccgaaggcagcgacctacccgaccaccaaggcaagataagccacctcgatttagacggctgagagagagagaggccgcttccaagacaagtgaggtgttggtaccctcaaatggcacagctaataatgttgttcaagaaccagttaatccacctgcggacatttctggaaataagacaccagatttgtctaatcagaattcttcagatcaggcaaatgaagagtgggaaacagcctctgaaagcagtgattttaatgagaggcgagagagggacgagaagaaaaatgctgataagagttcacaagcagttgtaaaggctggtgaaagtgttttgcctccaaaaagggaaatagcgaagagaagtttttctagtcagagacctggagttgatcgccagaatcgtcgtggcaacaatggcccacccaaatcaggaaggaatttttcaggtcctaggaatgaaagaagaaatggcccaccatcaaaaggtgggaagagagggccatttgatgaccaggcctcaggcacagctggtgctgaccctgtcagtggtaactctgcacaccaccaagaaggtgtgcctaatggtgcaggacagaagaattccaaggatgctgctggaaaaaagagggaagataccaaaccgggtcctaagaagccaaaggagaaagtagatgctctgtcacagtttgacctcaataattacgcaagtgttgttatcattgatgatcatcctgaagtaactgtaattgaagacccccagtcaaatctgaatgatgatggctttactgaagttgtatctaaaaaacagcaaaagcggttacaggatgaggaacgccgaaagaaggaagagcaagtcgtacagacgtctaatggcacagacttcgtagccgctgggaagtccatgcccacttcacagtcccatggctctctaacagctgagttatgggacagcaaagtggctgctccagctgtgctgaatgacatttctaaaaaactaggtcctattagtccaccacagccaccttcagtcagtgcgtggaataagcccttaacatcatttggatcagcaacttcatcagagggaacaagaaatggtcaagagagtggtgttgaaattggaattgacacaattcagtttggtgctccggcctcaaacgggaatgaaaatgaggtggttcctgtgctttcagagaaagcaactgataaagttcctgaacctaaagagcagcggcagaagcagcctcgggcagggcccattaaagctcagaagcttccagacttgagtctggtagaaaacaaagaacataaacctggtcccattggaaaggaacgatcattaaaaaatagaaaagtgaaagatgcccagcaggtcgagccagaaggacaagagaaacccagcccagctgtggtcagaagcactgatcctgaaacagcaaaagaaaccaaagcagtctccgaaatgtctgctgaaattggggcgatgatctcagtctcctctgcagagtatggctctgatgcaaaggagtctgtaacagactacaccacaccttcctcttctctgcctaacactgtggctactaataatgcaaagatggaggatactttagttaataatatggagtctgcacggaaggcatgggagaattctccaaatctacgagaaaaggggtccccagtaacttctacagcacctcccattgtgagcggagtcagcagcagtgccagtggaccaagcactgctaattacagctccttttccagtgcatcaatgccgcagatcccagttgcgtcagtcactcctacagcatcactatcaggagctggtacttacactacctcttcattgagtacaaaatctacaaccacttcggaccctccgaatatttgtaaagtaaaaccccaacaattacagaccagcagcctaccttctgcaagtcacttttcacagttgagctgtatgccttccctcattgcacagcagcagcagagcccgcaggtttatgtgtctcagtctgcagcagctcaaatcccagccttctatatggatacaagtcatttattcaatacgcagcatgcgcgattggctccaccatccctggctcagcagcagggcttccaacctggtctctcgcagccgacatcagttcagcagattccaatccctatctatgccccactgcaagggcagcaccaagcccagctgagtttgggggctgggcctgctgtttcacaggctcaggaattattcagttcttcaattcaaccatacagatcgcagccagcctttatgcagagcagtctttcccagccttccgtggtcctctctggtacagctatccacaacttcccagctgtccagcaccaggaacttgccaaggcacaatcaggtcttgcctttcagcagacttcaaatcctcagcccatccctatactgtatgaccatcagctgggccaggcatcaggactaggaagttctcagctgattgatacacatcttcttcaggttacagtacctttaccagcatcccagctttccttgacgaattttggatctacaggacaacctctgattgctttacctcagacacttcagccccagttacagcacacgaccccacaagcacaggctcagagtttgagccgtcctgcccaagtaagccagcctttccgaggattaatccctgctggaacacagcatagcatgatggcgaccacaggaaaaatgtctgaaatggaactaaaagcctttgggagtggcattgatatcaaaccaggaacacctccaattggtggtcgaagcaccacgccaacatctagtccattcagggctacatcaacaagtccaaacagccagtctagcaaaatgaacagtgttgtgtatcagaaacagttccagtcagcccccgccacagtgcgcatggcacagccgtttcctgcacagtttgcaccccaggcaaagcagagagcagaggttcttcagtccacgcagcggttcttctctgaacagcaacagaacaaacagataggaggcaaaacccagagagtggacagtgatacaagtaaccctgaaacgctgagtgaccctcctggcacctgtccggaaaaagtagaagaaaagccaccccctgcacccaccataaccaccaaacctgttagaactggaccaatcaaacctcaggccatcaaaaccgaagaaacaaaatcgtaaaggctgtggtttattggggatgggtgggtagggaaagtgaagtcaaataatgccagccagcagccacaggggtaaagtggtctgtgacatcatcctgtgagacacaaggggcatagagcatttacagtgacagagctgctgcacagtgaggctccacaggctcgcacctccggtgtaacatttgcatcttcagttggtttgtatacaagtacgtaaacagtctgtaagtgcatacagtttagtcctaaggagcatgaaacaccagaagtaggaggaggagagcgatagataccacagagtagctcagctggacactgggtggtcccatgaatccatcagctgtggctcttctgctcccttgtgttctttggatgtgtctatggctcttctaggcttgaaagtaaaatgatgctaactggtgctggatagaggagccttatcttttattacggcagcttgctatttttgtaacatggtgatttggttgaacacaataaagtacagtagtaactgatctcccctcttcctggatgagtgagcagatgattgaatattgatgtcagcatccttgaacacactcagatgagcaacatagagcttctgcttctatttaaaatgatgctgggtttgattgtggtccgaagctttgaagcactacttggcgtctccttccttggaggtctcaccatttaaacataacatttgataacgtgttggtaaggtgaggtctagcttgtctccactaggtcatcttcatatgaatccagtgggtatacggttttgttttagggatagttcattttttaatgacggtttttagctgacattcatggagagaatgaatccttagaactgtgccgctagtgaaaggaaatcctgtctaagagtgtttctttacagagcagtgtcacaccatcctttgggccctctgctggaaacatagaatcaagtctcaaataatgccttttaaattgtctcctctagtattatagatgtaggacagtactgtatcatacctctgtgaatgtaacatagcttgtacctgctttatgatacgtagtagtgaccgtgctttatcagagctgttttttaatgatgttgctcagaatgttttctttccagatgatgattgagaagctaattaaaaaaaaaaacagaaacaaaaaatggtgccaggtaccacaagagtaacagaactgtgctgttttctgggattttgttttttacttttttttttttttttttttttgataagagtgtgctggatgtctctacaattttgttcaaatgactgcagaacctggaaaagctgttgctgctattgatgcataacatactgctattattggtctttttatataaatataaatatatatacatatatataatttgaattttttggaaactttagctgtgctgtcaactttggaaaaacgtatcccagtttactgtgttgagttggcattgtacagaaattaacagccatattggtctagaaatgttgaacttaatttttttttccatttgtacaggggtaacgcactgtattaaatatgtaaggtcttatctacgtgggtttgattacaaaaactaataaagtattctcta

SEQ ID NO: 627 - protein, 2344 aa, Mus musculus
SLALTLSGGSESAVCTAVARAFGTERPCGRSLEAISPPLTLIRPGRAPWKRADLVLNPGGVMNSRCSKEIDVTDLLVAARHGLQSLGKVGISRRMPPPANLPSLKAENKGNDPNVNIVPKDGTGWASKQEQHEEEKAPEVSPAQPKPGVAAPPEVAPAPKSWNKQGGQGDGIQVNSQFQQEFPSLQAAGDQEKKEKEANDENYGPGPSLRPPNVACWRDGGKSAGSPSSDQDEKQLGQDESTAITSEQNDILKVVEKRIACGPPQAKLNGQQPASQYRAMMPPYMFQQYPRMAYPPLHGPMRFPPSLSEANKSLRGRGPPPSWASEPERPSILSASELKELDKFDNLDAEADEGWAGAQMEVDYTEQLNFSDDDEQGSTSPKESSSEDQTAKTPESTENRKEVDEASSTKSSSQIPAQPPVTKSPYGKGPPFNQERGPSSHLPPPPKLLAQQHPPPPDRQIPGRQGPFPSKPPVPDNDEIWKQRRKQQSEISAAVERARKRREEEERRMEEQRKAAQDSNRSEKETTQVVQEAEPESGAQPRPGYFKQFQKSLPPRFQRQQTVPSQPSNGSVPPPPHRPLYQPMQPHPQHLASMGFDPRWLMMQSYMDPRMISGRPAMDIPPIHPGMIPPKPLIRRDQMEGSPNSSESFEHIARSARDHGISLSEPRMMWGSDPYHAEPQQAATPKSAEETGDARPETAMDHEHMTAAYPVEHSQLETHSKTDVARDSTETEEQKFLSRSLEDVKPRHVDTNTQSACFDVIDQKSLPTSAEERISALESQPARKRSVSHGSNHAQNAEEQRNEPSVSIPKVINRCMDSKETVEKPEEKPRKDGFLRSSEGPKPEKVYKSKSETRWGPRPSSNRREEGNDRPVRRSGPIKKPVLRDMKEEREQRKEKEGEKLEKVTEKVVKAEKPEKKDLPLPLPPPAPAQPQPQPLVSPPVQPEPEKPPSTETSTLTQKPSQDEKPLEPVGSVQVEPVVKTVNQQSVAAPTVKEEKPPEKVINKDVGIERSRPDSRLAVKKDSSLPTRTYWKEARDRDWFPDQGYRGRGRGEYYSRGRSYRGSYGGRGRGGRGHTREYPQYRDNKPRTEHVPSGPLRQREESETRSESSDFEVVPKRRRQRGSETDTDSEVHESASDKDSVSKGKLPKREERPENKKPVKPQSSFKPENHVRIDNRPLEKPYIREEDKSKPGFLPKGEPTRRGRGGTFRRGGRDPGGRPSRPATLRRPAYRDNQWNTRQAEPPKPEDGEPPRRHEQFMPIPADKRPPKFERKFDPARERPRRQRPWPRQDKPPRFRRLREREAASKTSEVLVPSNGTANNVVQEPVNPPADISGNKTPDLSNQNSSDQANEEWETASESSDFNERRERDEKKNADKSSQAVVKAGESVLPPKREIAKRSFSSQRPGVDRQNRRGNNGPPKSGRNFSGPRNERRNGPPSKGGKRGPFDDQASGTAGADPVSGNSAHHQEGVPNGAGQKNSKDAAGKKREDTKPGPKKPKEKVDALSQFDLNNYASVVIIDDHPEVTVIEDPQSNLNDDGFTEVVSKKQQKRLQDEERRKKEEQVVQTSNGTDFVAAGKSMPTSQSHGSLTAELWDSKVAAPAVLNDISKKLGPISPPQPPSVSAWNKPLTSFGSATSSEGTRNGQESGVEIGIDTIQFGAPNGNENEVVPVLSEKATDKVPEPKEQRQKQPRAGPIKAQKLPDLSLVENKEHKPGPIGKERSLKNRKVKDAQQVEPEGQEKPSPAVVRSTDPETAKETKAVSEMSAEIGAMISVSSAEYGSDAKESVTDYTTPSSSLPNTVATNNAKMEDTLVNNMESARKAWENSPNLREKGSPVTSTAPPIVSGVSSSASGPSTANYSSFSSASMPQIPVASVTPTASLSGAGTYTTSSLSTKSTTTSDPPNICKVKPQQLQTSSLPSASHFSQLSCMPSLIAQQQQSPQVYVSQSAAAQIPAFYMDTSHLFNTQHARLAPPSLAQQQGFQPGLSQPTSVQQIPIPIYAPLQGQHQAQLSLGAGPAVSQAQELFSSSIQPYRSQPAFMQSSLSQPSVVLSGTAIHNFPAVQHQELAKAQSGLAFQQTSNPQPIPILYDHQLGQASGLGSSQLIDTHLLQVTVPLPASQLSLTNFGSTGQPLIALPQTLQPQLQHTTPQAQAQSLSRPAQVSQPFRGLIPAGTQHSMMATTGKMSEMELKAFGSGIDIKPGTPPIGGRSTTPTSSPFRATSTSPNSQSSKMNSVVYQKQFQSAPATVRMAQPFPAQFAPQAKQRAEVLQSTQRFFSEQQQNKQIGGKTQRVDSDTSNPETLSDPPGTCPEKVEEKPPPAPTITTKPVRTGPIKPQAIKTEETKS

SEQ ID NO: 628 - DNA, 127943 bp, Homo sapiens
cagtcatttagatggtggatgcctctgaaaagagttgtgaccttgggcaaggcagttctcattagctgaggcaatctcaaaagaaggtttagtctcaaagagggctattctcacccagcactcccaagaactctaaaatcagtcattccttccccaggagggactgggcagcacatctcagtgtccaccacaggtggtggttctctcactgagacacagaacccttacctcaaatggataacaactttacatattacaaaaacacaagggaggcgtggtggctcacgcctgtaatcccagcactttgggaggccgtggcgggaagatcacttgaggccaggagttcaaaacaagcctggccaatatggcaaaaccccatctctactaaaaatacaaaaattagctgggtatggtggtgcattcctgtaatcctagctacttgggaggctgaggcaggagaatcaattgagcccaggaagttgcagtgaaccaagattgtgctactgcactccagcgtggacaacagagccagaccttgtctcaaaataaaataaaataaaaaactcaaacaaacaaacaaacaaaaaaacacaaccatcagtcaagtgctatactagcttgttaataaaattttaaatttgcagctagacatatgcctgtaatcccagcactctgggaggtcaaggcaggaggatcccttgagctcaggagtttgagaccagcctaagcagcatagtgagaccctcatctctacaaaaaaaaaaaaaaaagaaaagaaaagaaggaaaggaaagaaaaagaaagaaagaaagaaagaaaaggaaagaaaaagaaagaaagaaagaaagaaagaaagaaagaaagaaagaagaaagaaagaaagaaagaaagattgattagctgggcaaggtggtacacacctgtagtcccagctacttgggaggctgaggcaggagaatcacatgagccttggcagttgaagctgcagtgagctgtgatcagcctctgcactctagcctgggtggcaaaataaatacattctgcatttaatggtcacaaatgggttttagaatgcttgccttctgaaatcacaccattgcaagagtaactccctagtttcttaagagaataatgatggagtttctgtggaagtaaaaacaatctgaggaaacaatccagccctgcctacttctctcaacccctactgcaggattcaagcctcctctcactactccttggattatcattacagcccctgaaacagctgctcttgtgccaggcaaaccattcttcacatttcagctaaagaaaagcttcagacattaaccatttacagctccagcagctagcacaatcactggtacatagtttatactcaattaatacttgttgaaagaaaaagtcactaaggaataaaatatattaagctgtctttcctatgtgatatcataaaacttacacattttatctagattacgtaatatcccagtttaaatctaatcattggctcctattgccctcagtcatacaaagtcagtttacatgactttttgcaatctggtctctgatcatctctgaagttttgcttttttgccccttttttcacctttctcccccctccacctcttcccttttactttatgaacaacagagctatcaagatgctttttaaaatcctcaaacatgccatgctccatttggcttttgggatctttccatacgctggtctctctgcctgaaacattcttcacccttcactatatgcaagttaactgcctccctttccccaaaacttgccccatcacttcctgtcatatctgcacacacacacatacagacacacaccctcactcataacatatattcacatgagtatctaattcctataaactgttggggcttaattctgggcagaaatgtagttataagcattaatcaggctgcgctatgacccacttccttgtaagtgaaagtcgcataacagtagatactgaccatttgcgtcttgattttccctatagataggatttctaacattaaaatcattaggcttttaagaaccgcttaaagtcgggcacggctgctcatgcctgtaatcccagcactttgggaggctaaggtgggcagatcacctaagttcaggagttcaagactagcctggccaacatggtgaaacactgtctctgctaaaaatacgaaaattagccaggtgtggtggtgggcatctgtaatcccagctacttgggaggcagaggcacaagaatcacttgaacccaggaggcagaggttgcagtgagctgggatctcaccattacactccagcctgggtgacaagagcgagactctgtctcaaaaaacaaacaaaaaaaaactgcttaaacagatcctgaattccagacagaacagctgacaccaactagtttaaagatctccacagagcagcctagtcagcatgagaatatggtttcttcatctcctgccccatgactttactctgcactcttcaaccaatcaactatctctacacttctgcccactctgaaacccttaaaaacccaagccctaaactcctcacggcccaatgattaaatctttctctgctgcaaccctgcatattgacttgcaatagatctattatggctacattccctgacccccaccatccctgcaaatgtgggttaggtgccttcctttggactcacaaggcacttttaattctctcatcagagaatttatcacctgtgatggttatttttctgtgtcaacttggctgggctactatgtcaatatttggtcaaacattatcctgaatgtttctataaaagaggtgttttttgtttgtttgtttatttgttttttgagacagagtctcgctttgtcgcccagggtagagtgtggtggcccaatctcggctcactgcaaccaccacctcccaggttcaatcaattctcctgcgtcagcctcccaagtaggtgggattacaggcacgtgccatcacacctggctaagttttgtatttttagtagagctgaggtttcaccatgttggccagtgtggtctcaaactcctaacctcaagtgatccacctgccttggccttccaaagtgctgggattacaggcatgagctgcttcatccggcctataaaagtgtttttgttttgtgggagggggtgggggggtgattatattaactgtaaatggatgtattttgaccttcataatgtgagtgggcctcatacaatcaagtgaaggcctaatggaaaaaagactgatctcccccaaaggaattcttaagtgtggcagccttttgacttaaactacaactttgtctcttccctgggtctccagcctgttggtctacgtatcctattggttctgtttctctgaaggaccctgactaatatgtcacttttaatcataattacttataatttcaccccactctcatcccacttgaatagaatctcctgagaacaggaatttaaactgttttattcatttttatgtcttccttagcctgatatatcatgactttttttttttttttttttttttagacagagttttgctctgttttccaggctggaaagcagtggcaagatcatagctcactgcagcctcaaacgcctggggtcaagagatcctccagcctcagcctctcaagtagctgagattataggcacacacctggctaatacataggtaatatggaatattgttcttttgttttttatggaatattgaaatgaagagtttcatttcactgcaattccccaaggctgttaaatactttgagatgctttctctcaattctctttcaatcactattcccctttctctcttctatcaagaccatgccctatgaagttaacaatggtccaacctctagagaattgcactaattcccatttgaagcaattattcactaagactctcagcagctcatagaaatatttctgaaacaatcatttaattaaccccagcagaaaaaagaatagagaagagcctgtagtcccagctactctggaggctgaggcaggagaatggcgtgaacccaggaggtggagcttgcagtgagccgagattgcgccactgcactccagtctgggtgacagagcgagggtccatctcaaaaaaaaaaaaaaatagagaagagaaagagaaacaaaccaaaaaaccaaactaggtacaagctactggtggcattgtaacatatgaaattctctcttccaccacaagcctaaaaattattcaaaatacctagtcccaatggtaaccaaaaaaagtactatcaatcttacttctcttaattactatgaagcaataaaatatttgacatcagatagttttatttatacatatacccaattggttgggcagcagatacataaaaagtctcgtatactttaagaaatgctacaagcgacagccagagttacaattttaatttattgggcactgtattcatattcattagtaatatctcacggatctgctttttggcctaaaaacttaagaaattacaattttctgtatcttcagttaccacctggctattttccttttttaagcttttcctgttctgcctttgttgtggcccctttccctttgtgatcttccccttcagatcagtgccttttatcgctactcatttgctgactcaggtgaatttacagcctaaggcaaaaatgggagccagcaaagtttgttttctcagtctctcccctctttccctcccttcttcctgcagctctgtgagggactaaatcttccagatattctgtgcttattaacaacacagcaccctcttgacttggaatccatagctgtaagaacttagtttctcctgtcagctaagaaaactctgggaaaatttttggtggacagtaaatgccaggtaatccaaacttcattaatttatgacgtaacaaataaatacaacttttagccaaactgtcccctttattcaattataaaaagtgtttgctaagtcaataaacagactggtaattaaaatatttatcggctgggcgcagtggctcacgcctgtaatcctagcactttgggaggccgaggcgggtggatcacctgagtttaggagttcgagaccagcctggccaacatgatgaaacaccctctgtactaaaaatgcaaaaattagctgggtgtggtggcgggcacttgtaatcccagctactcgggaggctgaagtaggagaattgcttgaacccaggagacggaagttgcagtgagccaagattgtgccactgcactccagcctgggtgacaagaacaagactccatctcaaaaaataataataaaataaaataaaataaagtatttatcctacttggccaggcgcggtggctcacgcctgtaatcctagcactttgggatgctgaggcaggtggattgcctgagctcaggagttcgaaaccagcctggggaacacggtaaagccccatctctaaaaaaaaaaaaaaaaaattacgcgggtgtggcagcaggcgcctgtagtcccagctactccagaggctaaggcaggagaatggcttgaacctgagaggcggaggttgcagtgagccaggatcacaccactacactccacactccagtctgggtgagagagtgagactccgtctccaaaagaataaataaataaataaataatttatcgtactttatatataatgtaaaattttacatataacatataatataaacattataatgtactcaacagatagcctctcacaagttggccaaaggttttttttttgcgggggcggggaaggagtcttgctctgtcacccaggctggagtgcagtggcaggatctcagctcactgcaacctcggcctcctgggttccagcaattctcctgcctcagcctcctgagtagctgggactacaggcgcccaccaccacactcggctaatttttcgtatttttagtagagacggggtttcactgtgttagccaggattgtctcgatctcctgacctcaggtgatctgcccgcctcggcctcccaaagtgctgggattacaggtgtgagcctccatgcttggcccatttttttcttagtttttgttttttctggaccccccgcaaaggtgatttgttgaagaactatcaacatttttcttatctttattagcaaatgtacaacatctgttgatgtttataaaccgagattacattttcatgcagtatttgggtattctggttttctttacaccaggcttatcatgtttcatagtttttaactaaatatgatttgctggatcattcataaaaagaaaacaaaattgtcaaatgcacctaaacacttaagaaacacaactgctgatccttttgtagttcataagtgtgatgattcagtgttcacatgaatctatgagatgcgccaacctcaaaccttgttatgacgtggtccattacccatctgatgtgaaaatttaaaatttttaaacaaagaagagagaaaaaaggaacattactgctaataaagtatgatactttcactgatcattttgtttttaactactctaccgtaaaatttcagtgcctacaggattatggaatcaatcacaatgagaagggtagaaactcattaaatcattagcaaataaggctggacaatcacaaagaaaatacgtcatattgtttggagagtgaatttgttttcagtaagaaactagtttgcctgattccacaccacccaattggaaatttgataatgttattctaaaattattgtttaaatagaagtgttgtaaattaaatgaaaagttttcattcaatctgtcatgaagacatttttgttataacaaatttgtctacaatggtggagtgtcaggagaagtgcaatccaagtcaaggagacttcagtcacattttccccaataaattggaaacaaaggcagtaagactgctctctaaaagttagactttaagatcacatacatagctaggagcagaaataagcaaagtcacctttaaaacacaaactggtttgatttaactgtaacttgatttttattgaaataatattgcaaagaggtttgggtagccatggaaacagagaaagtaacgtacagggggcactttagggtcagtggccatccaagtgctgctaaggagacaaggagcacaaatcagcagctcagcaggatgtcaccactatattggagatcaatgcgggcaactgcagccattggaaattgagaacttctattttcgggacaaaattctcctgttgagaagatagatgactcaagaaaagtctatacatataactccacttgttcagaatatgtgctcatcaagcaaccttctgataatgccttggtttcctgagtaggtttggctacacagaaaatgcactcagcggggccaggcacagtggctcacacctgtaatcccagcacgttgggaggctgaggcaggcgaatcacatgcggtcaggagtttgagaccagcctggccaacatggcgaaaccccatctcaaccaaaaatacaaaaattagctgggcgtggtggcgcctttgtgtaatcccaactactcgggaggctgaggcaggagaaccgctcgaacctgggaggtgaaggttgcagtaagctgagattacgccacctggacaacagagtgagactccatggggaaaaaaaaaaagaaagaaggaaggaaggaaggaagaaaaggcaggcaggcaaggaaggaaggaagggagggagggaggggaggggaagggagggagggagggaggggaggggagaaggagggagggaggggaggggaggggagggaaatgagaaaatgtactcaagaaaagatagcaccttgggtccatgctggcataccggaggctttctgtttctggcaaaaattaaaagaaaaaaagaaaaaaaaagtattggctttgcagttgttgagtgttcaggtgtataaattaaagctcttagaaattaataatttaatacatgtctttttttttttttttttttttttgagacagagtctcgctctctcgctctgttgcccaggctggagtgcagtggcaggatctgtgctcactgcaagctccgcctcctgggttcacgccattctcctgcttcagcctcctgagtagctgggactacaggcgcccgccaccacgcccggctaatttttttttgtattttttagtagagactgggtttcaccgtgttagccaggatggtctcgatctcctgaccttgtgatccgcccgcctcggcctcccaaagtgctgggattacaggcgtgagccaccgcgcccggccatacgtgtcagtcttatgaccttggttaatgtaatttcatctgattgctgaagttgttctccattgctcaagacagatgatttggctgggcgtggtggctcatgccggtaattccggcactttgggaggccaatgcgggaggcttgcttgagctcaggagttcgaaaccagcccagtcaacatagcaagacctcgtctctactggcaaaaaaaaaaaaaaaaaaaaaaaaaagccaggttttgtggcaagcacctgtagtcccacctacctgggaggctgagacaggtggattgcttgagcctgggaggttgaggcttcagtgacctgtgattatgccactacactccagcctgggcagcaaagtgagaccctgcctccaaaaaaacaaagaaagatgtttctgtgaccaggacactatagaccagatcctagaaggttgtagaaattcactaaagtaatgcttccttgtcctcttgtggatgatcagtaggctttcccctggcaatgaccctatatcaataaaaaaactttttcttttcttcttttctattttttcgagaaagagtctcgctgcagcctcaacctcctgtgctcaagtgatccttttgcctccagcctcccaagtagctaggactataagcatgtgccactatgcctagctagctttttttctttttaatttttttgcagaggtagggtctcactatgttgcccagattggtcttgaactcctggtctcaagcaatccttttgccttgacctaccaaagtattagtattacaggcatgagccaccaagcaagtccagacttttctacttcaaattaatattagtggggagggaggtgttcataatttacctctctttattatttcatttattctaacattgctacagtgacaattccatggacatacaccagctactggcggggaagatcgttcagaccagaagtggtaagaaatccttgaattttaaatatgtcataggtagttcacaaagaggacaaaagataccatttactaaacattcgccatctgttctgacataatattatcatcattgtagtctcccacttccagatacactcatctgcctatgttacacttgcctagtaaaagccagcatgggtgaatcttactattcaacggagctgaacactgtgatggagagatcatataaataaactgaatggcttatctcacatccataattagaaacttaaaaagtgctctcagcagcccatgctactctgttcctcacactagttttactttcactctctgtgataacttttcaatacaccaagacttctcagcttgccccaaattcactgagacatactggcgaactgctggttcaaccatttacacatccacccaccagacataagagtgctcatttcactgaggcttattatcaacttgtaaacgtggtcaattcaagacttcttagaaaggtctcaggtccaagctttgtcctgaaaagataattctgattgcagaaactccctccgtccagcaggaagcgccagcaccctctgtcggggttgggccgccacggaggcttcacgtgatccggccgtctctgcgcaggagtgtggtcttgcggagatttgacctacgtacttagcgtcatgacgtagtacgtaggggctggctagccgccatcttgcttctttttctcgctcgctcgctccccctcggaaagctgcgaaagtgctttggcggtttgtccatccgcagcttcggcttttccagtctggtggcccttccggccacccctttaaccccagctttccctcccccttctttcgatcagagatcggcggagaccctcgaagtgcgcaaacttgacactcaccctgaccggtaaggaaagcgagggtgtgggggccgcgatcaaagagggccccatcgggaacggccagagtgcggcctggggcgtgggagcgcacccagaccctggcgcccggaggctagggggccgcgtggagagggccttgggtccgggcatttcccttctgtttggttaccatcatctctgtgtctggggaagtcggcctccagcttggggagcgggaaaccggagtcagacccgccccatgtggtctgcagcgggagttctggaccggtctgtcttgctcccacctagaccccagtcctggccctgcgaggggattacgcatgttgccgggtaagcgaagggggtttccgtcttcctggactggcggacgtgaagtcttttttttttttttttttttttagtgtcgggtatgcgtttccccaaacaactgaaggactcagccggggctttcactgtctacctcttcctgtgtagtgagggtgggacttgcaatgagcaatgtatgggagggtctggtttaaagacctggttagatgagaggctcttcggggaatcaagaccaaccctacttccgctagggaagtgctgcccaactccggaggaggatttgggtagtcttttcacactctaggccgctccatcctctaacttgcgtggtgaatctcggtagctccctgtctttgagatagcgttgatattggtggtgtcagggtaaaggccccgttttaggactgaagaaaagggcatggggccactatagagacattgatagagtcttccttcctttgcatgagaggagtacctttaatttaaagggatgtatgtgtgttttgacattatttgggatcttttgagggtctgacatgcctgatgtttgctggcttataaagctacctggatttccgcattggctggttttcagcctgggttcatagattcatacctcgttagagtacttagaattgtacagtaggcggctctgctgtaagattttcatttggaatgcaccagaagaatcggaggattttttgattgttgagtacttaatagcttactcctgcaaataaaaataatagggagatactaagcacctaccaagcctaaccccaccatttttcaaaactagatttcacctcccatattggtaattaagatgctgctttgactggagccatttttaggtgtgtgtcacagatgcactgcagcatcttttctggctcaccccaaatgcattgatcccctaaaaaattaggaataaattgaacttgaattttgtctttagcatgtagtcaaatagtaattctctccttttctgtaagtggattttcagaatatagcctttttaagtgattgtgtttgctctgcttagcttatgtgtggctgttctccattaggtgaccttttgctatacactgagcacagtaataagtccttttcatacattttttttttaatctccacaacagacctttgagaaaagtgctattaagatcatccccattttacagatgaggaaatgaaatctgagagagtagtctgaccaaggtcacatagcagttattggtggtattgtgtaggttcaattccatactgtctgaacccaaaggggatgctctaaaccttcaacctgctttttaaattataaactacagtaactaaataagataaagcattattaactagtagtttttctttagcttgactagtatatgaatattgttgcatgctaaggttaaagttttgaaagttgtaaaaatggaatatatccactttggacttggggtagaggctaatttttttgcgtccttttctatttgagtgcttagagataacttaaaactaactctaccatgtcgtagatataatttttaaatttaggcgtctgatctatattattggtagaatactccctcatctgtaaaatggtgatgataataggacttccctcagaggcttttataggagtaaaaaaagataatggataatgtatgtaaagggcttattactatgcttagtgcatagtaaaaggtcaactaatagtggagggagaatggtaggatattggtagaagaaaatactctcttccaagcaataaataatctgtaaattctcagggtgatgtatatatttctttaggtacataagaaaatttcacctccccttatccctgatatgtctacttatatgcaggattttgcttcttagcgatttctttatgctctacagtaaatatccctgggatgagtatcttgttcatagctgaaaatgcagaagttctggctcattccataaaatgtctttgaagattatattatatccctgtctgcctccaagtgccacccctaaacactacttcagtttgttagttaggtaacttgtgttttggatgctatttatgtcatatttgtaaatgacaagaattgatcattggtaaaatgttacataagttagtacagaattgtattcttacagtgaaggacatacaaaaattgtgtctgagttatgacacactttcatttcggtaaatcgtgattttgtcaccttatgaataggacaacacaatgaaagcttatctcagtctatgttaattgttgcttacaagtctgagagttactgtgttagttttatgagtaataacattttaaattcctcgctaatctcatcgatgcatgagccagaacacctttgtggataaaagcgttctatagagagggtaactttagtaaattttctatttaagagacagacctaactctgttgccctggctggcctccaactcctgggctcaagagattctcctgcctcagcctcccaggtagctgggactagaagtgcctaccattgctcccagcattgccagttacatttctagtccttattttcctccagattatcagaaagcatgttttggggcctgtgactacatgtatttgctggcaaatccagtcaaacaaggactgttacttagtttcaaccggaaatttttatctgattggcagacatgattaactagactcttagactgttaactaagagtctgaacacaagattgtaatgaaattattatgtgaattatagtcagtgtgatatactcatccctgtgtggtgctgctatgtgctcaacattaagggaagatggaatatcatttgaggagcacgtctagtattaaaaaaactattgggtattatgtatgtagcatactacatagcaatatgtactacatactatctggtaatttttctgttttctgtgttctaatactagtttgttttcctctactagactgtttccatgtcctcatcaccttgtatggtggttggcgtatacctagagtttatatgttattgaatgaatgagggtgagaaacacaaaagaatagacccacaagattaactgataagtatattattggagcaaaagaaaatgctgtcaggttttttttcctttacctctaagaatagtatcacaggtaaccttcgaagagtttgtgttaaataatatgcattgtgagatttatttacatctgatttttaaaatttttagcttattcaacaaagattgaagattcttttaattttgtaaggcccagtgaatcagagcaatatggcatttggtccactcccaaggtgttcacagccttaaggattaatgttaaaagttatcttgtagtctttggattcatgccagaagataaaaaggtgtataagaaggtaagggaaatttggtacagaaaattacagatagtacagattgagttcctagttgattataagtgaagctgtgatgtctaagaaaaatcaagaataattgtgattattaatatttcttgagcacttactatgccatgttactaaactaagactattttttgaatgatctatttaaatccatattgcagaaagcctaaaaggaagagatttaagtaatttgctcaaagttacttagcttttaagtggtagaaatggcatttgaattattgatccagagcctgagtgcctaactcaactacatgggtttcctagtggccagtattttccaaacttaaatcattcacaatttctgcttcgtcccaaaccatctgcctgttacttaatatttttcttcaattcaacttgctgtcttttaattaaatgaatttaaacgaattttttttttctttttttagatggagtctcactccgttgcccaggctggagtgcagtggcgctatcttggctcactgcaacctctccctcccgggttcaagtgattctcctacctcagcttcctgagtagctgggattacaggtgcctgccatcacgcctggctaatttttgtatttttagtagagatggggtttcaccatgttgtcagactggtctcgaactcctgacctcgtgatccgcccaccttggcctcccaaagtgctgggattacaggcgtgagccactgcatcctgccgtttaaaaggaaatttttatgattatttggcattagcttccccccaacatgttttaaaataaacatgattttacataattttctgtggatcacttaaaatcatccagtatactaccagtctttgtattccaccctttgggacattactgctataagaaatgaatactggataggatcaggccacaggtacagttaatgaaggtcgaaagcctagaatggaatagattgataaaataggaaatggcagcattacaggaatagagatatgaattagtcttaactacatacttgagacaaccactttcatgataaaccgcaaaggagtaggtttatttagatagagaaatgtaataggatgtctaggacagtctatggcaagggaagaacaagacaaaataagaaggaagtcactatagaaatcagggcagaagaggataatctaaaaacaggattattagagctaaatgtagcagagttcagaaaaatatgtgacaagtagtctttggatttggctgtgatatccttggtgaccttaaaataatctaggtcaagttacaaaagtggaaggttaaagggggaagagggaaaatctcttgatttttagatatattgaatactcaaagtggactctagactaattgttttaaaacctaggtttagtcctttttgtcactttgtgccagctgttaattttggggcaagttaacctggcttaagttttaaatatattgatttgtgatacaaggataatatccatttcccctatctcagaggactattgcaaagagtacatttatgtatttctatatatcttctgaatttaatattctttgatattacacaatatcaagacatgagtcttgaccatatttaaagcagaaaagagaaccacgaaaagggaaaattaaagataaaggggaagatacgttccctataaggttggaagatcccttctgaataaatcttgagtctgaaggataagagatggatacatgtatgtggttggagaatgggtatctagataagttaataattcattttttcttccctgtttgccagtgaacaatctgaaggtacagggctgctatatatggttatgcagcttgtatactgcccaaagatgctggactgaaggaagcaacaagtcagcctgtgttctgcttacagagtcctgtgccccagcttaggcctcgcagagggaactgtgcctccacttctctctccaaggcatcagctccttgccaaaagtgtctgtatttccccagaaggatgtatttttcctagttacataaaggccctatggagagcaatggatgctctgaaagactccttaaggagacatattaaggatacatttagaacaacatcaaaaacaattgggaaattggagaaatggtcactaaggaacaaaaagctttgaactttttgctgagatgggttaggtggttgggcaagtacagaattctcatttatccagtgtactttaaagatctgtattgtagcttattaaatatttttattaatcaagaaactatattaaatatcatagtttatcatatttcaaagaagagtgataagagtaaaacaatacttaacacaatttaatcttacccaaaaactttgtaattttggggtttaaattaaaatttagatttttggtcatgtggctggtagttttatatataagtaactttttaatgttaggttttataattaaagctatataaattttatagctcttaattgaagaagcacaatagggaaggtacacagttacttctgaaggttaggaaaatggaacagtggcattttattttgaaaacagaggacattgaaaacaaaggaggctttagacaggtgaattttaagtttatatttggaaatttgatttgtggtgtacagttctttaagttttagtacgtatggatttttgtagcccccacaactaggatacagaatgtagaaagataaaacatctcccaactgtagaactagagtcttctggcattttggagacagggaaattctcttgaagaaataactattaaagagggatggaaaaagccaagaatggcctacccatgctgaatgatttgttttctgattagaaagaaaaaatattttgattatactgttatatttatgacaaacttgaacatagaaagaatgaaagtaggagaaagaaaaagaaggagttgggtgttgtggcatgtgcctgtggtcttagctacttggaaggctgaggtggaaggatctcttgagcccaggagttgtggagggtagcgcactgtgttctacatatggactgagtgtctgcactaaattcagcatcaatagggtgtcctgggagtgggggactaacaggttgcctgaggaggggtgaactggtccaggttggcaacagagcaggttaaaactcccatgctgatcaatagtgggatagccattgcactccggcctggacaacattaaggtgaccctgtttcttattaaaagcaagagggtaggggaatttttttaattttatttatttatttatttatttatttatttatttatttagagacagagtctctctctgtcgcccaggctggaggcagtggtgcgatcttggctcactgcaacctctgcctcccaggttcaagcaattcttctgcctcagcagcccgagtagctgggattacaggtgtgtaccagcacacctggctaatctttgtatttttagtagagatggggtttcaccgtgttggccaggctggtcctgaactgacctcaaatgatccacctgcctcgccctcccaaagtgctgggattacaaggcgtgagccactgcgcctggccggggaatttaaataaaataaaataaaataataaaagaagagaaggaaggaaataggtttacatgtcttaagactggatatttcagtggtagaagaagagggccaatgatacggagggatgttaaccaattctctacacttaataaatttaaaattaatattctgacttttaaaggcaaccctttggtcctccaaaagattaaccataattcataatgctagatgagcatcttggagcaagtacttctctttcactctcataacattcaacatactttggccttgcaaaaaacaaagttcaattaactggatggggtggcatgtacttgtagtcctagctcctcagaagggtgaggtaggaggatcacttgagctcaagttcagggttgcaaagtgatggcactgctgcactccagcatgggtgacagagtaaaactgttgaaaaggaaaataataaataaaggttgactaagaaattatctatgctttgggcctgaagcgatggctcaccctgtaatcccagcactttgggaggccaaggtgggtggattacttgaggtcaggaatttgacaccagcctggccaacatggtgaaaccccatctctactaaaaatacaaaaattagtcagttgtggtggcaggcgcctgtaaccccagctactcaggaggctgaggctggagaattgcttgagcctgggaggcggagatcctaccactgcactctagcctgggcaacagagcaagactctgtctcaaaaaaaaagagaagaaattatctatgcttgggtttttctttttaatatattagttttgcaaatattgattaccacttaataagtttttgttacaggctttacactattctaagagctttatacacactttgttaattaaatcttataatagtattggagtagatattatagcccacccaggtgaggaagtaaaaaatttgagattaagtaatttgcctgtggtcacctagctactaaatattagagctagaatttaaacaaaaacagttttaagagaaacagttgtgtaattttaacaattttaaaatacataagttgttaaaaagaatgccctggcaatcacctcattaagtaatcggtagacagaacagctgtactttttaaggacagcagtttttagtacagaaaatttgatagctacatttctgttctgattgttaaggctttatcctactccggaaacttaattcacatgtttcagtttccaggaacagcctgagcccttccactatcctgattagaactccagcagatttatttatattacactttgttttttaaaaaatgaccattttggatgtttttgccgaactgctatttgtagtaaaagaattcaacatatggtggtattcttagctttactattatagtggcaaatgtactcttaaaatatttgaccttagaattactagttcattttaactactagaaatggaagagaccttgtaagtggccaattcaacttcttactcaaagcaagaattatctttataatatttctgacaggcttaccttgcttttgcttggatccatctgatgattagtaggttactacagtcaccccttaacattcacaaagcatatgtcctaagatcttacaaatttccgtatttagcattcaaacctcttcactttcgccttccgtgatctacactaggatttggcctcctcttcactgctcttccccaccctgcccccctccctcaagaaagaaacagatttctctttgtaagagttattgtatcccctaaaagaaaacaaagctctgggcctggggtctcagcattaggagtggtgagggatatccaagcttattttctagatgcatacctcatggcatgttagttacattttgtgctttagcaaaattacacgtcatttcacagctctttgggttatttggcaaattgttaaagtaatgctataagttttagtttaatgtaacttactcacttatggataaactgaacagtttttcctttgcattcagtcgtttgttaatgtttgtcttcatgaagcctggagttgagcataatactctaaacatactgtgacaaacataaaattcagtggaactgttatgactccaaatctgtgcattagatttctattaaaattttataaagcagtattgtcacactactagctgtcacagctagaacctttttcacatgacagtctgggtctgtattctgcatttatgaaatccagtttctgaactgttaatatgactgtataactaattgtttaattctgcctagcattctaagacctttaaaaatcttggtcatggaatacattggtactccttcagatgtatatattatttcatatgccatgtttactttccaagtctttattcaagttattgacatggaaaaggacagggtccaacatatccaggccaaattatttcatattgaccacattcttttaaatataaaatgattttctacttcaaacattgtgtgattctcatttgtattaagtttatttaaggagaagtatgtaaatgactagtactttcagtagtcttaaaaaatcaagtggattgagggaaggaagtgactaaatttttttaaggtttatattttgtggatgctgattcacttggaactaggagtgtggtgaatatttgggcttttttattttaaatgggcaatttagttaaaatttgagtgataaaattctggtttttgaagttaatgcatcagtctcccctcatcatagttcaggctgccataacaaaatagtatagactggatggcttaaaaaacagaaatttatttctgacagttttggaggctggaagtctgagatcagggtgccagcatagtagttctggtgagggctcttcctagcttgcacacagccaccttctgactgtattctctaatggagaagagagcaagctctggtatctctttttataaggacactaatcccctcatggcccgtacaacctcatctaaatctaattacctcaccaaggccccatctccaaatatcagcccaggggatttagggattcaacatatgaatgtcaggggggcacccatcagtccatcagcacccctgccccctttacgatttttagagctttgatttttgtgccttttttttttttttttttttttttgcagggtctccccctgttgccctggctggagtacagtggtgctatcttggctcactacagcctctgcctcccgggtgcaagcgattctcttgcctcagcctccctagtagctgagactacaggtgcacgccaccacacccagctaatttttgtatttttagtagagatggtattttgccatgttggccaggctggtctggaagtcctgacctcaagtgatccacctgccttggcctcccagagtgctaggattacagatgtgagccactgcgcctggcctgattcttgttttttacaagttacaaaaataatacaaagaattaccatattccttcattcagattccccacttgttaatattttaccatatttactttattattttctgtatagtatgcacataggcacacacatgcactctgtgcttggtttttaatggctgctgtctaaaccctgtcatcaccagaaactttaaatttatttcacaagctcttattccttacttgtattacaaaatgacatttctagcagcaaatcgatacatttggggcgtgtgtgtgtgtgtgtgtgtgtgtgtgtgtgtgtgtgttttgttttgacaaggtctcactctgttacccaggctagagtgcagtggtgcaatcattggctcactgtagcctcaacctcccaggctcaagcgatcctcctgcttcaatctcctggttgggaccacacgcatgtgccaccacacctggctatttttttggtagagacaaggtctctccatgttgctcaggctggtctcaaactccattgctcaagctatcctcccacctctgcctcccagagtgctgggattacaagcatgagccaccatgccccaccagtacatttgttaatagagatgttgctatgttttgttgctattgtgttttatctttgatatcttattctatattgtaatgcagtatgtttgataatgaaaacatgaatcatttagggtctcttaagtgacatttattgttttatatttcagtttgttaatttctcaaaatgaaagttcaatcctgattttttaaataatgagattatgttgggcactggctttgaagtcagcctggatttaatcttgactctaccactttccagctctgtgtgttttgagcaaattactttacttctctaagattgcttcttcattggtaattttcagtgatttaggctttaagcccttcttagtcctaatctggtttttatttttatttttatttatttattttgagacagggtcttactctgtctattgccgaggctgtaatacagtggcacagtcatggctcactgtagcctcaacctcctaggctcaagcgatccttctgtctcagtctcctgagcatctgggagacaggcatgtgccaccaggcctggctaaattttattttttgtagagatgaggtctcaccatgttacccagattggtcttgaactcctgggctcaagtggtcctcccaccttcgcctttcaaagtgctggtattacaggtgtaagccactgcgcgtggccctaatcgggtatttttacgttatactatatctttggagctcagattttggtggggcagtggggggatacaaggtctccttttgtcccccaggctggagtgcagtggcacaatcatggctcactgtagcctcaacctcctaggctccagtgagcctcccatcttggcctgccaagtagctgggactacaggcatgagccaccatacccagctaatttttttttttttttttttttttaagaaaagacaaagtcttgctgtgttgcccaggctggtcttgaactcctgagctcaagccatccttccgcctcggcttccgaaattcctggaattacaggcatgagccactatgccctgccaataattactattttattgctagagcttttagtcaaccttaactgaaatcaccagtcctttctgctctcctcctcattctcttctgacttcctctcttagtccattcatgctgctgtaacaaaatgcctgagactgggtaacttataaataacagaaattaatttctgttggtactgaaggctggaaagtccaagatcaagttatcgacaggcaggatctccgcctccaagatggcaccttgttcatgtcctcagatgacagaagtgcatagctagttccctccagccctttcataaggcacacatcacatctgtgagggcagagcccacatggcccaatcacctcctaaagaccccacctcttaaaagtgttgcattgggggttaagtttcagcatgaaatttggaagaaacataggcattcaaaccattttctttcactgtctggattagacttcagtaaaacattactccagaaattctggcagtatcttcatccaccttgcttttctttactagtttactgattactggtgcaactctaatctctgattcagtccatctgcttttgtgcttcctaccactcccaactccctggatgtcctactggacattgaagagaatcgtaactgcacaaacttggaaattctgtatacccttgctctccagcttctactgggctttcttttttttgtttttggaggggagactgggtcttgctttgttgcccagcagttgcgatcatcgctcactgcagcctggaactcctgggttcaaatggcccttccacctcagcctcctgagtagctgggacggggactataaacatactctaccatacctggccaattgttcattttgtttagagaccaagatctctcactaagttgcacaggctgatctggagctcctgggctcaagcattcctccctccttggcttcccaaagtgctgggattataggcttgagccatgacactcagccctactaagctttcagtgcttcttcccaatgtcttggctgtctttcacattctcccatttgcttttcaaaccttttccagcctcctcaaatttctaaattctgcctccactcagtggatgaggaaagcacgtctcttgttcatctgttcctagcagtgcctggtatatggtagacactgggtaaatatttgtacgagtgaataggggaactaatcattttgagtttgaagttccaacaggaaatgtaagtgatgttttgtagatcattaaaactgtgtatctaaagattgtagcttgaaggaaagttttggaattgtccttactgataatatttgaagcagtgaacagcagatgagatggccaaaggagaaagcacttattaatagaaaagggagagatgggccgggcacggtggctcacgcctgtaatctcagcactttgggattactactcaggaggccgaggcaggtggatcacttgaggtcgggagttcgagaccagcctggccaacatggtgaaaccctgtctctactaaaaatacaaaaattagccgggcatggtggcagacacctgtaatcccagctactctggaggctgaggcaggagaatcgcttgaacctgggaggcagaaatttcagtgagccaagatcgtgccactgcactccagcctgggcgacaaagtgggactcaaaaaaagacgaaacagaaaagggagcaatggcaagaagagacagaaaaaaagtaacgaggctgaaagctgtcatagtcatggaaaccaaagaaaatggtttacacagatgctatttaacttttatatttatatgtgatacttgactattatcaattagttaatacacattatttcctgatttacaaatgttctgtaaaacacttgtagagtatacttctctggaaattgttgtcgttcatttttaatgttaactatttaaatctgggggacactgtattttccaggggaactgaactctcatcatgagaataatgaggaaagaacggtaaacagagcttggatatttagaaacccattgtggccagaaagaaagttatgtcattcagttgaatttagcaaattgcaatttgccgaagtatgggggttatttttccaaatatactaaattttcagtattgcttaaaataaggttttcagtattaaaactagaatcttatagttttgagtaccaaaggaatttgagagaccatagctaatctctttaacaaatgtggaaaccacttagacttttttcttccagattttctcttctttttaattgtaatttttttcatttttagagacaatcttgctgtgtcacccaggcttgagtggactggtgcaatcatagctcactgcagccctgaacttctgctgaggctgtcctcctgcctcagcctcttaagtagcttgaactaccggtacacgccaccatgcctggctactttttagttgttttgttagagacagtctcactatgttgcccaggttgtctccagagagtttcaatctaggatagctatcctttcatgaaaaacgtccttttgttatcactgttcagtgtcattctttgattttaaaaggttaatgtatatattaaactgctgccttccaaatttcttttagaccttttggaaacaatctgctttaaaatccctggcttcctttttttcctcctaaacttcttctttcatttctttttttcctccccccaaaaacaaaactgttacaaggtaatatttgctgtacaaaatatggaaaatgcagatgcacatgtcttgttttgttttgttttttgagacagggtcttactctcttggcctagggtagagtgcagtggcgccatcatggctcactgcagcctcgacttcctgtgctccagcagtcctcccacctcagcctcctgagtagctgggactgcaggcgtgtgccaccatacccagctaatttatttatttttgtagagacagggtctcactaccggttcagtctggtcttgaactcctgggctcaagtgatcctcctgacttggcctcccaaggtgctggggttactactcatgagctactgtgtgaacagggttcactacagctttgacctcctggactcaaagcagtcctccgtgcctcagcctcctgagtagctgggactgcaggtgcccgccacaatgccctgttaatttttgtattttttgtagaaacagagttttgtcatgttgcccaggctggtctcaaactcctgagctcaagtgatctgcatgctttggcctcccaaagtgctggcattacagatgtgagccaccactcccagctgaggtgtacctgttttgatacatctaattacaatgaaaaatgctagtttcttaccagcattgctcagtcagtcatagaaccttgaacttaaaataatgattttctcttccttaaacagagaaagaaaggtgtgttattcagaaggttttgtttttacaggctgatcctctgcccttaatgattgagatttttagatacatggctagtaggacagtaatataaaaagtactaacattgtaaaagtaataaaaaagcttttcaaaattaaaattgatataggtagagggtatacttattttgatatcctctataactgtgtggatgggttttgaaatcagagctggcaagctgaaggcaaatgctactgagcatgctgtttcaagggttttgggattactaattatgtaaattgtaccattttgttacttaaatgtggttatgctgagtgcatctgtgcctactcagcaattgagatttttttactagctttttcctccagtggcttttcttgccattaaaaccttttttgtttttttattgcaaatgagagatgggggtcttgctggtattgcccaggctgggcttggactcaaataatcatcccacccctgccttctcagtagctgggactccaggtatacaccaccacacccagctttttttgtggcatttagaataaactcaaggataacacttctaatccaaggctctgcaaaatgtgacttttgcctactctgatttcatctcctgcctgtctccctgagacatgacttttacacttgaacgttcttagattgaaattggtttgcttttcagtggttctcaactgtgggtacagtttagagacacttggggaacttttcaaaaaatactattgccaggcctggcccaagaaattctgatttaattgcctggcatggggccttgacatacaatttttttttaaaactttggataactgtgcagcctaagttgaaaaccactgattggttttccttaactcctgtccccttttcagagaggtcttctggacctttgctatcctatccaaagtcccctttacctctttgctgcccctttttacccagttgagtttttcattcctacatttttatttacttgtttattgttttgttaaaagttccatgaaggcaggggcatcatctgtattttcataacatatcctaatatctgaaacaccaaaaaaggcttgtttctgtgtaacctgtagagaattgttttgctaaattatattttagagaacataccaactactctagtaggccttaaaaggacgttgattgttgttattgagatggagttttgctccgtacacaggctggagtgcaaaggctcgatcttggctcactgcaacctccacttcctgggttcaagcgattcttctgcctcagcctcctgactacctgggattacaggcatgcaccacacacccggctagtttttatacttttagtagagatgaggtttcaccatgttggcagaactggtctcaaactcctgacctcaaatgattcgcctgccttggcctcccaaagtgctgggattacagcatgagccaccgcgccaagccgactttggttttgttatctaaggttttaatgtccaatggcaaaggcatataagagagaagtaaatactttatcccttggaaacagtgttacaggtgtgggttaggttcccatgcaggtgcacaaaaactagaggcattaccataaacacctttggtggtagaaggaggcttattgataatgatagagtgctcagtgaatgttcatataaatgtgtttgtaggccgggtgtggtggctcacacctgtaatctcagcactttaggaggatgaggcaggtggatcatctgaggtcaggagttcgagactagcctagccaacatgacaaaaccccatctttactaaaagtacaaaaattagctgggcgtggtggcacgtgcctgtagtcccagctacttgggaggctgaggcaggagaatcacttgaacccgggaggcggaggttgctgtgagccaggatcgcgccactgcactccagcttgagcaacagagtgagactccatctcaaaaaaaaaaaaagaaactgccaaattgtttttcaaagtgatggtgctattttcatttccggttctttaatattcttgccaaaacctgatataatcattctataattttagcaattgtattggatgtgtggaggtattttatttcggtttaaatttgcatttcccaaatacaaatgatgctgagtgtattagtttgttctcacatggctaaagacatacccaagactgggcaatttataaagtaaagaggtttaattgactcacagttccacatggctggggaggcctcacaatcatggcagaaggcaaagaggagcaaagctgcgtcttacatggcagcagacaaagagagagaacttgtacagggaaacttccctttataaaaccatcagatctctttagaattattcactatcacaagaacagcacaggaaaaacccgtccccatgattcagttaccttccaccgagtccctcccatgacatgtgggaattgagggaggtacaattcaagatgaaatttggttggggacagagccaaaccatatcactgagtatcttcatatgcttacttaccatttgtatatgtctggtgaagtgtctcttcaaatctcctgccgatttttaaaaactgggttggttgttatgagagttttgtatgtattcttgataaaagttctttctcagatctatgatttgacaattttttttccagactctagtttgtcctttagttctcaacattatctttcaaaaagcaaaagtccagtttataaatttcattttttatagattgtgcttttggtgttatatctaagaagtccttatctaaacccagtgtcacaaagattttctatgttttctctggaagttttacagtttcaggttttacattttgtctatggttcatttttgagttgagtttcatatatggtgtaaggtatgaatcagtgttaagtttttaatattatgtacacataattgctccagtatcatttttgggaagactgtcctttatccactgaatttctttgcatttgtcaaaaatcaaatgcttatgtgtatttatatttctagactctattctgctccactgaactatttgtcttatttttacaccagtaccacactgtcttcattgctgtgccttaagtcttgaaagcaagtagtattcaccttccaatttcattcttttcaaagctggcggggtggagggtagggggtgggtggtgctgttctagagccagtccatttctttataaattttagaatcagcttgacaacttttgtcctccaataaatttcttctgaggttttgttggggattgctttgaatctgtagataaacttgaaaataattgacatcttaatattgggtcttgtgatccatgaacatggcataagttcttatgccatgtttgtgtagctttttaaataacgttttgtagtgttcaatgtgtaggtcttacgtatcttttgtcagatgtatccctaagtatttcaattttttttttttttttttgaggcagagtttcactcttgttgcccaggctggagtgcaatggcacgatctctgctcatggcaaactccgcctcctgggttcaagtgattctcctgcctcagcctcccgagtagctgggattacaggcatgtgccaccacacccggctaatttttgtatttttagtagagacagagtttctccatgttggtcaggctagtttcgaactcccaaccttaggtgatccacctgcctcggcctcccaaagtgctgggattacaggcatgagccaccgtgtccggctgtatttcattttttattgctattacaaatggcactatatgtaatttctgtttctgattgtttagtgctgtatagaaatacaattgaattttgtgtattgatcttatatgctcttgtaaactcccatctagtaggttttttaagatatcagattttctacatatgtgatcatataatgctaactattacagacaattttactttatcccttccaatttgaatttttttttgttgtttctttcttattttgctgggtggaacttttagtatagtgttgaacagaaagaagtgttaagagagagtggatatccttacctcatttctcttcattgaagggaacagaagggcaagcatacaaacttttgactgttcccttctattcctatttattgaggtttttgttttgtttctgtttttcaaatcaggaatgggttgatttttgtcagatagtttttctgcatccacatcatgcactgcataacgatgtttcagtcaacagtgggccgcatatatgacagtggcctcataagattataataccatatttttactgtacgctttctatgtttagacatgtttcgatatacaaatatttcagcttttgttaccgttgtgtacagtattcagtacagtaacatgctgtgcaggtttgaagcctaggagcaatagactataccatatagccttggtgttcagtaggctatgccatctacatttgtaagtacacactatgatgacacagtggtgaaaagtagagccagggtttcaccattttggctagactggtctcgaactcctgactttaagtgatctgtccaccttagcctcccaaagtgctgggaatacaggcatgagccaccgtgcccagccaattttgcctttatttttggaagatgttttgctgcatgtagaattctgtttttattttttctttcagtactttaagcatgtagctctactgcttgcagcatttcccatgaggattctgctgttattctgtttctctgtatgtaaagcaacattttctcttgttacttttaagattttctctttatcattggttttaaatactttgattatgatgggctttggtgtgggttcttcacgtttcttagacttgggctttgttgagtcttttggatctgggtttgcagttttcatcaaatttgtaccattttggccattgttttttcactttctcaagcccctctatgtgtaacaccaattacacatagattaggctgtttgaagttgtcttaaggttcacttaaggtctttttttttttttttaagctttttccactttatctttcccattggatagcttctattgatggcttcagattcactattttttttctttgtgtgtgtgtgtgtgtgtgtgtgtgtgtgtgttttaattggaaaggggagttttctttttcataaagggttgcagcctgcagtattgtttcctttggcagtgtgtctaaaatgctagtaataccaattggtgtatttttttctctatgttttgatgttttcatgtcttttgtgtctctatttgtattcaatctttagcttgttgaacatatagaatacagttataaagtagctttttcttagacaaggtgacataagaaaaataacttctaacatttttgtccactaattctaacatcaatagtcaagactaggttggtttcacttgcttgattcccctccccaccccccttgattctgggattcagttaagttactgggaaactgtttgatcttttcaagtgtagctttaaggtctgttagacaagccagatgtggtgacacatgcctgtaatcccacctactgggaagaaccgaggtgggaggatcacttgagaccagcttgggcaacatagtgagactccatctcatttatttaacataaaaagaagaaaagatttgttagacaagatcagagcagtatttacattagggtaattttcacccactgctggaggcaaggctttgctcagtactctacctgggttgggtgcagtggctcacgtctgtaatcgcagcactttgggaggccgaggacggtggatcacctgagatcaggagttcaagaccaccctgaccaacatggtgaaaccccttctttactaaaaatacaaaaattagccgggcatggtggcagacgcccgtagtcccaactacttgggaggcagaagcaggaggatcacttgaacccaagaggcagaggtttcagtgagctgagattgcattactgtacttaagtagcctgggcaacagagttagactctgtctcaaaaaaaaaatctctacctaatgcctggtgaagcatgtcatgtcatctttttagtcttggttgtgaaacaggtactattcccagccctttatgaacttcaggcactgttcccctctgatcctctcaggtctttctttgctggcttgttaacaatattaattcttccaatctgtgaatgtgggctatctttctatttatttcgatttcttgtatcaatattttatagttttcagtgtatgggtattttgctcccttggttagattactcctaagaactttattctttttgatgctctagtaaatgggattgttttcttgatttccttttcatctaggttgttatttgtgaaaagaaatgcaactgattttttgtatgttgattttgtatcctgttgctttactgagttcatttattagtttcaacagtttttgtgaaattttagagttttctacttaaaagatcatgtcatctgcaaacagggatagttttacttcccttctgatttgtgataccttttattcctttttttggtctgattgttgttgctagtccttccagcactgtgttgaatagaaatggtaaaagtggacattctagctgtgtactagatttcaggaaaaagccttcaggtttttcccattgattttgatgttagctgtgggatttttgtaaatgacctttattatgttgaggaattttcctctgtacctgttttgttgagagtttttatcatgaaaggatgttaaactttgtcacgtggttttctgcatttattgagatgatcatttggtttttacttttcattctgttaaactgtggtatatcacattgatttgcatatattaaaccaatcttgcattctagggataaatcaaacttggtttaatgtgttattgagaaggattggtattgtcttgattttaagtagggaagttaaggttcattttatgattcttttaagcttgagtgttctgcgatggctagagttaaatcggatgttctataaccctgtggttaaattgtgtattactactttgtgttccttcataagaatatggagaagctgaacttgacattttattttgatttttgtttagttgtaacgttggacattttaatacgcttgcttactaacatttctctagtgaattgtctgttcaaagctttactctttgggctgctttgatttgttgagttcttataacatatttacattttgtcaagtgttgattattttcttcactgaccatcaatttaattttttttttctttttctttttccttttttttgagacagagtcttgctctgtcgcccaggctggagtgcagtggcatgatctctgctcaccgcaagctccgccttccaggttgaagccattctcctgcctcagcctcccgagtagctgggactacaggcacctgccaccatgcctggctaattttttgtatttttagtagagacgggtttcaccgtgttagccaggatggtctcgatctcctgacctcacgatccacctgcctcagccccccaaagtgctgggattacaggccaaagccaccgtgcccggcccaatttgattttttaaccattatttttctcttatgctggacagaatgtttagtaggcttgcttcttaaagttttgccatgaaatagatgcctctgttctagttaaaagtgaaacttcattcaaaacaaagaaatgtaaacaggcagtgtggggatatattcctcaggagtactgagctgaaggtaatcagttagtagttgaagccaaaggagctaatgagatttcctagacaagagtttagataagaagggaagtggggataggatgaagagcactagaggaaagattgaccttaaatggaatgagaagaaagataaactttctgtattgcagtgattctcaaactactttcagttagaatcacctgaagaatttttttttttaaaaaagagttgatgcccagtttcccccctgcccccagatttgtatacagcaagagttgagaatcactgcttagaatatatctgcttataataagtcggtaggtcttaacatttttgtaagtcttagtcaatctggaagacttgctatagagtgctgggccccttcctcagagtttgattcagtaggtctgggttgggacctgagaattttcatttttatcctatttctagagaaacatggtttctctagaatcacatgtctcagaaacattgtttctttttttttttttttttttttttttgagacggagtcttggtctgtcacccaggctgtagtacagtggcatgatctcggctcactgcaacctccaccttccgggttcaagtgattctcctgcctcagcctcccgagtagctgggattacaggtgcctgccaccatgcctggctaatttttgtatttttagtagagacggggtttcaccatgttggccaggctggtcttgaactcctgacctcaggtgatcgcctgcctcagtctcccaaagtgctgggattacaggtgtgagccatcgtgcccggccagaaacatggttctgcgaaccgcagtagcagtaggtgtaggaaggaaagtttggatgttagatacaggttggtttggagatttgctcctaggaagtttaaggagttcttttctcatgatgttgctttctctctaatatacagaaagggtcttcaccaagagtgctgcttgagtaataatggtgttcagaaaagtccaagatttcaggattcttagttaaataacttaagcaagttgactgtttttcttgatacatcagttcctttttttttcacctgatgaaaaagctctttgaattttaattttgtcaggtagtgaatatttactgtcctcttttgtcactgtagatgaatattctttctatatctttgtacatgttactggtaaatttgccaataggatagattttggtagtacattctcttttcacaacatcatcatcattagcggtcttggggtaaaattaattgtatacattcttctacatatagtagcaaattgtattagtgtagtcctattggttgtaggtcagtcttttttcaggttgtcggttgtctcaaggaaagatggtttattgtaaacgtatacgtgaaaagcgaaatggttatctacactgttatgtgggaggaggcagcatagtgtaatggattgaacccgacaccctagtttcaaattcaatctgatttagtctttatgtgtaaaaatcaagacagtaactacattgtaaagttgtttgactgaaatgagataatagaggtgagaatgcctgataaattttatggaactatacaaacgttgggtggcattttacatgcatataaaatgacatctctgctgattctgtaattgacaaatataaaactaacggatgaaacgaaatttataaaagtaaagtggatataggctttactttgatgctttttgcttggtatacctattctatactatctttggctcctgtgtttcagttctcaatgttttcagctattgatcgtttctatggtagaattagccatcttctaccctactgctacaataacccctcaaaaacaaaaacaaaaacaaaaacaaccgttaggttgatatgtatctacaacttaattaaattgaagggaaatagcatgagacataatttttcttttttgcctatctattaatagactaagttagggtgcatcaccaagatgagggtacattagctctaaagatgaggattctctttgtatttgaatgcttatgaaaatgttatttatttctaacaacttctcatatgtaagggaactttatatatgctttgaaaaaaatggatactattttttgaatatttagtcctcagtgatgaaataggttatttttatataccttgtgtttgtgagatgttttaccttttacgaaatgaagagaacatagaacgttgtttctgttctaaactgttaaagttaatagagctttgttgggcacatactgcctgatgatgatacagggatgtaatatgtaggggaatgaagatgttgtcctgtcatttggattccatgtgcataggttgatgtgtcagtcatttcaagcatattaaattggataatatatctttttaaaatagacagtctcagtgggttcactgtgttttaactattcacgacagcatggaattataacccttattctctatgatagagttaagcagttataaccatatataactgatatgtttcacaagtgcatgatagcttattgtgatcaattttgttgtgtattggttattggaatttgacagttaaaaagttctatgaaattatcattgatatgggaagttttttcagaatttctgtgaacatttgaatttactgagtttttcatccttatttttctttcttatgtacatcttaaggactggggttttaaggggtgtggcaggaggttttggactcgatgagtttccaccgaaatgtcggagaagtcaggccagagcacaaaagcaaaggatgggaaaaagtatgcaacactcagtttatttaatacttacaaggggaaatcattagaaacacagaaaaccacaggtgagtaaaatcaagtgacacttatgtttttcatggtttgttttgttactataagtgatacacctgctgctatgagaagctaggatgtacccaagttaatacaatgctatttacatttgcgtttttatgcatgcacacatttttcagaggatatgtgataaacatcttataattgaaaatttatactttcatagagccctttaaaaatatttttgtttttctctgttgtcagcagaaaaaaggtagaactgtgtggctctaaaggggaaactcagtcaatgagattgataggcacagacctatatattagtgggaatttagtatctttttaattatagactagagaaagtcttatgtttcgtgtgtgggggtgtgtgtgtgtgtgtgttagatactgtgacctagtgaatatagtgaaaactgaaaatcatgcatggcatattaacagtattctttatgaacatacagtcaatacatttattctctaacattctaagttttgagtttgaaatagattctctgaaaaaatatcagtattatcaatgttttctgtagtgtgttgaattgcattgttaaattttttaaggaatctgttaaatgctgttaaatggcttgatttctacactgaaatgtgttgcaggtgtgtagcttagttttaaaattattattttaaaatacatgaatgaaaatcattcagggattgcattaattcctattgtttttctatattgtttgaggaataaaatgggtaataaaatagatgttctaagaaagttgatgttattgatctttagttgcagctcgacatggattacagagtcttggaaaagtcggtatttcacggcgtatgcctccacctgctaacctcccaagtcttaaagcagaaaacaaaggcaatgatcctaatgtaaacattgtacctaaagatggcacagggtgggcatcaaaacaagagcaacatgaagaagaaaagtgagtcaaagtctgttaaagaatgaagcccttcccctttctttgtagggaacttatgtttgagtacctgctatttgctaagtgttatgctgtctgtattacatattacatattttatactctttaaagtcttttgactatagtaacttttggttaattttccctattaaaagtatttcaatttgtcagggtagaacagatgacagaattgggaatcacaaccttgcttatgtcatagcctttattaggctccccgctttcatactaccaccaactcaggtattccctttccaatatgattaagagttgactccgatacctaaattccatgatactaaggatgtctgtctgccaatttactgtgtatctccagcattgaaactgcctgatgtttcataggtgctcaagtaataatttgtatatactgtagcaagaaagttaggatagaattaatagtgtccatcttagtcatccttctttcaacaactatttagacttctgtatgtcaaggattttgccagactcttagctaattgaatgaccaagcctaaatagtggtaatttaaaaaaaataagacaagccattggatacttgatgttttcttgcctatctcttatcaaaattctatactcctgcctggggagatttatatagtaaatttgactacttctgtagtaatgtatcaaatacgtaaatgcttgttagctgtagtaaaattattttatagtaatgagtcagttataggtatgagtgtcccagaaacacattgcattttgtgagcctcttaactactttcttatttttaagcattacctcattacaagaattgaataaaactgtacaccctttcaaaacaccttttactcatgtgaatgcattaggcaggttgctgttacctctttgaataacagtagtaagtacagtggtgatcctgttgactgccaagtggggagtttgcttagctttagccctcaactaatttcaccagtccagactgtatgtatgtttatactgctatttttaattataagtgttcacttcttcaaaacagatatttggtaactgtgtttaattaaaagtgtgtgtgtatgtgtgtgtgtgtgtgtgtgtgtgtgtgttttaaacaaaatggaaaacaagcaaaactcatctcattgggttattcaaaggtagagatgaaagacgataaaaatagccataattcatttaaaggaatgttgcagagagaaaacatttattggagatttaccaatgaataaacatatagccaaaataatttgtacacaggtttaccttaaatataatattgattttatttaaacatacagtatctgaaataatggattcatatttttttttaagaacaccagaagtgccaccagcacagccaaaacctggggttgcagctcccccagaagtagcacctgctcccaaatcatgggccagtaacaagcaaggtgggcaaggagatggtaagtggacattagttggggaagctgcctaggcttgatagttactgaacagccatgcaggagataaggggtgaactgtgttttggtagagccataaagcattgttaaaggatatactcaaggctcttaaaaaggttttttaaaaaatctcttgggctagctaagttccaatgtcaagagccatgtatgagtcaatgatattggttaaggaaaggagtctttaagataccctgtgccccacatcattttatctttacctctgcatatccaagcaaagcttgtaccttcaaagtatccagccatcgcatagattgttagaaaccatactcatttttcatctatgtccccaacatctcctgtttcagacatgctgccacgattcctgagaggagaagagctagaaagtagccataaagcaccactgctgtaatattcccctttcccccaaggaatgatggaatccccagcagaatttagttttcccactttcgaaacaggaactgtctataaaacattctatggaagaaccaatctgggccctcaagctaacaaaactagctgttttaatttatagaagtacaaaaaataggtagataggaagttgggtgaatagtgaggtgtaataatcttagctgtaaattaaatcaaagtaaagtaaatgaagcaataaattaaataaaggcattttagcctcatcttgatcttggggtctttattcatcaaacactatttcagtaatatgatttgaacgaattctgagaattcttagcaaaggaatttgatgtgtattgaaaatgtaaggagtcataatgaaagagaaacaagctcttcacttgcatggtcatcttaaatgagtcctctggaatggtactggtagattactgtcttagactttcatctcctcatggctgatcattagcttttcaaaggagtctaggtgaattttaaagtgatatggctatgaacagtcatcactgaaatgtggaataatttaagagaaagaggcagagagctctatcctgggagggtggtttgtattatcttcagtataaaagttacctttaatgtttttttaaaaaaatctataggaatccaagtgaatagtcagtttcagcaagaatttcccagcctgcaggcagctggggatcaggaaaaaaaagaaaaggaaacaaatgatgacaactatggacctggacccagtttacgtccaccaagtaagagtactttctctttaatacaaaatgagatcatatttgtgtattatcttgcaatacaacctcctgcttgctgttgcatatattatttgcctacttcgaaaaggcagactttgtactatagtcacttgctactcaggtatgatttttgcaccgacagtatcactgtaacttgagaacatgttagaaatgtgtcatcttgggcctcgcatccaacttactaaatcaaaatctacattttaacaagatgtccaggtgactttcatgtataccaatatttggatttttttatactagtttttgagcaggcttccctaatgtgtaactatttacttactactgtattaatattcggtgattcctcactttctgagctcaaactgaggaaacaaataattttggataatgagggatagtttatgtacattacaaagcaaaaactaaaaataaaagtgtaaaatgttcgagggatttttaaatgtcttcttaattgtgatagcttcatactgtcattaccaagtatcttaaaggaccttgtttacatggggaggttcgtctatgacagaagtgtttacaaattccatatttctaaaaacctgatgtatttcacattttttagctcttgtcagatgtaaataaatctaaatcttatttttcaagcgtcataatgtggttggtgcatttgtattagaaatagatgtgctgactcctctattttgttcagttgaattttcaccagttgtctattgctgcataacaaatttagcaatgtaaaacaacaaactgaactatacttatgatatcccactgtatctgaaggtcaggaatccagggtcagcttagtttgaggttctggccaagggactctctctcaaagctgcgatgaagctgtctgaagctgacttgactggggctgtacttccaaactgactggtgtagctcttggctctttagtttcatggtctcttagtggggctgcttatgacatggcttctgcagaataaatgatgagagacagacaccctccacccaagacagaagcccacagtctttaataacttaatctggagagggacatgctatcacttctgccatattctacaggttacacagaccaaccctgctatattgtgagaagggactacacttagtgtaaataccagaagataaagatcatttgggctatccaggagactggttaccatgcagtgtttcttagcaaaaccacctagctgttttatttggttaagtgtaattacaccagataatttcacgcaatctgttcacttgggggcatctgtaactaacaataatatactggaaacagacaaatgagaatatcactgtcaacccttccagattgtagaagtcccatcttccttccctcaggaaacctcaggtgtgtcactctgaaacatggccatctgatatatggagaacagtgattttaatttctataccaaatattgataaagcttcatagagaagttctaatattttcttctcccaccccagtatttgcttgtggtgacaccctctgaggtacatcctctccactttggaagccactactacgcaaacaacttgaaagcattagtaggacctggattagacttttcctgctctttcactctgcttacttgctttcattttcctgaaatacattttggtttcactttgttccattttcagatttttatctttttccttttttctctgccttcatactagatgttgcttgttggagagatggtggtaaggctgctggctcaccttcgtcatctgatcaagatgaaaagctccctggccaggatgaaagcacagctggaacatcagagcaaaatgatatcctcaaagtggtggaaaagaggatagcttgtggtcctccacaggctaaactgaatggacagcaggctgctctcgcttcccagtatagagctatgatgcctccttatgtgagtattgttaaatgaacaagcattcaaacaagtggtttttgatctggggtccaaggagcgaattgttatagggaaaagtttaggtctttgttttcattaacatctaactaaaaattagcattctcttttattgtatggtatattgtgagaagggactacacatggtgtaaacaccagaagatagagatcatttgggctatccgggaaacgttaccacgcagtgtttcttagcagaaacacctagctgttttatttggttaagtgtagttgtaccagataggaaacaaatcagcagtatctttattattaacagggattgcagatattttcatatcacattacattcaacattacttcaaaataattattagacccatagatgatgatctaataaagaagcacgtacgttaccataccacagatttattttgtaaatacagagaacaattacactaacattctgtttaatataattgttcttctttgcaatatttttgtattttacattatgcatttaaaatgttttcctgagaggaggtccataggtccataggattcatcagactgccaaaggggtggttcatggaaaaaatgataaagaacacttgccgtagtttcaaagtttttatttgtgtacttttaatatttttttcaattttttttcaattttttttcaattttttttttttttttttttggagacagagtcttgctctttcgcccaggctggagtgcagtggcatgatctcagctcactgcaccctctgccccctgggttcaagcaattcttgtgcctccgcctcccgagtagctgaaattacaggcatatgccaccacacctggcttttttttttttttttttttttggtagagatggggttttgccatgttggcaaggctggttttgaactcctggcatcaagtagtctgcccaccttggcccctcagagtgttgggattacagacatgagccacctcacttggcctttaaactttttttaatggaaaattttaaacatgtacaaaaataaagataacagtgcaatgaatctgcctcttttcctaccactttttttttttttttgaaacagagtctcgctctgtcacccaggctggagtgcagtggcatgatgtcggctcactgcaacctctgcctcctaggttcaagcagttaacctagccttagcctcctgagtagctgggattatagctgcccgccaccatacctggctaatttttatatttttagtagagacaggattttgccatgttggcaaggttggtcttgaactcctaacgtcaagtgatccacccgcctcagcctcccaaagtgctgggattataggcatgagtcaccatgcccgctcttttcctaccactttggattactaaagcaaatccaagatatttcatcagtaaatattttaagttctattttaaaggataaagacttggggagaaggtttgcaatgctgttatacataaaaagaaaactaattccttgatattctcaaatattatgttagtattccagtagttgtctcataattaggatccaggcaacatccattcgttgagattggttcatatttcttttaagaatcttgttacctatagatatttctatctcctgtttcctttggagcttatctgttataatttgttaacctgtgaagttcctcagattttggattttgttgatactatctttaatttcatttattatatactctggcacccacccctgccctcccaccacattttctaaattattagttagatttggtgtcctcattctttgtttactttcagcccaatgtgaagttgtaaaacaagtcacatgtgcctggatacatccatttagttttccagaagactcattactctcataggaaacaaaaatctaggtcatatttatttagtttgttgtttaactcctaatatttgaatcctaaatatccatcatactttccattccttcatattgttgattttatttaaaaatatggaatgcttcatgaatttgtatgttatttttatgcgggggctgtgctaatcttctctgtattgttccaattttgctgccaaagtgagcatatacattactattttttaatcattctagactaacagagggagatgaatgattaaatacaattacttgttaaatgttttttgctctgatgcctaggctggagtgcagtggcaccatctcggctcactgcagcctccacctcccaggttcaagcgattctcccgcctcaaccttccaagtagctgggattacaggggcacgccatcacgcccagctaattcttgtatttttagtagagacagggtttcaccatgttggctgggctagtctcgatctcctgacttgaggtgatccttcctcctcggcctcccaaagtgctgggattacaggcgtgagccaccgtgcctggccattaaacgttttcctaaaagaagtttgggagtatgctgacctggccttgaaaaatgatttatacccaattactttttttctaatcattttcaaattgtgctaccaaagacccctgaactttcatgtgagagggtaggataggaaagaggggaaaccacgtgggcatcattcccactttcatcagtgattatatttgaataaagtgttccactaattaacaaaaacatttaaatatcactactgtatactgagaatttaaaatttgtttctaaaatgaattttctggcaaattcctagattttaagcattttttaagaccacatgaaattatgtctggaatgaccagatgaaggatttaatgcaactttagctatgaacatatgcctccagtagtgtctttattaacttcagtatagaagtgtgatgcaactgaaaattctccagagtatccctcaaagtttccccagctgagtttcagctgttgcttgacttaattaacattgcttcaacctgacttaagagaaatttcttctccttttttttttttttttttttttaataaagacggagtttcgctctgttgccaggctggagtgcagtggtgcgatctcagctcactgcaacctccacctcctgggttcaagtgattgttgtgtctcagcatcctgagttactgggattacaggcacgcccaccacacctagctaatttttttgtatgtttagtagagacagggtttcaccatgttagccaggatggtctccatctcctgacctcgtgatctacccgcttcggcctcccaaagtgctgggattgcaggcatgagccactgcacctggctgagaaatttcttctttagacagcataatcatataaacatagccttacttcaaatgtaagaattttcttatctaacacacagttactacttactttttagaaaaactagtcttctatttcaggatataaattatgtttttacagtaatataatttcctattatttacataatttgacttggatataagcatatagtcaatgaccaagacattctttgacccttcttcccttcaaaatcataggatgaatcccttggtgttatttgttcccagaatctatcttatgtcttctcttaagtttagtttcccagagccaagttcctacagagaacagtatctggacctgtttgggacagtttataatgatcatctgtgcagtaacttgattgagaattcacctatgccatatacatagaaaatttctgggtagctctctgtcccccttttccaactcacttccttggattgtggactgtcttttaattttatctgagctgagttcttcttccccacgcctgccacccctacatttttctttttgaggtgctggggctggggactgatgttatcctccttatccacaaatctgcctctgattattctactcctgcttatggaggaaggccaacagcatttgcttttcaaatattttcactttgccgtttgctagggtgcatgtgtgtacatatcctgttgatacaattactttaatgtaatttatatcttgttgacacagttactttaatgtaattttacattacatatctcattgatacagttactttaatgtgtacatatcttgttgatagttactttaatgtaattttattaatataatacagaagtttttcatatgtgctctagttattctatttataaagagttgctagtggcaatggccttggaaatgggttgctattgaggatgaacagataacagtcattaatagttttattcacttaaatcattgttttataaattgtaacttcaggcctaggctcagatttatatatatatataattttttaaaataactaggttgctaaatttatcacaattttttgtttccttcattcagatgttccaacagtatccgaggatgacatatcctcctctacatggtcccatgagattcccaccttctttatctgaaacaaacaagtaaggctattaaatgattaaagtctgtaaggaatatatgcttgttaagatttcctgaaggttgagtggattgtgtgattctgagttgtgtaattgatcgttttcctatcctcacagtacagttgtcattagtaaataattggctaactcttataagacagaacagaaataattcattcttttaagcatttaaattaatttacataggattttgaaaactgaaaaccaggccggggacggtggctcacccctgtaatcccagcactttggaaggccgaggtgggcgattcgcctgaggtcaggagttcaaggccagcctggccagcatggtgaaaccctgtttctattaaaaaagtacaaaacaattagtcggacgtggtggcgtgcacctgtaatcccagctactcgggaggctgaggcaggagaattgcttgaacccaggaggcggaagttgcaatgagccgagattgtgccattacactccagcctgagcgacagagcaagactccgtctcaaaacaaaaagaaaactgaaaaacatggccctaaaattgatgacacttgtttttctcttcttcctttcatattatggactccccattttctttctttttttttttttgcttattatatgagacttgaacatcctcttgaattattttcctcaaaatatatattttgaagttagttttattcatatcgttatccttttaacatatttgttttatcttaaatatttgagaattcttaaaaactttgtcagctgttacttaagagttacgtattatcctatcattatgtattaatattaattttttcatacacatgtccatgcagaacatattaggtatcttggtgtagaaaacactaatgttgaaatgaactaaattccaatcttttagtattctcccagtttagtatcataaacttttgtatcttttccatgacctgcctttcattagaggccttcgaggaagaggcccacctccttcatgggcctctgagcctgaacgcccatccattcttagtgcatcagaactgaaggagcttgataaatttgataacctagatgctgaagctgatgaaggttgggcaggtaagaggcaaaattaattaagtcctttaaattgttagatgctttcaagcagccagtctgagttttccttaatttaataggtgctcagatggaagtagattatacagagcaactgaatttcagtgatgatgatgaacaaggaagtaacagtcctaaagagaataacaggtaagttgtgatatcttttactaataacagtatgaatttgttgatacaatattagctacttatgcaaagaagctttgttaatagacaattgtttgttatttgtagaatttatatattctcagaagttttactgaatagagggtgcttaatgagctagattaatacagtatacagctaatcaaggaattaaaatttgatgcgtctcaagaaagtttatttaaaaacatttagggctgggtgcggtggctcacatctgtaatcccagcactttgggaggccgaggcaggcagatcacttgaggtcaggagttcgagaccagcttggccaacatggtgaaaccccatctctactaaaaatacaaaaattatccaggcgtggtggtgcatgcctgtaatcccagctactcaggaggctaaggcaggagaatcacttgaatccgggaggcggaggttgcagtgagccaagatcatgccactgcactccagtctgggtgacagagcaagactgtatctcaaaaaaaaaaaagatatttagatgcttggcacctagtttggagatcttttgagaactggtattaggaacaattttttaaactgttacttgcttgacctgatctgtatttacaaaattggagaataattccctgggttactacagctttttcaggtcctcgatttcttaaaacttagtaaactgcattagggccttggaaaatggggagctttttatttctttttccttcattctggaatattggagcaccagtcaggaatatatgggttatatatcataaaagttgggcttttaaaatatatggaagtttggaagcacatttggtataatttttcagttatggcattgtgacaaacatcgttttatgatcgtttaagagatacctgtggtttgtcgtggctttgaaaaaatactgtagtttgatttatctttttattaaatcagaataaattagaatgcagttaaataataattccaatattacccagttacatttggattgtatttcttatgtagaggagataggaaatgatgtgattatattcttttgccaggatatatgcctgacatgtgtgtttagatttgacaactactgtattgcactttcatagtatatatttattgaaagaacaaattagcactaatgggtcacacacccatctcattccttaatacatttccccccccagaaaccatacagaaataatttttttaattgcaaaaataatgtgtgtacttatgatacagttggtccactttatttcttctgcattttgatttttcagtgaggatcaaggttcaaaagcctctgaaaacaacgaaaacaaaaaagaaacagatgaagtttccaacactaaatcatcttcccaaatacctgcccaaccatcagtagcaaaagttccctatgggaaaggaccttcatttaatcaggtttgttggactcatggagatccttgttattgcaaggatctccttattgtaattactgtgtaatactatggataattattcttaccacagagtggaacgggacttagaaaaaggaaactgtgtatttttttcttgaatagtcttgaatctatcataatttttattgcatttaaccggaattatcaatacagtagctaaagttatcaagtgaaaactaaagcttcacattttttttaccttatgatatagctcaatcatagcaaagtgtagggataatatttttctaaaataaaataaacattgctgaagtgctttatggtttattgaatacttaaatactagtcagtctttttgtgtgaatggtacactatctgtagggaaatcacatagtgagtagggagatctaaagtctgaatcattttgaagaacattgtgaatgaagggaaatgtgtgtgcaacagatatttgatcccacttctgagatggtaaatggttgcaaaagctgcattataaactgggaataaaaaggactactttcaagggagtccacttatctctttattaaggaatcagtatagttagcatgtatttgttggattcatacaaaatagatggaggaacttgtcccttctgagggctaaaaggaggtagctaacagtttccttgacaggaaaaaaagtcagtaagcagttacagtgtgctaagtggcgtaatcatagagggtacaaaataaattctttgagcattcatttaaggtagaaggctgcagaagactaagtacttgagctaattcttaaacaagcatgatttaggcagtatagaaagggaatatagctgttacaagcagtggaaacacatgtagagaagtatgagaaaacatggcacattcaagaaattctaagtagtttgatataggagagaggtaagagagctatgtaagaaccacttctttaaaatgtatgctatatgagggttttaatcttaaggcattgatgatccattgaataaatttatgaaccctgaaaaagaagaattttttaaataacattttaataacttttttgtgtgactttttacttattggcataatggggaatgagaatttttcatgaaagaatagaggaatagatggaatatgtcttgatgtctttgacttttttgtgacagtcatgtgacagtttatattagcaagtgaatgtttcatgtattttgttccattatgttttagattttctttttttaagataaatctcatatttttagtttgccactagaaaagaattgagcttacataaataaaatttagtaattagaggtatagatctcctcagtcagatttgctggatcagaattccagaacagctagactaaaattctttttttccctcttgagacagagccttgctctttcacccaggctggaatggagttgcgcgatcttggctcactgcaacctccacctcctgggctcaagagattcttgtgcctcagcctcccaactagctgggactacagtggtgcaccaccacacccagctaatttttgtatttttaatagggctggggtttccccatgttggccaggctggtcttgaactcctggcctcaaatgacccacccgcctcagcctcccaaagtgctgggattacaggcgtgaggcaccacgcctggctaaaatttttattgtaaagtgcatttaagattctaaccttactgaaatagcagagtgattgcataaaagtaatcttgtaatgagtgatatgcttttatttaaaaagagaggagaaagatgtttagcaatcttatggtattgagaaaatcattacattcagaaatatatctttttttttttttttttttttgagatggagtcttgatctgtctcccaggctgtaatgcagtggcgtgatctccgctcactgcaacctctgcctctcaggttcaagcaattcttctgcctcagcctcccaagtagctgggattacaggctcctgcccccatgcctggctaatttttgtatctttagtagagacaggtttcgccatgttcgccaggctggtctctaactcctgaccttgtgatccgcctgcctcggcctcccgaagtgctaggctcacaggcatgagccaccgtgcccggctgaaatatttctaatagatatatcttttctttttctttccttttttgagacagagtcttgctctgtcacccaggctggagtgcagtagcatgatcttggctcactgcaacctccgcctcccaggttcaagcagttctcctgtctcagcctccagagtagctgggattacaggcacccgccaccacgcctggctaatttttgtatttttagtagagacagggttttgccatgttggccaggctggtcttgaactcctgacctcaggtgatccgcctgcctcggcctcccaaagtgctgggattacacgtgtgaatcaccgcacccagcagatatattttttcttacatggttctttttaagtaattctttcaagctggtgtggtggctcacatctgtaatcctagcactttaggaggctaaggcaggcagatcacttgacatcaggagttcaagaacagcctggccaacatggcaaaaccctgtctctactaaaaatgcaaaattacccagttgtggtggcagacgcctgtaatcccaggtatttagcaggctgaggcatgagaattgcttggccccgggagacagaggttgcagtgagccaagatcatgccactgcactccagcatgggcaacagagcaagactgtctccaaaataataagaataattctttcttctttataataggaacgtggaacatcttcacatctgccaccacctccaaagttgcttgcacagcaggtaaattttaagtgcttgtttatggattatatattttatttgaccttttgttttggtggaaagacaccaaattttttattcaaaacttttatgaaacagttactaactttttaccttgtgactcttacatgtcttactcttcatccttttcattttcattctcagttgataagcatgcttcaagtttcactaagaaaataagaagtacctaggagataactttttttttctctctcactgcccgtatactttttcttcctattgtttttggtgctaaggacacttttttacttggttccttgtatccttttccacttatgataatgttatctcatattttaagaaaaacaacttcacaaaaacctctctctttacattactccatcccactttccatcccattgcagtgtctaccctatttctctgttctccatcagtgaaatttttttttttttttttttttagacagagtctagctctgtcgcccaggccggagtgcagtggcgtgatcttggctcactgcaacctctgcctcctgggttcacagcattctcctgcctcagcctcctgagttgctggcactacagatgcccgccaccacgcccggctaattttttgtgttttttttagtagagacggggtttcaccgtgttagccaggacggtctcgatatcctgacctcgtgatccgcccaccttggcctcccaaagtgctgggattacaggcgtgagccaccgcgcccggccaatgaaattcttttagtgaactatttatacttaccgtcttttgctgctcattctctcattagccctctccaggcatgctttcttttcccactctacctttgaaactattattatcagagtcagtgatgacttccatcttgacaaattcagttttcttgtcttcatctcatttaaatctcagctgagtcattgacatagttgatttctctatccttcttttgtatatgcatatatttttagagacagggtcttgctttgtggcccaggctggagtgcagtggtgtaatcatagctcactgccacctggactcctgggctcaaggggtcctctcacctccccagcagctgggactgcaggtgcacaccaccacgccaggctaattttttgcagagacagggtctcaccttcatgcccaggctggtctcgaactcctagacaagataccaccttgacctaccaaagtgctggaattacagacttgagccaccatccctggcctatccttaaaacacttttttatctacttgcatctgagacacctcgctattttgtttttctttgctttctattccttctgggcctcctacacttcgagtgttggagcactcagcctttttctcagtccattttaaaaatctgtatccttttccttgggtatgtcttctatgagctgatggcattcaaatgtacatttagcccgaaaagctttgcactgacttttaagagtcatatattcaacaatcaactcaacatctccacttggatctctagtaaacagctcaaatatgtccaaaccataacacacacccccacctttcctgcatacccacagtgctgcttctcctgtctttcccatttcaggtaatggcattatcattcacatatttgctaaggctgaaacttagaagttactcttaactcttctttttttaccctacatctagctttatctatcagcagattgtcacctgtaccttcaaaatgtacactgactacttgctaccaccttttatatttcctttgaactattggagtgggttcttgacagatactgctttcctcttatgctgcctgctcacttgccaccttcatcccatattcttctgtagtagttgttgtctttttaaaactatggattaggtccgttactccttgttcaagtccttctcatgatctttcagatctctgtctacttttctaatttcatctgctgttcttaccacatacacattgctcttcttgacttttttacttgttcttctttctaactagcagattttcttttcctgaaatcgttgttatgatcagggtctccagaccttctgtaatcaccctactgtgatagctgtacatatcacaaccatcaccatcgtttccagcaatccctctcctcataaccactgaaagctctttataacatttctgcgtacacagaaactaaaactaaaacatctagaaaaaagtatagaagatcaagtgttcatgaacttggagctgacaaagttttcttcgataaataagaccttggccacgaattagaaaggaaaagcagctggtcagttggactttggagaacatttcccaaagaatgcaaagatatgttacagaaaaaaatattcctaatacatctgacgaaggacttgtagctgggcttttttttttttttttttttttttgcgcaacagagtcttgctctgttgccgaggctggagcaagatctcagctcattgcagcctaaacctcctgggctcaagcgatcctcctgcctcagcctaccaagtagctgggaccacaggcatgtgcctctatgcccggctaatttttttgtattttttgtagagatggggtttcgccatgttgcccaggctagtcttgaattcctgagctcaagcagtcctcctgccttggcctcctaaagtgctgggattccagatgtgagccaccgtgtctagcctgggccgtatttttattttttttttaatatcttacaactcaataatacgtagttaaacaaaaagacttgaacatttgtttctcaaaagaaaatgtaagaatggccagtatgcacatgaaaagatattcagtgtctttagttattagggaaatacaagttaaaaccactgagattttactgcactgccagaattaaagactgatgacaccatgtgttggcaaggatgtatagagcagctggcacccttatacattggaaaaccttataaccactttggaaaacagtttggcagtttcttgtaaatgaaatatctatttaccatatgacacaggattttcacttgtagctgtttatccaacagccaggaaaacatacatttacacaaagacttacgcatgaatgttcatagctgttttattcatagtttaaaaactggaagcaacccacgtgtctatcatacatgaaacaacgtgcccacaatggaatactatccagcagtaaaatggagcaaactacttatacataaaataacctcaatgccattatacttagcaaaagaagctagcacaaaagagaatataattttatacatgtatataaaattctaggacaaacagaactatacaaggttagggttggggtgcttggggccacagggggaggcagaggagtgatggaaatgttgtgtctgcgttggagcagtggttacacaggtgtatcatttgtccaaactcatcaaactatacacttaaaatatgtgcagcacagcacattttatgtaaattttacttttatgaagtgagttgtgtaaattaggcactaatatatttggtttttcagcttatctctgagctgtggatgaagaaactcagcacaagagagatgaagtaatttgcatatgatggcactattagtaaatggtagtctgcattcatttaaaaagatagtcaagtgttttcgttgtgtcattgtttaatctttttataagcattccagctgggttacatatggctcttaagatttcttcaccctagtagcttttaaaatcaatatgttaaaaacatttttttaattacttttattgtttttgcatagttgcaagcagtgattttaaaacctgtcattgttttataacacattaatgaaaatttagtcattgaaacttggatgtttcagatgatcctccgattctccactccgggttctagatacgcttttctggatctttcagtctaaagatagaacttttcttcacccagactaatttgtaggaatttcttctcctttggggtatcattacagcactgactctgtctttttcactttgcttctttggctctgtgctttttacctgtagctgtaccttaattttctcagggctcacatgccatcattttggatatttaataccttcatttctctcccttagacattccaactctggcagctgcttctaaagtatccatgctaaatttcctttgtctctaaatttagattttgagattcactgttgtgcttctagttttattcagcaaatactgaatgagcaacaacgtctggcacaataataggtacatactcagtaaacattggaccgctggattaattattctggtcttagtttggtgaattatctagatgtaatatatttcccatcttatgtgttttcattttaatgtgtatgttcatcagagaaatttctgatatttttgtggggtttttccttctccatgcctgatacccagtgttagtcagaaatagagttgtcataactcatctgataccttaatgtttcagcatccacctccagatcgacaggcagtacctggaagaccaggcccctttccctccaagcagcaagtagctgatgaagatgaaatatggaagcaaagacgaagacaacaatcagaaatttctgcagcagtagaacgtgctcgtaaacggcgtgaagaggaagagcgaagaatggaagaacaaaggaaggcagcttgtgcggagaaactgaaacgattggatgagaagcttggcatcctggaaaaacaaccatctccagaggaaattagggaaagggagcgagaaaaagaacgggagcgtgagaaagaacttgaaaaagaacaagaacaggagcgagagaaggagagggaaaaagacagagagagacagcaggaaaaggagaaagagctggagaaggagcaggaaaaacaaagagaaatggagaaagaaagaaagcaagaaaaagaaaaagaactagaacggcagaaagaaaaggaaaaagaactacaaaagatgaaagaacaagaaaaggaatgtgagctggagaaggaaagggaaaaattagaggagaaaattgaacccagagaacctaatttagagcccatggtagaaaaacaagaaagtgaaaacagctgtaataaaggtttgatagtattcttcattctcttttaaaaactttacaaagagctttatgttggttacagtttggggtttgtatattttaaatatatgtaatcaatataaaagtgattgttttatgatagcatttgcagtacaaaatatgggctagagccgtgttttctaattctgtatatgaacagacgtctctgaagtgtttctcagttattagatgagcttcatttctgttttatctgcagaattgtattggcttcatagtcacatatactgattctccccctgcttttttctgactccaagacatttaactaaacaaaatctcatttgttcacatgcattaatacctctaaaactgaactggcatagagcttaatgagtatgttggattatcataattaaatgactgcacctagttcataatttcaggtttgctgtttaatcagtttaaacatgcaagcttccatggtgtagttgatatgctattaaactgtaatttcctggagtaattatactttaaaataaaattctttttctagatctaatcaacttttttgttcttctccgagttggcttgtagactgattaatggcattcaaatatagtataaagccttggcaaagttaaagttcagggttttcgttttttgtttgttgttgttgtggtggtggtggttgttgttgtttttgagacagagtctctctctgtctccaggctggagtgcagtggcggaatctcagctcactgcaaactccacctcccaggttcaagtgattctcctgccccagcctcccaagtagctggggctacaggcgcgtgccaccgcacccagctaatttttgtatttttagtagagacggggtttcactatgttggctagcatagcctcaatctcttgacctcgtgatctgcctgcctcggcctcccaaagtactgggattgtagacgtgagccaccgcgcccagcctaaagtttagttttaatgaacgacttgaattaaaatagaaatgcagttttatttcagtgtattttctgatgtggaaatattgtaagttttctaacctgacgtctcatgctcttttctacaaggcactgctgcttaaaataataagaatgtgtttttaaaaataaagtttttatttatatgcagggttaccttcaaacttggctcttaatttaactataaaggagtatgagtattttatctttaatttttttaatgaaataaggcctgtatggaccatttgttaagactctaagatttcagatttttttcatattaatcaatctagagagactttgctattgaatagtgggcttatattacataagtacttatgaagattgctcataacaccaaaatagtgaaataaagtgttcacaagagaaaggaaaacattatcatagtttaataagttttatttgtgcttttattttcattcacattttatatattctctctcatggcaatttaattttagcttgtttatcagtgagatgtacccatgtgatttttttttcccccctcaattctgatactagacacatacaatttttttgtttgttttaatgctctctgagatgttctcaagacacacgtgattttaaagtcagtgcctatgtggctctttttcctccagtatattattttccattcttttttttttggctgtgttgcccaggctggtctcaaactcccaggctaaagtgatcctctcacctcagcctcctgagttactgttattacagtcatgcaccaccatgacctgctcactcttttacaacattcttaatattgaatgtaatccaagcaataaaaatgttatttgtgattcttaacaatatgcttttacattgggagataaacttccattttaaattcattactagtcatttgagaaaagaatttgtaacaagcgtggatttgtaattgtgacaaatgacattctagaatgaattatgtttgaagataactagtgatcactctgttgtcttcagacttaaactcattagttttccttacagataatagtccctttacccaataaataactaaataaaccaacatgctctctttttaagtatttataggccatttgtgttttcatgtagattttaatgaactaccagtaaatactgacaattacattgatgtttattgaaacaaataaaaaatatgtggagttggaaatgtttcattatttaaaaaaaaaaaacatagattttatatgatgaagcatttggatctctgctctccatctctaagaatgcagcttttaggaaatctaaggttttgataatctaatgttacctcattgataactaccaatgttaaagtagaaaataatgttttagagtgtcgaggatattttcttcctcattaacttttattatacctcagtctttgtaaaaatcctgtgtttgataagtgtcatagatgaatactattacctttcaccttttctttgagcagaggaggaacccgttttcactagacaagacagcaatcgcagtgaaaaggaagccacaccagtggtgcatgaaacagaaccagaatcagggtctcaacctcggccggctgtattatctggctatttcaaacagtttcagaagtctttacctccacgattccagcggcagcaggtaatgataaaaatattttatcatgtatgtgtgattgaagtggtttattatgcagtagtctgggaaattagacataaaactgataatacgtaaagcacacaaagttcccttgaaattatttttccttgtaaataaaagttaacgtgggttttaccttgaccttctgtgtcattccttttgatcttctgcctcatttatagacaccatcttccatttctaggagatagatcatacagtgcttgagtataaggtaaaatgttatagttcatctttcagttttttgtcttgccaactcttaactgttaaataccttttgaactcttacttttccttcaaggattcaaaacaggccattattttgtgatatgattgattatgttaatttgtcatgtggaactaaactctcaagatatgggatcttactttttcaggaacagatgaaacagcagcagtggcagcagcagcaacagcaaggtgtacttccacagactgttccttcacaaccgtccagtagtactgtccctcctccaccacacagacctctttatcagcctatgcagcctcatcctcagcatttggcttctatgggttttgatccaaggtggctcatgatgcagtcctacatggatcctcgaatgatgtcaggaagacctgctatggatattccacccattcatcctggtcagttgaatttgcatttatagttttacaggatcaaaatttttttttccctgcttttagtttcagttcctttgagagttgtaatctaggaaaaacttaaacctccgatttttaatcaaaatgatgtaactttcagcatcgagtaattaaatatctgacactcatattacttatgtggcaagaacaaaatactagttcatttctgttttgtaagtattatttaaaacttcagatggaaataattatgtgttattaacagtatttgttattggctacattgttgttcttctttaaagtgttttcagcgtttgaattttgtccatatgttatatatattccttttcaagttcttcttccatcatttaccaacctaacacttgaatttccttttaggttagggggaaaaaaagtgaattagcagtcttttatggaatccatcagaataaatcaagataatctattaccaaaatgttacagaggaaaatttagggatgataagctgatcacaaatcatgttttgatttttacatttatactggtatttggaaatttaagtggcatattttgtagaatattgaccaactaaggtaggttaatggaatttaggaaagaattttctctgaaagttatcatagtataattttcatgatgtttgtattgacatccagagtcacagtacttggtgtctgatttttatatgcataatattttctttcttttgaagtaaaacaggctgctattgtgattttgcttattttgcttcctcagttcttaaatgcaatttttatttaacagcagtaataaaattccattcacagaacaacccttacataatttccaccagtcttttactcaggaaaaaaatgcttttaatatggagaattccacctaacaattaataacctgtattctatgtctatcatggttttgtttcgttcatttttcaaaatcctcatttcacctttttctgaacttttgttacaggaatgattcctcctaaaccattaatgagaagagaccagatggaagggtcaccgaacagttctgagtcatttgagcatatagctcgatctgcaagagatcacgcaatttccctttctgagcctcgtatgctgtgggggtcagatccctatcctcatgctgagcctcaacaagcaactactcccaaagcaacagaagagcctgaggatgtaaggtaataaattatttcaatttaatagatgatacagaatattttggtaaaaggaaaactgtgtagtgtttctgaagatcattccaatttaggactgaagcataaatctggtttccttctatttaatttagcatgctacgcttactctttggacatattctctgtattcattagggcattttgtaacctggttctgtactcaattgtatgctgtaatttagtattagatgttgaaattggtaggttcttttttgagataggaacttgctctgttattcaggctggagtgcgttggtatgatcttggctcactgcagcgttcacctcccaggctcaagtgatcggcttacctcagcttcctgagtggctgagactacatgcgttcaccaccacaccccgctaatctttgtggggttttttgttttgtttttgtttttgtttttgtttttgagacagagtcttgctctgtctcccaggctggagtgcagtggcgcgatctcagctcactgcaagctctgcctcccgggttcacaccattcttctgcctcagcctcctgagtagctgggactacaggcacccgccaccacgcccagctaaatttttgtatttttagtagagacggggtttcaccgtgttagccaggatggtctcgatctcctgaccttgtgataatctttgtattttttatagagatggggttttgccgtgttgcccaggctggtcttgaactcttgggctcaagcagtctgactgccttacctcccaaagtgctgggattatagacgtgagccatcgtgtgcagccacttgggatgtctttattgtagagtaggtgtgaagaaatttaggtgtatctacaatgcttatataatatagctagatgtaatttttccattagtgagatgtttctttttaacagtattttagggaacatttttaaggccaagataaggagaaatacaataatacaaagttaactttgaaatggcgcacaattggtgatgactgtaataatttatagccatacagttggaacttcctgcccttttatgggctatatttttttggtaatgttttataatgttttataattatttgtaattaactgggacagataagcttactcaagtgtactctttcattctaggtggaaattactggtcttgatggattagaaattcacatcagcatggtcttaactttgtttttccttaaggaataaacttcatttatttatttctattttttatttttattttttgagaagggtctcgctctgtcagccaggctggagtgcagtgatgcaatcacagctcactgcagccttgacctcccaggctcaagtgatcctctcacctcagcctcctgagtagttggactacaggcatgcagtaccatacccggctaatttttgtattttttgtacagacagggttttttcatgttgccctggctggtctcaaactcctggggccctagtgatcctcctgcctcccagagtgcaaggattacaggcatgagccaccgcttcaggcccatttttttttttttaatggagttttgctcttgttgcccaggctggagtgcaatggtgccatctcagctcaccgcaacctccgcctcccgggttcaagcgattctcctgcctcagcctccctagtagctgggattacaggcatgtgccaccacgcccagctgattctgtatttttagtagagacggggtttctccatgttggtcaggctggtctcgaactcccgacctcaggtgatccgccctcctcggcctcccaaagtgaggattgggattacaggcgtgagccaccgcacccggccctatttatttttaattgtggcagaaaccacttagaacattagatatatcctcttaacaaaaatttaatcatatggtaccatgtagttaactgtaagcagtgttatacagcaaatctccagaacttttttttatcttgcatgactgaaactttatacctatttcctattcttacctttacctatatttcctatatttacctttacctatatttcctatattatacctatacctatatttcctatttccccctactcctagcccctggcagccaccattatggtttctgctttgatgaagttgattatttcatgttcctcatgtaagatatttgtcctgactgactgacttcacttaagcataatgtcctcagggtttatccatgttgtagcatatgacactatttccttcttttttatccctgaataatattctattgtatgtgtataccacattttctttatccattcagctattggatatttaggctgtttccacctcttggctattgtgagtaattctcctctaaactttttatatagcgagagaaagattctcattatggttaagagccattgctttctgttttagagggattattttgctatatacttacacatgggaaagattgctttgttgattatacctttgaattcttatcatcataggtctgaagctgcgttggaccaggaacagattactgctgcttattctgtagaacataatcaattagaggctcacccaaaggcagactttatcagagaatcaagtgaggcacaagtacaaaagtttttaagcagatctgtggaagatgttagacctcaccatactgatgcaaataatcagtctgcttgttttgaagcacctgatcaaaagaccttatccgctcctcaagaggagcggatttcagctgtagaaagtcagccttcccggaaaagaagtgtttcccatggatctaaccatacgcaaaaaccagacgagcagagaagtgaaccatctgcaggcattcctaaagtaaccagcagatgcattgattcaaaagaaccaatagaaaggccagaggagaaaccaaaaaaggaaggctttatacgatcttctgaaggaccaaaacctgaaaaagtatataaatctaaatcagaaactcgttggggcccacgaccaagctctaacagaagggaagaagttaatgatagacctgtgagaagatcaggtcccattaaaaaacctgtacttagagatatgaaagaggaacgggaacagaggaaggagaaagaaggagaaaaggccgaaaaggtcactgaaaaagtagttgtaaagcctgaaaagacggaaaagaaggatcttcctcctcccccaccaccacctcagccaccagcaccaattcagccacagtcagttccaccaccaattcaaccagaagcagagaaatttccttcaacagaaactgcaactttggctcaaaaaccatctcaggatactgagaagcctctggaacctgtgagtactgttcaggtagagcctgcagttaagactgtaaaccaacagactatggcagcaccagtagtcaaagaagaaaaacaacctgagaaagtcatcagcaaagaccttgttatagagaggcctcgaccagattcaagaccagcagttaaaaaagaatcaactttgcctcccaggacctattggaaagaagctagagagagagattggtttccagatcaaggatacagaggtcgaggccgaggtgaatattactccagaggtcgaagctatagaggttcttatggagggcgtggcaggggtggtaggggacacactcgagattatcctcagtatagagacaataagccaagagcagagcatataccctcagggcctctcagacagcgagaagaaagtgaaacacggagtgagagctctgattttgaagttgtccccaaaagaagacgacagcggggttcagagactgacacagacagtgaaattcatgaaagtgcaagtgacaaggacagtttaagtaaaggcaaacttcccaaaagagaggaacggcctgaaaacaaaaaacctgtaaagcctcattcttctttcaagcctgataatcatgttcgaatagataatagactgctagaaaagccttatgtaagggatgacgataaagctaaaccaggctttcttcctaaaggagagcctacaaggagaggcagagggggaacattcaggcgtggtggaagggatcctggaggccgtccatcacgcccttccactttacgaagaccagcttatcgggacaatcagtggaacccaaggcagtcagaagttcctaaaccagaagatggagagccgccaagaagacatgagcagtttattcctatagcagcagataaacgacctccaaaatttgagcgaaaatttgacccagctagagaaaggcctcgaaggcagcgtcctactcgaccaccaaggcaagacaagccacctcgatttagacggctaagagagagggaggctgcttcaaaatcaaatgaggtggtagcagtgcccacaaatggcacagttaataatgtggctcaagaaccagttaatactcttggggatatttcggggaataagacaccagatttatctaatcagaactcttcagatcaggcaaatgaagaatgggaaacagcttctgaaagcagtgatttcaatgagaggcgagagagggatgaaaaaaaaaatgctgacttgaatgcacaaacagttgtaaaggttggagagaatgttctacctccaaagagggaaattgcaaagagaagtttttctagtcagagaccagtagatcgtcagaatcgacgtggcaacaatggtccacccaaatcaggaaggaatttctcaggtcctagaaatgaaaggagaagtggcccaccatcaaaaagtgggaagagagggtgagtactttgttttaaatatagttgcttttgcacctttaaagaagctaaaagtagagttcttggttgaattatgcaaagagccagtctagataaaggaccaaaaaacattgttcttcccaaatgctttattctctgttctcaaagtgtaagggtgcttaaggaagagaggttaaggtgtcttaggagtctttgcctgctacgttacattttccagaagagttctcttggaaacttgtagctttgggaaaatgttcacatctaaggagggacatgtactgtgtccttatttggtaagttatctgatgagtagccctcccttctttctcagtttctcctaataaacctctaatgctacacaggtgtcctctgagatttaaattaatgttataaccatatactttgtcactctagagagaggcccagaaaacaaatccctgttctactaccaaggacaccaataacataattgccatggcaatggatttttttaaaaaaatattttttctcaagtaagctaaacttggcctgttttttgttgttgttgttgagatggagtctcgccttgtcacccaggctggagtgcagtggcgtgatctcggctcactgcaagctccacctccagggttcatgccattctcctgcctcagcctcccaagtagctgggactacaggtgcccaccaccatgcctggttaattttttgtatttttagtagagacggggtttcactgtgttagccaggatggtctcgatatcctgacctcgtgatccacccgcctcggcctcccaaagtgctgagattacaggtgtgagccactgcacctgttgcttggcctgtttttttaactattcagatgttgggcctggtgcggtggctcctgtaatcccagcactttgggaggccaagttgggcgggtcacaaggtcaggatatcgagaccatcctggctaacacagtgaaaccccgtcctctactaaaaatacaaaaaattagccaggtgtggtggcaggcgccactgggagtggagcttgcaatgagccgagattgtgccactgcattccagcctgggccacagagcgagactccgtctcaaaaaaaaaaaaaaaaaagttggttatagtaagctagtattgatttatttatttagtgttagcattataacgtagcagttaagattcagaatgcctaggttcaaatctcggctctagtactttctagttgcttcccctttgcttcctcaccgctaaaatggggagaaaataatagcacttaatgtgtgaagatactaagatgatacttgtgatgcacttaatacctggtatatagtaagtaatcattattatgtgtgccctgcttttagagcaattgccaggtttgcagcctgagctgataagaatttaagaatttatttggactgtatggtattaatctgagttccttagttttacatacttagcacttcagattactatacccataaggtatatttgtctattttctgttgatataactaaatacctgagatctggtaatttataaagaaaagaaatgtatttcttgcaaatctgttggctgcaaagtcgaaggttgagggggcgacatctcatgagggccttcttgttggtagagactctgcagagtcccaaggcagcatgcttatcacatggtgagggggctcacaagagatggcacaactggcttttataacagacccgttcatggtaactaaccaactcccttgataacccattcattaacctgttaaggatcaatcaatccattcagaagggcagagccctcatgacataatcaccttccaaagttctcacctctcaccactgctgcattgccattagggaccaagtttccaacacatgaacttttttttttttattgagggcgtgggtgagggacggagtctcactctgtcacccaggctggagtgcagtggcgcaatctctgctcactgcaacctccaccccgctgggttcaagcatttctcctggctcagcctctctagtagctgggattacaggcgtacactaccatgcccggctaatttttgtatttttagaagagacagggattcgccatgtttgccaggctggtctcgaactcctgacctcaggtgatctgcccacctcggcctcccaaagtgctgggattacaggtgtgagccactgcacgtggcccaacacatgaacttttgagggatatgttcaaatcacagcattagtttgctgttccagataatttagaaaaaggaaatttttacttggaatttgaacattcccttaaaattccaagagaatcaggataaccaaaataaacagaatagtttatttcccgtaaccaaactattagaattttaagtaacaatactcagggaaaattttgataagatttttgtgccatgtaaatctcaactatgtagcaagatttttgtgccacatagatagataacaacaactttgaacctgtagaaatggcagtgacgattataattaaatgttttttataagagcaccatatagaagaaatgaactcattcttaaaatgtttcaggttatgaccagggacctggtaagcttttatcttgagtaatactataggctaagatgcaaatgaattagtaaacccatttcccatgatcattttcacttggaaatttaaaaaaacaacctgaaattattcttttaggaaataagaactattaagaactgtaggggatacatttggtttgtgaagtgaattatttccatattaaagttttttaaataattatatcaatgtgtaaatctgattacatttttttaaatgtacatagttgtaaatatagaatgctttttaaaaatttttgttttcatatgctgcccacttttggagagcatccatttgtgaatactttgaacttgcttggatcacagaaattttctgctataaacagtgttaattagctcatttataatatgatagacaaatagactctaagaacttctggtataactagaattctagaatttaattgctggaaagaactctagggagctagtctactttcttgggaaacccggttttagtaaggttgtgctgaacaaaagttactaatgcttgtttggttacagttaagagttttctatcccaacagtgtttcatcttagaatgaactttagaaactgccaataagagcatttttcttttgtttgggtaggtggaaatagtaatatctcaagttatttttttgtaggccatttgatgaccagcctgcaggcacaactggggttgacctcatcaatggcagctctgcacaccatcaggaaggagtacctaatggtacaggacaaaagaactccaaagattgtactgggaaaaaaagagaagaccccaaaccaggccctaaaaaaccaaaagagaaagtggatgctctatcacagtttgatctcaacaattatgcaagtatgtcttaggtttctttcattttatttatttatttatttatttatttatttatttatttatttgctacattttaaaatgtagatgccacaattaaagaagttttccaagaaggaaagatttggacattcaaggtatacatagtggctgattatgaaacactaactgattgaacttaaactaaaataactccagcttttagcgtagccttgaatgcttaataaaatttttgttaaaaataatccaacagcattgcactgttcttccaaaaaagaggaagaaaattcagtaaccactctactttgccagatttgagaaagcacagaaatttgattcttagttagttatattggtatagatgtattattaaaaacaaaaggaactaaatgttaaactcaataattatgtccttggtaaaattggtgtctaagatgtggcaaatacagaataaataataggacgagaggcagtgtcactgtggataaataggaaagccatgaagtaatagaggatcaaatatgaaggataatacaagcaacaagaaaatattggatgaagaaaaaacagacaaggaatatctgtgtatagacattgtacatgtaaaatgtactatttgccattcatttggatgaaactggaaatactgaataaaattgagagatttactaagttaagaccagatagctcaatagtggtaataatagtagtaataggaaagttgggttagttgcagttattctagtataagagatatagatgaggtttttctttcatctgcctaattgttatttgtacatattaagctctgatttgagcacagctcatggacattattttttgaccagtggttctcaaagtgtggtccccacatcatcagcattacctggaaatttgtgagcaatgcaaattcttcatttgtttgtttgtttgtttgttttgagacagagacttactctgttgcccaggctggtgtacagtgatgcaatctcggctcactgcaacatctgcatcccagacgtcaagcgattccccagcctcagcttcccgagtagctgggagtacaagcatgagccaccatgcccagctaatttattattattattattattatttttgtttgtagaaatgggttttcgccatgttgtccaggtcggtccggaactcctgagcttaagccatccacccaccttggcctcccaaagtgctgggattacgggcatgagccaccacgcccagccataatattgctatattaagacataataggcccagggcagtggcccaggcctgtcatcccagcactttgggaggctgaggtgggcggatcacctgaggttgggagtttgagaccagcctgaccaacatggagaaaccttgtctctaaaaatacaaaattagccaggcatggtggtgcatgcctgtaaaaacaaaacaaaacaaaaaagacagtaaaaacagataaaaactatatatatttctgaagtggtgatagaaattaagctattcatttcaactcattaaagttatctttaagagttagtcgtctttagttctttttcctggtaacactgtttttaagtaatatctctaacctaaaatgttaaaaagaagaggacattggaaactaaaaagtagtgttcgaattttccataaatgctacatgtagttgggtgaactaaggaagttgaaataataagataggctttacacacacacattttagtgtaagtgaaaaactgagatgaaattagaattatgatgaggtctttccatcagtctgaagtaatgtgtgcatgacatcctttgaaatgtttgacttagacctttcatggaaatgagaatatgcttcattttacagagttaatgatttttaaaaggattttaaaaacaagtagaagtgttttataaatcagaataaactgggtttttttcttttgaaatcaagtttcccttctttttttttttgtttttttttttttttgagacacagtcttgctctgtcccccaggctggaaggcggtggtgtaatctcagctcactgcaacctctacctcctcggttcaagtgattctcctgcctcagcctccttaatagttaggattacaggcacatgccaccatgcccagctaattttttgtatttttagtagcgactttagtagagggtttcgccatgttggccaggcagctctcaaactcctgacttcaagtgatccgcccaccttggcctcccaaagtgctgggattaaaggcatgagccaccgtgcctggctgaaatcaagtttctattagaaaaatggaataatggtaatgtctcgccctgtcacccaagctggagtacagtggcgtgatctcggctcactgcaacctctgcctcccaggttcaagcgattctcctacctcaaccttctgaataggtgggactacaggcgcgcaccactattcccagctaattttttgtatttttagtagagagagggttttttaccatgttagccaggctagtcaggaactcctgacctcatgttatccgccttccttggcctcccaaagtgctgggattacaggtgtgaaccaccatgcccagccagtttctaaggagtgaaagccagtattcatttttcatttcatctctcagagtatgttaatgctaagttttaactattttagaagaaatgtttgtagatagtttctctgtgaccacttccttgatcatacctatgttgccatagctaacaagtatcaccttcccttgttgctgtacctaacaagttatcaccatcctgaattgtatacttatcgtttccaagaaaaatatttttattgtatatgtaatttccaattaaaacatggtatattgtttgaaaattaaataatttctttaaattgcttcactctttcttgatacttattattcagacattatacctataataaaaaattacatcacctgaggtaatttaatttttcttggaaatattatttgatggatttatatttcacatactgactgggatatagggtaattttaagatagccaaaataattggttagttggaaaataagttaaaaaatgatcttgagttgttcatcacctagatgattctggtatgtgttcacctatgccatcttacattcacacacagcttacacatttattttaattaattaacttattcatttctttatttattgagacagggtcttgctctcccaggctggagtgcagtggcttgatctcagctcattgcagtctcaacctccccaactgaagtgattctcctacctcagcctgccaagtagctgggaccacaggcatgcgccagctaatttttgcattttttgtagagacagggtttcactgtgttgcccataacatatatttatttttaacaactccacactgtagacaagggtctacataaaacagagacattaagagtcataagaccagctaggctggtcatcttaccttaaacaaatcagtttatttcattttttaaaacattatttatttatttatgtgtttgtttttaaagtagagacagggtctccccatgttgcccaggctggtgtgaaactgttggcctcaaatggtcctcccactttggcctcccattatgctgatactacaggcatgtgccacagcactaagccaatttatttcattttttgaaaaggagaaataatagtaacagccacctcttagaatggttagatgcaaatgaggtagaatgctttgtagatcttttaaagcactatacagtctgaggctaagagatggaggttaggtcataggataattttgattttttttcttttttaaggcattacttctatattacttaaggaaaagaaaaaagacctatatcattcaaaacaggtatttttaggattttttggacagagtcgcactctgtcacccaggctggaatgcagtggcacggtctcagctcattgcaacttccacctcccaggttcaagtgattcttgtgcttcagcctcctgagtatctgggactacaggtatataccaccacacacatctaatttttgtatttttagtagagacagagttttgccatgttggccaggctggtctcaaacttccggcctcaagcagtatgcccatctcggcctccaaaagtgctgggattacagacgtgagccactgcacctggccagttttaggatttttattttcaactttaagagtatgaaatcttttcagatctttacaatgaatggccatgcaatagggtgagaaataggttatacactataagttataggaactaggcctttggctagtttttttttttttttaagtactactgtactaaacatttttattaattttcatttgaaaaacagaaaatatcttaaatcctttcccacacccacaggtgttgttataattgatgatcatcctgaagtaacagtaattgaagatccccagtcaaatttgaatgatgatggttttactgaagtggtatccaaaaaacaacaaaaacgtttacaggatgaagaacgccgaaagaaggaagaacaagtcatacaggtttaaatcttgtttcaacttgttgctagttatctagatttgttgcccaaagtgtatcagcaaatgttcaaggtttttatacttgtcaaggctgttttcattattcacgtgttaaaagtgacatcatcttcccaacttttaatcattttgaccagaatcaaaggaaattttaaataaaatataaggactgtagctccttatattttgacttacagcaaagaccatcttttttttttttttaaatactgtaagttctagggtacatgtgcacaacatgcaggtttgttacatatgtatacatgtgctatgttggtgtgctgcacccattaactcatcgtttacactaggtatttctcctaatgctatccctcccccctccccccatcccacaacaggcccaggtgtgtgatgttccctgccctgtgtgcaagtgttctcgttgttcagttcctacctatgagtgagaacatgaggtgtttggttttctgtccttgcaatagtttgctcagaatgatggtttccagcttcatccatgtccctgcaaaggacatgaactcatccttttttatggctgcatagtattccatggtgtatatgtgccacattttcttaatccagtctatcattgatggacatttggattggttccaagtctttgctattgtgaatagtgccacgataaatatacgtgtgcatgtgtctttatagtagcatgatttataatcctttgggtatatacccagtaatgggatcgctggggcaaatggtatgtctagttctagatccttgaggaatcaccacactgtcttccacaatggttgaactagtttacactcccaccagcagtgtaaaagcattcctatttctccacatcctctccagcacctgttgtttcctggctttttaataattgccattctaactggtgtgagatggtatcttattgtggttttgatttgcatttctctgaccagtgatgatgatcattttttcatgtgtctgctggctgcgtatatgtcttcttttgaaaagtgtctgttcatatcctttgcccactttttgatggggttgtttgattttttcttgtaaatttaagttcattgtagattctggatattagccctttgtcagatgagtagattgcaaaaattttctcccattctgtaggttgcctgttcactctgatggtagtttcttttgctgtgcagaagctctttagtttaattagatcccttttgtctgttttggcttttgttgccattgcttttggtattttagtcaccaagtcctttcccatgcctatatcctgaatggtatggcctaggttttcttctagggtttttatggttttaggtctaacatttaagtctttaatccatcttgaattagtttttgtataaggtgtaaggaagggatccagtttcagctttctacatatggctagccagttttcccagcaccatttattaaatagggaatcctttctccatttcttgtttttgtcaggtttgccaaaaatcagatggttgtagatgggtggtgttatttctgaggcctctgttctgttccattggtctgtatctctgttttggtaccagtaccatgctgttttggttactgtagacttgtagtgtagtttgaagtcaggtagcatgatgcctccagctttgttctttttgtttaggattatcttggcaatgcgggctcttttttggttccatatgaactttaaagtagttttttccaattctgtgaagaaagtcattggtagcttgatggagatggcattgaatctgtaaattaccttgggcagtatggccatttttacgatactgattctttctatccatgagcatggaatgtttttccatttgtttgtgttctcttttattttgttgagcagtggtttctagttcttcttgaagaggtccttcacatcccttgtaagttggattcctaggtattttattctctttgaagcaattgtgaatgggagttcactcatgatttggctctctgtttgtctgttattggtgtataggaatacttgtgatttttgcacattgattttatattctgagactttgctgaagttgtttatcagcttaaggagattttgggctgagacgatggggttttctaaatatacagtcatgtcatctgcaaacagggacaatttgacttcctcttttcctaattgaatatcctttatttctttctcttccctgattgccctagccagaacttccaacactatgctgaataggagtgttaagagagggcatccctgtcttgtgccagttttcaaagagaatgcttccagtttttgcccattcagtgtgatattggctgtgggtttgtcataagtagctcttattattttgagacaagttccattgatacctagtttattgagagtttttagtatgaagtgctattgaattttgtcgaaggccttttctgcatctattgagataatcatgtggtttttgtctttggttctgtttatgtgatggataatgtttattgatttgcatatgttgaatcagccttgcatcctagggatgaagccaagttgatcttggtggataagctttctgatgtgctgctggatttggttgaccagtattttattgaggatttttgcatcaatgttcatcagggatattggtctaaaattctctattttcattgtgtctgccaggttttggtatcaggatgatgctggcctcataaaatgagttagggaggattccctctttttctgttgattggaacagtttcagaaggaatggtaccggctcctctttgtacctctggtagaattcagctctgaatctgtctggccctggactttttttggttggtaggctgttaattattgcctcaatttcagagcctgttactggtctattcagggattcaacttcttcctggtttagtcttgggagggtgtgtgtgtcgaggaatttatccatttcttctagattttccagtttatgtgcatagaggtgtttaaagtattctccaatggtagtttgtatttccgtgggattggtggtgatatcccctttatcattttttattgcgtctatttgattcttctctcttttcttctttattagtcttgctagcggtctgtcaattttattgatcttttcaaaaaaccagctcctagattcattgatttttttttttgaagggtttctttgtgtctctatctccttcagttctgctctgatcttagttatttcttgccttctgctagcttttgaatgtgtttgctcttgcttctctagttgttttaattgtgatgttagggtatcaatttcagatctttcctgctttctcttttgggcacttagtgctataaatttccctctacacactgttttaagtgtgtcccagagattctggtatgttgtgtctttgttctctttggtttcaatgaacatctttatttctaccttcattctgttatttatccagtagtcatttaggagcaggttgttcagtttccatgtagttgtgtggttttgagtgagtttcttaatcctgagttctaatttgattgcactgtggtctgagagacagtttgttgtgatttctgttcttttacatttggtgaggagtgcttacttccaactatttggtcagttttggaataagtgtgatgtgatagtgagaagaatgtatattctgttgatttggggtggagagttctgtagatgtctattaggtctgcttgttgcagagctgagttcaagtcctggatatccttgttaaccttctgtctcattgatctgtctaatattgacaatggggtgttaaagtctcccattagtattgtgtgggagtctaagtctctttgtaggtctctaaggagttgcttaaatgaatatatatgctcctgtattgggtgcatatatatttagaatagttacctcttcttgttgaattgatccctttaccgttatgtaatggtcttctttgtctcttttgatctttgttggtttaaagtctgttttatcagagactaggattgcaacccctgctttttttgttttccatttgcttagtagatcttcctccatccctttgttttgagcctatctctgtctctgtacgtgagatgggtctcctgaatacagcacattgatgagtcttgactctttatccaatttgccagtctgtgtcttttaattggggcatttagcccatttacatttaaggttaatattgttatgtgtgaatttgatcctgtcattatgatgttagctggttgttttgcccgttaattgatgcagtttcttcctagcattgatggtctttacaatttggcatgtttttgcagtgactagtactggttcttgctttccatgtttagtgtcaggagctcttgtaaggcaggcctggtgttgacaaaatctctcagcatttgcttgtctgtaaaggattttatttctccttcacttacgaagcttagtttggctgcatatgaaattctgggttgaaaattcttttctttaagaatgttgaatattggcccccactctcttctggcttatagagtttctgccgagagatcagctgttagtctgatgggcttccctttgagggtaacctgacctttctctctggctgcgcttaatattttttccttcatttcaaccttggtgaatctgacaattatgtgtcttggggttactcttctcgaggagtatctttgtggtgttctccgtgtttcctgaatttgaatgttagcctgccttgctaggttggggaagttctcctggataatatccggaagaatgttttccaacttggttccattctccccgtcactttcaggtacactaatcaaatgtagatttggtcttttcacatagtcccatatttcttggaggctttgttcgtttctttttactcttttttctctaaacttctcttctcgcttcatttcatttatttgatcttcagtcactgatacactttcttccacttgatcgaatcggctactgaagcttgggcatgtgtcacgtagctctcgtgccatggttttcagctccatcaggtcatttaaggtcttttctacactgtttattctagttagccattcgtctaatcttttttcaaggtttttagtttccttgtgatgggtttgaacgtcctcctttagctcagagaagtttgttattaccaaccttctgaagcctacttctatcaacttgtcaaagtcattctctgtctagctttgttccgttgctggcgaggagctgtggtcatttggaggagaagagttgctctggtttttagaattttcaccttttctgctctggtttctccccagctttgtggttttatttacctttggtctttgatgatggtgacctacagatggggttttggtgtggatgtcctttttgttgatgttgatgctattcctttctgtttgttagttttccttctaacagccaggtccctcagctgcaggtctgttggaatttgctggaggtccactgcctgggtatcaccagcagaggctgcagaacagcaaatattgcagaacagcaaatattgctgcctgatccttcctctggaagcctcggtctcccagttaggctacacagggccagggacccacttgaggaggcagtctgtctcttctcagagctcaaacaccttgctgggagaaccactgccctcttcagagcagtcagacagggacttttaagtttgcagaagtttctgctgccttttgttcagctatgccctgcccccagagcatacagagtctacagagtcaggcaggcctcattgaactgcggtgggctccccgcagttcaagcttcccagttgctttgtttacctactcaagcttcagcaatggtggacaccactcccccagccaggctgccaccttgcagtttgatctcggactgctgcgctagcagtgagcaaggctctatgggcgtgggacctgccgagccaggcgtgggatataatctcctggtgtgccgtttgctaagaccgttggaaaagtgcagtattagggcgggagtcccgattttccaggtacagtctgtcatgacttcccttggctaggaaagagaaatccccccaccccttgtgcttcctgggtgaggcaatgccctgccctgctttggctcaccctccgtgggctgcacccactgtccaaccagtcccagtgagatgaaccaggtatctcatttggaagtgcagaaatcacccgtcttctgcgtcaatcacactgggagctgcagactggagctgttcctattcagctgtcttggaatggcaacgactacttcctcaagaccatctttactttaacaacatatcgtatgctagggacaccttatttgccccaaggcaaagttgagttgattttaaattatcttggaaagctaatgaacacaaatatcacgaaccagtagattttggattcctggcctacaaaagtatctattgtaatttatattagttcatttaaatacacagaatgaatcaaggtaaattattcatttaattgcctataacctttggaaccaaattttcagaagtcatttatttagaaaggtaaaatagttgtgcatctaccctatatcataacgtaccagccacactgcccaaattaatgcctgtggcaaatatatgagttaagactgtgagtagcattttgttagctcaggtaagttttgctgccagtgaatttactgcaaaatttcttagttcttgaatttcagaattatgtacctgtatgtcaagaatgtacaatacctatttgtcttttgtctcaatatcattttggcttctcatcattcaaaatcttattagcaaccctgacattttgtggtttgagtacctattttgaaaagtaaaggagccaagttagtgggagttgttaaaagttgcatttatgaactgttgcattcagctgcattattgacaaaaatggtccccgttaattttttaaggtctggaacaaaaagaatgcaaatgaaaaaggaagaagccagacttctaagcttcctccaagatttgccaaaaaacaggctacagggatccagcaagcacagtcttcagcctcagttccacctctagcttcggctccacttccaccttcaacctcagcttcagttccagcctcaacctcagctccacttccggcaaccttaactccagttccagcctcaacctcagctccggttccagcctcaactttagctccagttctggcctcaacctcagctccagttccagcctcacccttagctccagtttcagcctcagcctcagtctcagcttcagttccagcctctacttcagctgcagctataacctcttcttcagctccagcctcagccccagctccaacccccatccttgcctcagtttcaaccccagcttctgtcaccattcttgcctcagcctcaattcccattcttgcttcagccctagcatcaacttcagctccaacgccagccccagcagcctcttccccagctgccccagtcatcacagcaccaactatcccagcctcagccccaactgcctcagtcccacttgcccctgcctcagcttcagccccagccccagcccctaccccagtctcagccccaaatcctgccccacctgccccagcccagactcaggcacagacccacaaaccagtccagaatccactacagactacatctcagtcttcaaaacaaccaccaccatcaattaggctgccttcagctcaaacacctaatggcacagattatgtagcctcaggaaaatccatccagaccccacagtcacatggcactctgacagctgaattatgggataacaaggtggccccaccagctgtgctgaatgatatctctaagaaatgtaagttgcaaaagagaagtgaggggtggggaatggcatgggaatactgaggtttcttttcaattttatttatatactctttaagtgttttctagccatctcattttttattgtaggaaaaagtaatagtaatcctctcaactttcttaaaatttttgttttaagcatgtttaacaagcatattatattttatggaaataattttgtgttgatgagaaaataataggcaatgtttggggggggacttgtacatgcatatctcatttgattacagtttgtggacactgcatttttaaaaattaaaagttcatggtaactgtgtcaagcaagtcttctggtgtcatttttccaacagcatgtggtcatttcatgttctgtgtcacattttggtcattcttgcaatatgtcaaatttttcatcatttatctgttatggtggtcagttatctttgatattgtaattgtttcagggtaccatgaacacccaaataagatagtgaacttaattgataaatgttttgtgtgttctgaccactccattgatcagctgttccctgatatctacctctcctggacctccctattctttaagaacacaacaatgttgaaattaggccgattaataactctctggtggcttctaagtgttcaagtggatggaagagtcacgtacgtctcactttaaatcaaaagctgggaacgactaagcttattgaagaaggcatggtaaaagccaagataggtcaaaagttaagtgctacttcagtaatcaacactaatgataagaaagtaaaacagtcttattgctgatacaaagttatagtggtctggatagcaggtcaatccagacacaacattcccttaacccaaagcctaatccaaagcaagtgttctatctctattcaattctgtgatgcctgagagaggtgaggcagctgccaaagaaaagtttgaacctagcagtggttggttcaggaagtttaaggaaagcaaccacctctatcacattaaagtgcaaggcaaagcagcaagttatccagaagatccaaaactgagataatggatgaaggtggctacattaaataataaatttttaacgtagatgaagcagccttctgttggaaggagatgccatctaggcctttcatggctagagagaagtcaatgcctgacttaaaaggacaggctaactctcttgttaggggctaatgtatctgatgacttgaagctgaagcccctgctcatttaccatgtttgaaatcctagagcccttaaaaattatgctaaatctgttctgcctgtactctagaaatggaacaacaaagcctagatgacatcacatctgtttacaaaatggcataccaagttttttttttttttttttttttttttttgagacagtttcactcttgtcacctaggctggagtgcagtggctcaatctcagctcactgcaacctccgcctcccggattcaagcaattcccctgcctcagcctcctgagtatctgggactacaggcacacgtcaccatgcctggctaattttgtatttttcatagagacggggttttgccatgttggccaggctggtctcgaacccctgacttcaggtgatccacccacctcggcctcccaaagtgctgggattacaggtgtgagccaccatgcctggcccatacctattatttttaagcccactgttgagacctactgctcagggggaaaaatgctcaaaagctttccttcaaaatataagcttgttgacagggcacctagtcaccctagagttgtgatgaagatatacaggaagatttatgttgttttcatgccttccaacatggcatccattctgcagcccatggatcaaggagtattttgactttcaagacttgttatttaagaaatacattttctaaggctgcaacctccatacacagtgattcttctgatggatctgggcaaagaaatttgaaaaccatgtggaaaggatttaccattctagactcctttaagaacattagtgattcatgggaggatgtcagaatatcaacattaacaggggtttggaagaagttgattgtaaccctcatggatgacttggaggaattcaagacatcagtggaggaaataactctgacgcaaagaaagttgttttttgtgatggaatctcctggtgaagatgctgtggacattgttgaaatgacagcaaaggatctagaatattacataaacttagttgattaaacaatgggatttgactccagttttgaaagaagttctaccatatgggtaaacagtatcacatgctacagagaattcatgaaaggaatagtcagttgatgttacagacttcattgttgtcttattttaagtaactgccacagccatgctagctttcagcaaacaccatcctagtcagttagcagccatcaacatctccactggcaagattccaccagcaaaaaaagtacaattcaaaggctaagatgatgattagcttcctttttagcggtagtttttttaaaattaaaaagtatacatcttttttaagacatgatgctattacctattagactgtagtataatgtaaacataacttttgatatgcacttggaaaccagaaaattagtgtgatttgctttattgcaatacttgctttattgcagtggtctggaactgaacccacaatgtttctggggtatgcctgtatgttgatacataataatctttgtaagtctgatttgaaaagtgattgttttattccctggctagtaatagctacacagtaggagattaaggaaagggttaaatgggttagagattattagactctaaatcttaatcatgttttttatggcttcttctttccagtaggtcccattagtccaccacagccaccttcagtcagtgcatggaataagcccttaacatcgtttggatcagctccttcatcagaggtaagaataggcttttaacagcataggtgtgctggattttccctaatacttcagtgtggccgggtgtggtggcttacacctgtaatcctagcgtggtgggagggttacttgagtccgggagtttgagaccagcctgggcaacatagtgagacccgcctgggcaatgtaggaagaccctgtctctacatacagaataaaaaatagccagttgtggtggcatgtgcttgtagtctcagctactctggagctgaggttggactgtcacttgagcctgggaggtcaaggctacagtaaagtcataactgtgccactgtactccagcctaggtgatagagcaagaccccacctggaaagcaaaacaatgcttatagcatgcctcagaattaacttggagggcaattaaaacagattgctgagccccatgtccatagttcatgacttattaggtctgggttgaggtttgaataaatgctaacaatttcccaagtgatactcttgctgctacatctttacatttataaggtgtgtctcacttttagacattaaacacttattttcaatttagtctcaagaaagatcttaatgaaacagaaaataaaagtgcaattattgttttctggacttttctcccatgtttctatcttgaggacttaagtagtataagtatttagaaactgtttatagcagatagttattctaacataatttctcaaatgtgatattggtaaatgactgttgggggtcagtgattcttcattcattcattgaatgaacatttactaagcactcacagtattctaggtagtgttctaacctgcgggcttacaaaactgggactaaaaacagtcaaaaagccctactgtcatgggacttccattgtcctgtgaggagaaaccactaataaaaaaacatcgtgatcagcactgtggagaaaaacgaagcaggaaaggtacataaggaattttccaaggttcacaaagacagtttaatatagggtgaccacgaaagcctacttagataatgcttgagttaaagacttgaaggatataagagagtatgctattcaaatgtctgaggaaaagagattccaggttcagataatagcaaatatgaatgccatgagacaggagcacacttggtttgtttgaggaagttcagggaagtccatgtagctggaatgaagtaagagatggaaagagaatagatgaagttggaagtcacacctgagtagcaggtggatcctgtagggcctatggaagaggtgggaagacactgaagggttttgagcaaggagcaacaggatctgacttttcaaattattctgggttgtctgtgaaaaataattcataggtggcaagagtagaagttacgatattacaataattgaatgatgatagcttaaaacctgggaagtggcatgaaaggtcatgagaaatagttggtttctgagtattttgaagattgagctgacaagatttactaaagtgttaaatggagtatgagaagggacagaggagtcaaagttagctccaaagtttttgggttgaacagtaggaaatactagaattttcagtaactgagattggacagtttttgacatgttagatttaagatgcttattatgcctctgagtggaaatgtagttggatatgagtctgtagttcagaagagttcatctagtttgaagataatgaatttgaagtcattagcatatagatgatgtttaaagtgatggaatggtataaggttaccaagggagaatgagagtagttaggaaagagaatcaaaaattaagtcttggggctttctgactccaggaaatgtaggaattagagaagctaagtgattagagaagtatcctaaaagtcaagtgaaagataagttcaaagaagggatagattaagtgtgtcagatggctgctggtaggtcaagtaatataggtgttcaattgatagagttacatgatggtcactgatgactttgataagaacattattggtggagtagtagggatgaaagcctggatgaaagagtgagtttaagaggaaatgaaaggaaagatgagtaccattttctctccacatctgtagagattggttctcaccaccatagaaaccaaaacccagggatgctcaagtctcatataaaatgaagcagtatttgcatgtaacctatgcataacctccctgtgtactttaaatcatctctagattaattatatacctaatacaatgtaaatgctatgtaaattgttgttataccatattatttagggaataatgacaagaaagaacagtctgttcttgtatagcactgacaaccatttataatttttttctgaatattttccatccatactgggttgaatctacagatgtggaacctgcaaataaggagagccaactgtataaagaacttgaacgtcattttgctataaaggagtacagaaaaaaatggggcagtaaagaagatatagttgagattttaatttttgtatagcctataggtgctaaaagatttttttttctttaaagaagtcttcctgctacttctgtctccactccagttttctgacttagtaggtctagagtaggcttcatcatctgttttgatgttacagattcttcagagaactctaaaactcaagagtcactgcattcaatatttaagagtctcagtttaataatttttcctttgcctgttggtattagcatcatgattagtcatagagagcatttcaggatttttcatgctggtatgaaggaaagagtggaagtttgtttcccaaccgcaagatttttcttgcaggcattctacaagtttacagtgataaatgggtgtttacgcttaccttcagtcagtggtggagcaagatattttattggtgtctcatttttctctcatacctttttcttcattgtctttgtgttctttatgttttctggatggaagatgattttttgtgaatgtcatacattattttggagtttttcctcatgaagaaattttgtattagcaaagttgacatttcataggatggaaagaattccctaatggactttttcttagattattctagtgaaatagaactcttaatgattattttacttaaagttatcaacgttagttacaccaactagccttacaaagacttgatattataatattgtctaagcttttatcattctttgtgttatgtatatttcataaacactttcatttcaaaggatataacattctctaacagtcattaacttgacagttatttttctactcatttaaatatgtacaagttcttaacatttttgtatatacagttaatagccttcacagtctacttactgcattattttcttttctaatactactgtacacttacatttaactgactgtagaatttcaacattgactaaagcaaagaaatttttattctaatgtgcatcagtattttccaatacattcatgctttgcttaacaacagagatacgtcctgagaaatgggtcattgtgtgaacatcatagagtctacttacacaaacctagatggtatagcctatggcttctaggctacaaacctatacagcttattactacactgaataccgtaggcagttgtaacacaatgataagtatttgtgtttctaagcatagaaaaggtacagtaaaaatacgatattataattttatggaaccacccttgtatatgtggtccatcattggctaaacatcaccattatatggcacatgactgtatttgaaggtgactatttaaatattaaaagtaaatctgaattgcatgcgttgttcatactcttgacattatatccgggtagatataacattaaccttatgtagtaattgaccatgctaggtttaggaatgccaaaaatgacatggagtagtgattcaattattaaaacaagctttagttgaattttgaccctagttttgctttttatgtttgtcttttcatgaaaagattaattgttgtaacaaagccctaggtcacctaatctgcttgtctgtttctacaactgttccccatacctgctatgcttcagcctcactgacctttttttgttcttgacctttaccctaggtatgtggtctccctaaactctttccactgatcttgtcttctagattcaatgtcagtgtgtcctcctcaggggctttctctgtctaccagtctagtagctggtctcttaaccctattttgcttttgcagattccttatctgacttttcagttctttatttgcttcacctgctagaatgcaaattgtgcaattagactgattagcacatctgattagcacaaagaagatgctcaacaaattagctgggttggtttgtttgtttttgagacaggtctcgctttgtcacccaggctggagtgcagtggcgcaacctaggctcactgcaacgtccacctcccgggttcaagcgattctcctgcatcagcctcctgagtagctgcgattacaggcacatgccaccaagccctgctagtttttgtatttttagtagagacagagtttcaccatgttggtcaggctggtctcaaactcctgacctcatcatccgcccacctaggcctcccagagtgctgggattacaggcatgagccaccatacccggcccaaattaactgtttaattggtggattgattgcttagatgtttgctctatgttaccaatcacaaagtttttattatatttcttaaatttcattttcaaagcagacttctgagaagcaggtgacacttattactgtcttttatttccagtgtattcatctgtttgttggtagtggtgtctttgtgtgttgcttttacgtttgttttaaatgaggaaacaacttgaagctgtgctttgcccatgatcacactcatgagagccaggactttaaaaacttaagtcttgtgctagtttcatcttatcagttgttttctagtacagacaaacaacagttaagagaaaattatcctaaaatataattaatgtcggtctcagttaatatgtagattgtcttaaaccttctattgtacttaaactgtatagtgcttcataaatcagtcacatctgaactatactttgcaagcaagttttaaaatattcttttactagggagcgaagaatggtcaagaaagtggactcgaaattggaactgacacaattcagtttggtgctccagcctcaaatggaaatgaaaatgaagttgttcctgtgctttcggaaaaatctgctgacaaaatacctgaacctaaagaacagcggcagaagcagccacgagcaggacctatcaaagcccagaaggtaaatatactttataatccagataaaattttatgaaggccactgacatgaagagcaaataatacttttaaaagtgaacttaattttaatgaatatctttgatcatggtgcaatgatgaaagatactcatctatcataaacatagttttatcataaacatttgactttagcttccagatttgagtccagtagaaaacaaagaacacaaacctggtcccattggaaaggaacgttcattaaaaaatagaaaagtaaaagatgcccaacaggtggagccagaaggacaagagaaaccaagcccagctacagtcagaagcacagatcctgtcacgacaaaggagactaaagcagtctcagaaatgtctactgaaataggaacaatgatctcggtatcatctgcagaatatggtactaatgcaaaggtaagccacatgtagggattaccagttcaacagatgcaagccatgtctaaaatgaacgagaagaacagcaacagtctgcttttttttttcctgctgaggcatataactctatagattatttccgcaaagaagattttgtttcatgatttgcatatgtaatctaaagaagttctttatagcaaattatatttctttttgaggaaatttactctgaattctggactatttgagtagcttaaagtgaaaaacatctatacaaaatctgaatactttgaaagatggctctatatcacttttaatataaatagaattacagtagagctttatcttgcccactggtgacattctaaagtcaggaaataaggcagacttttactaactccagtatagccagttttttttcatagttggaacagattactgtttctttggttgaacactggaggctgttgactcacatttaggggccacattgaatgaaacgtgtatctaaaaatgctcattaagacaagatatgttgattgaccatgggaacagacactcatgggaatagcaaacatatctgcgattttatattgactctgggacataaactctgagaaaaagttacatgcaattttttatattatctgaatattagtctctttttaattgccatacagctgaattcatataagtaatagcttatgtggtcctactctgccatatttcaaaatgagatttgtgacaggaaacaaggagtgtaccctaaaacctgagtaattgcaacaactaagatcttggtaattgatagtaagctaagaatgaatgtgggaaacacacaaaagattcttttaataacctacagaaataaatatttggtactgttgacagtctcctagtactaaatgtacaagaatgcagtagtagttgaaatgctatcattttgatcgtgagtccatgttgtattattccattgttagttgattgagtgagttgagtcttaaagtctgctctcttcccctgctttcttccagaacaactttacaactattaggctatcattagaaagtgagcaatttggccaggcgtggtggctcatgccagtaatctcagcactttggtgggctgaggcaggcagatcacttaaggccaggagttcgagaccagcctggccaacatggtgaaaccccatctctactaaaaatacaaaaattaatgtcatggtggcgcacgcctgtaatcccagctacttcagtgactcaggcacaagaatcacttgagcctggaaggcagaggttgcagtgagctgagatcatgccactgcactccagcctgcatgatagcgagactcaaaaaaaagaggaagaagtgagcaattaattcagtttaaaatgtattttttttctattactacttcacaggagtctgtaacagactatactacaccctcttcttctttgcctaacaccgtggctactaataatacaaagatggaggatactttggttaataatgtaagtaatcagtttgagatgtggcaagtttggattggaacctggctattattatcaagcacattatttcatgttttatttactgtagtgatcaatatttaactcagggaaagagttgatagtaaatttgtgtttaggagtactgtaatataattagcaaaaatagtcaaagctgagttttttatttttcctctgaaagccatctgctttccatttaagatgaaggtttgtggtgcgtaggcttggtttcgtgtaaatactaatcttattaacctggtattggtaagaagttgttttagctctcacatttacaaatttaacatgaacggttggtgattttgttcttacataaaacctttttataattcagtgaaacccaacttatttaagataactaaaattagaattaaaagacaactatagaattcccaaagaatcaagtatgtctttaaaaaagaaaaaataccagcgtgttaacaacattcttgttgtgtagattgagctatattgtattgtatacataagtacgccaaacactctgatatgctctaatataaggtgatgttaagtcatgttgtaacttaggacctagttttccagagcaaccatgttactaatataattcaaggttgtgttaaaagtctgtacagttcatcattttgcttagctcactgtctgatagatgaaaaattgttagcccagaaacattaggtagcttgccatagttatacagtgtcatttatttagaagaacattttaaaagttacttgcatggtccttattttggagagaggtatgatggaaatttggttagtgctctctgttttaaatatagccttctgtaataagtaaaggctatcagactaaaatgttgatcatcctttttttaaaaaaatcctttacagataaatatttaaaggtctgtcacaaagagctttctttaactatcattttgagttataaaaatctttattatcttcttactttttttctatgctttctattcttccctctagcatcaagtatatggaattttagaaaggtgagctgcattaggggtcacttaatccaatttttgtagttcagctgaaggactgtactaaatatgtagctgagaaaaggaatagaaaggagtgagtcacatattttttcttggtgttgagagctctctaggagctgattaatgtgatttgttcaactttcctcccacccaccccccacttttatgaaagtggtttaaatatatatatatatatatggttttttttttctttttttaactccttatacctcctgtgaaaaataatggaagacttgggaaggaggaaaagacttcctttcagtttaagtgctgtgatatcactgtctagattatgaaatattcaatcagtaagatctcaataaagtttaattatactttgtgtcttttctcatttttaaaaaatacagaatatttctacgatagtggtttttaaagtatatgatgctttttgcgaaactaccctctgaaaatatgatttataaaatatataaaataaggaagaaaaaattattattctcagaacccttaaaattcattgaaaatatccagatgagcattttgatggtttctgtgtgatctataaggctaattaatggagcgacttatatactggtaactactggagacaacagacccagcctcatatataggtgaatagtctgcatgcagttgttagcagtgtagccagggtatgtttgaaagcagaaagatcagtttgggttagggagcattataaatggtcatcagtttgaaaggatttcatggtgttgcttacttgtgccaagtgtgttggtgattctgaactcaatgtagagttaaaaacaaatgtccttcatgggaaaaaatttaggacctcttgagatgtccttttttctttcacttgtctgtttgggggttccattttctacatagaacttttgtctttcttaattatacttgaaaatggcttatttctcttattggggcttaatacacttttttatggtcttaactgatacatgttggttagtattactcagtagtacaatcatcttgtatcttgaatgtcttgaagattaaatgcaggtggccttttggattatcatagcacagctgctttcaacatgtatgaaagaatctccattaggtagtccatagtatcacaaagtgattatcttaaaactctcaagcatcccagttatttttcctgaacaactgaacgaaccatccaaaacgtaatacataataaagtcccaagatccagagataaaggcagtgagtttctaatatcttaaagtttctaacaatatttgccataattattactatagcagaacagttttattgtaatgagatggtgctaacagtccatactttcttcccaagattacttttgttcttgaatcttgttataaaagttaaccatattgcaggaaagagattaattttttatatttttgctgtcatgttaaatacttctggtggaacctgtagatatatggtgaaggttttattccttagagctttgctacacagtatgcagcctgtagaccagcaccatcagcatcacctggcaacttgtttgaaacccagcatttcaggccttaacatagaccaattgaatcaaaatctgctttttatcagcatcctcaggtgatttatgtacatattaaaatatgagaagcactgccttctgagtatacaccttatatctggtgcagactctctttctgccaacttaacgtataaaaaggcagataataatttcccttcagaagttttatctgaggtatccttaattaccaactactataaacacaatgtgactcttaagtaatcacatatttctgttagctctgatgaaaaataaacactacccttagaacaccttagcattgtctttaatggggctttcgtagtagacacatagttagattgtgatatgtgttgcctaccttttcaggtgcccctgcccaacacccttcccctccctaagagggagactatacaacagagctccagcctaacttcagttcctcccactactttcagcctcaccttcaaggtatgtacaacatccatctctaagagtccttaattgttgcatgcaaggggacataagttaacaatattcgtggggtatttttactagatttatgtggtaagcaacaatactaagctgaggaaatagagtgctgtcaaattataccttacagttttattagcttctgataccactaagtggtgacgtgatatcctcatatttaaagtgaggcctattatgcttgtgaattttgtcttaaaaatacaggagagtatttttccatgtttgtgttaagttcctcccagagatcttaataatttttggatatatgggtttgtatacaaaaaataaaatcttaattatttcatgtttttatgattgttaccaaaatattaagtactgataatagtaagaatgttgtttgtcttccctgtaagttatgtgtgaattgaatgaacactgtatgattattttatgggaagataattgacaagtatgctttatagatgatgtcagaagattttcagttgattttttttggataattatttaataagaggacaaaagagattcagcgctttttgatgtcaaaatgttttggcctttttttttaatctattataattttgagctatgttaatgattttttacagttgtgttgtttgagagtattttaaatcagttcgtctttggagtagtcagtagtttaaaaaagtgcaaacatggaattaaaggaggttttttttaatttaaaaaaaaattttttttaaatagagatggggttttgccatgttgcccaggttggttttgaactctgggctccagcgatccacctgcctcagcctcccaaagtattggaattacaggtgggaaccaccacacctggccaagggaagattttttttaagtctatttatctcattgatgttctttgttcataatccagggaagttcttaatctctaatatagtagggcttcctgatgttgcactggttgacaatctctttgatgatcttcagttggggtcacaggaactttgttgttctacagtgtggccaatattcattttggactcatattacttttgtccccttatcttttcccctgtctgcccaacttctttgtaagaggcttaacaaatataagtttgagatcataaaattttataagacaacagcttctgctttgtgccatccctgtctttgcctagtctttactgccaattcctgttcagccttttctgttgtcttttggcttgaatgactgtcttaatctgtgttccttacttagtcttacttttatggtttttatcattatactagcaaggtaaataatctaatttcacataagcaaatataatgtcatctttaattatttttaagccagtatttatttctttagaatacctattcaactttgcctttcactcatgtttttaacattccaagaagaaatatacacattgagaattaaatttaagtcaaattacattagcttaaaacctctgatttctttatttttacttcctctgccatctcctttttgttggagtaatacataaagcatagaaaagttatattacacagtaaattcttacttattatcagtgggttcatgaaaactgcaactttaagcaaaactgtatgatggatccatagaatagcatcatttggttcagtgccacttgttctaaagtgtatgagaaaaaatattgattatacattgttgggcttagtcacagtttccaagaacctattgacgacattaagtttttatggacatcattgacaaaatatgaaaaaaatgagtatgattaactaattgtacttttagtttcactgaatttccgaaaataaaaacttcaaattatctttctgcttaaggaatggaatcaagtcaaacttgtggcctgtatgttatgtaagtttgattagctataacttaatttatatgttcccagtaaaacaaaattggcataaaagacattgtactctgtcaacttgccgtaaaccacaaaatctcagatggtacaggtaaattatattctagcttacttcctaaattcccccaagacttctattttaaaataaaacacatttgaaatcaaccaagtgattttgagaaaaagaaaagatttcagatttttctcaaatataaaagttctgtattttaaatatctaatgataacaattagtcttaagaaaaggttaaattatgaatagtgtgtttttaaaggaaggcagggtaaaatatgtactatgtctcaaaattctttttttttttttttttttttttgagttggagcctcgttctgtcgcccaggctggagtgcagtggcgctatctcggctcactgcaacctctgcctcccgggttcacgcaattctcctgcctcagcctcccgagtagctggatttacaggcgcacaccacgcccggctaaatttttttgtatttttagtagagacagggtttcactatgttggccagactggtctcgaacttctgacctcgtgatccgcctgcctcagcctctcaaagtgctgggattacaggggtgagccaccgcacccggcctctatttctcaaaattcttataaccaaaataaaattttagaaattgatactttaaggactcacaaagttcctaacagtgatattaaatatgttacttgaaaaagttcctctctcataagtcattgcagctggatcttatagattatgttggatgtatactgcatatgaaattttaatattaaaaaaacttataaaatatcaatttatgttcattagtgttttagttataatattataaatattgggttgaattaaatgttttcaaaataaatatataatctatttgtatttactttttaaaatgtagctactagaaaatttaaaattacatacttgatttgcatttagatatgtatctgttgaaaactactgaatagtgctgctctagattgaaataaggccattttctgccatttaagaaactaggagaagaaaatacagctgaaaccaggggtcataaatgcaaatggttacatctggtggtacatgaaatgcttgagatctggatgtgaaacaaaagcatttctattgcacccaagcctaaaacctatcttgttaccttgccttttaaaacactgtgagcatgaagcagccaaccaaaagatgcctgccatttgccatttaagaagcattggagtaaaaagaaagaatggagagaatggatatttactgggggaaggcctttccttattcactggtagggataagggctcatgtttaaatgatacactctcacactcccaattttagtaatggagcaaagataaagaggcaaatggaaagtctgaaatccctagggtcttagggtcttagattttctttaaatatctttgtgtgtgtgtggtttttgaaagattatatttggcacttaaatactgatacatgtatatacatacgtatattctgtattaacatcatttttttactataaaatgtccgttttattgcagatggagtctgcacgcaaagcatgggagaattctccaaatgtaagggaaaaggggtctccagtaacttccacagcacctccaattgcaactggagtcagcagtagtgccagtggaccaagcactgctaattacaattcgttctcaagtgcatccatgccccagattcctgttgcttcagtcactcctacagcatcactatcaggtagaactttttcgttctgtttctttaaatatcttacattatttaaaattttttatgatctcttcttgtttactatctctagccctccgaaaatagtaatattcaatcttcccacctcagcctcccaaagtgctgggattacaggcatgagccaccacatgtggccagtaattgctttttaaaatgtcattttcctctaaatttttctaggaagttcaccttttgattgtcattttttatgtatgtacaactaactagatcagctcaaaaagaacagagaatcacacctcttttaaatgtttgacaatctgtatctaatttgaaggtgctgttggcctaaacctgttgggataacgtattttctggtaaagacttagggatggagaattttcagcctctgctatttgagtgatgtaattcattggatttggctttagtttggtttggattttgttttattttgttttttaggagagtcctttggtgcccaaagttagaaggtgcttttcttgctctttttccttagattttcttaaatttttactagtgtgtaatcttttcattgaactatctcattatttggagaccttacggttcttaaagaaacacagatgtttccaaaatgcttgactctagaaaagtacacccttttccttttaccatatgtagaaccaagtttcttctgttgaaaaaataaaatttaatttcaagctttctcagtattatctgcttccaaagcagtaggaagctcctttccagtgatataaattactttgtttgactggttctcattcaatattgctttttagtattccagcccaccgtgctatttttaggtaccaaaaagctggtcttaggtttatacaagttattttgatattgtctgtaatcagaagtatatattaacacaaactcccgagattctacgctgcattaacattttaaatcaaactgtgttccaactatatttcttttcactttaaaacccttcctagcattcctccaccactcatttgccaaggcatcttcacttatgtttactagactagcttgagccccagtccactttgggatgggggggttagtgaaggtggtgtaaaggaaacaggagagtatggtaggaagatctggaaataatggttcctagttctttctttggaacccaactaacccgtttccccaggtctagatttcctccactatgcttgactaggataatttttttaacaaggcccttattgcctagtcatcctactggtagatgattcactagaaggatagaagcacttgaattttggtccactctcaggtggaacatcatctgaagataatgacaacttatacattactttttaatcaaataccagtattgacattttgggctagtactaaagtcataatagctcactaatcaataaaacaaattaaccctaacacctaagttttataattctatttacttattaagtagtttatttaatttgttttaaaggtattactatataccaggtggttttgttttgtttttgtttgtttcttggttagttgtttttggagttgtgtggttttttttgttttttaagagttgatgtcttgctctgtcgctcaggctggagtgcagcgatgtcatcactgttcactgcagcctcaaactcctgggttcaagcaatccttccatctcagcctcccaagtagctgcgactacaggcaccaccatgcccaactaattttttaattttgtgtagagacaggatcttacaatgttccccaggctggtcttatactcctggcctcaacatgtgccagtttttgcaggagagagaaatccagccttaagtttatgtgacattttaggaccagttgagatctttcaaggcccatgtatattcataattatttctaaggtatagcacttttctcttttgtgtccttatatctgtggtcataagtgaatgaagctcttgattatatatcctattctttgtgatgattaaaaaacaaatcatttctggctaaactataacagttacataggctctcagcctcattttattaattttgtgttttgtttctttcttgttttgattttctgttgtttattgttccatattttctagtcatatttacatttggtgataattaccttttcttttataagctacctcatctacttttggcctgaagcagtatataagtacgtgatgggtagaaacattaattttgcagtttctggttggtactgtgaacaatagcaacacttttaaatatgctctattttcccctttatttgcttccccaaatataggagctggtacatacactacctcttctttgagcacaaaatctacaaccacatcggaccctccaaatatttgtaaagtgaaacctcagcagttacagacaagcagcctgccttctgcaagtcatttttcacagttaagctgtatgccttcccttattgcccagcagcaacagaatccgcaagtttatgtgtctcagtctgcagcaggtaatgtttttaggcttgaatataaggaatttagaaaatgaagacttactaaaatgcttatttttgtctcttcttaccctttcagctaagcataaggctcttaaagtacattgctgtaaatatttaaattcgcattttttttttttttttttttttttgagatggtgtctggctctgttgcccaggctggattgcagtgacgcggtcttggcttactgccacctccacctcccaggttcaagtgatcctctcacctcagcctcccaagtagctggggccacaggagcacaccaccacacccagctaatttttcttttttttttttttttttgcatttttggtagagacgggttttaccgtgttgcccaggctggcctcgaactcctgagctcaagtgatcctcctgcctcagcctcccaaagtgctggaattataggcatgagccacctcacccagcctaaattggcataattctttttaaaagtgtcttggaaaatataagtgtacatacttactgtagtaacagtttcataactaggaatctcatatggatacatttaagctattagagattaagtaagggtattcattgcagtattatttctaataatgacaagttaaaaacaatatataggctgggtgtggtggctcatacctataatcccagcactttgagaggccaaggcagaaggattacttgaccctaggagttcaagaccaacccgagcaacatagtgagacccatctctacaaaaaattttaaacattagctggatgtggtggcacatgcctctagttccagctacttgggaggctgaggtgagagaatcatttgaacccaggtgataatcatgccactgcactccagcctggcggagtgaggccctgtctcgtcgtaataatatgtggagttctgcagaacatactactatataaaaacagcgagtcagctaggcaccgtggctcacgcctgtaatcccagcactttgggaggctgaggcgggcagatcagttgaggccagcagttcaagacccacctggccaacatggtgaaaccacgtctctactaaaaatacaaaaattggttgggcgtggtggcgcacactcagctgctcaggtagctgaggcacaagaatcgcttgaacccgggaggtggaggttgcagtgagctgggatcaatcgtgccactgcacttcagcctgggtgacaaagcgagactgtattcaaaacaaaaaacaaaaacaaaaaaaaacagcaagtcaccaaatattatgtatcatacatagaaatgtgtttaaaatttataccaaacttttaaaattaaatgtcaatcctctaaatattttgctagattctagtaggtaggtttaaaattggagtagaattgctggttcaatgggtagattcattttcaattttagtagattatgtgaaattttaccactgacaaaatctgcgtatctataccccattggcggtatataaatttttttttcatgccttcacaagtactagttatgtttgtgtgtacctgtctactagaagttttccatcttttcacatttgcatcttgtcacgtttttagtttttccatggctgtattttcagagggtgcacttaatttggaatctgctacaaaacttggtttttatttactgtttggaaaattctgaaattaggacacttactactgcttgtttatcctgatggtctacagctcaaatcccagccttctatatggacacaagtcatttattcaatacccaacatgcacgattggctccgccatccttggctcaacaacagggtttccaaccaggtctctctcaggtaatatcaaagacttcttccatcctgtatttgttccttcgcatttctgtggttataatagttatcttggaacataaataatagactctgaaattacaagctacccacgattagcttgatattctataagcaaaatttaaaatttttcccaaatttaccaaagcttaatagtaataatgtagaataagtagtgggttgaaagggaaatttagatgtttacattcagttttgttttaaaatggagctgatatatagtattaatcttactcttttcatgtctcaaatttttatattccagtgttaatgatttatctgtatgatgttgatatatatgtttacatactttctcaatgcattgcagccaacttcagttcagcagattccaatccctatttatgcaccactgcaagggcagcatcaagcccaactgagtttgggggctggccctgctgtttcccaggctcaggaattgttcagctcctcacttcaaccatataggtaaatgctttaaaagttatgtttgtaatgatgttgaaaacattgtaactgctgatcctccttgccgtaatccatactgttccttcccaaaaaaacctaggatgactctgctataaactacattggctaattgagcatgttgattatatgtcatgaacctcagcctctggtaatttcaaccatatcttattaaagaatgtcaggtttcaaaccctcttgaagtagtgaacaacagcaaccccaaaactgttagaaattatagaaagtagctgctaaagaacctaaaagtatgtgtgccatctggctaccaaaaactataaatctgaatctcctctatgtacgagctgaggcatggcagttaactacatcatgttagggggtgcagggcagggtggaatataacagaacagagaggggtaaatatcaaagcatggaagtaatgatgataaatatgctgtgtagtgaagaaagcattttttccaaaaattcactcagatgcactgtaagttacctttgcaactagggaaataatgaaaactgatttttattgaactttccttatatatgatagatattcagcctttcacatacattaactaaatttagtcttcacacaaccacctaagataagtcaccctcatttaacatgtggatgttaggacttgaagagggtgaggctttttttgttttgttttgttttaacctgaggttatacataaagtggcagaccctcagtgtctctggtttccagtttaatgagggaagaagagtgagtaagagtcagatagtaggagcagtgcatcatggcatagctgtcatccatactcatgatggtggccttaaatcatcataaagaaaaataagttacattcaggacacttagtttaggaaggctgtgcatttgtttttaggaatttgttttcagaagtgggttcagatagaatttctatactttatagattaaacctgtcatcagttaatacagtatgttttatattaccataatgatactcctagagaagccaggttcagctaatgaaactttcttaacagagagcctagtcattagtaaacctcataaatgtggcttttatttttaccttttgattaaagatgctttagtaaaatttaagacacctgtatcattacttatatagctgttgtaggtcttccctcctcattttactctcatttaatttcgttattttctcccgttagaagccccaactagaagctaaaggaagtcttgtattgaatttgggattatcttggaatttatattaaaaataaaacttgaaaatttctgacacaggaatagcagctagatttaatctcacaagccagtctccttgtaaattgtattggctgcttgaaacactgttgaaaagtttgcaaccgcttttcagtactgtgaaaaagagtacagtgattaattagtaatgttttccacaggccgtgggaggtggagtagcaatgtactatatttgtaatccccatttcactaattgtcttggaagatatactttttaagaccagacgtggtcaatagaaataaaatgtaagacacatatataattgtggcacttggctaccacattggaaagtacaggtttagattttgaaagcagttattttatccctaaacattccttgcttgttccttaacctaatcagcatagtgtttattagggaatctctgaattggtttctgcaaagacaggatagtttatagcagtatattcatgttttcttacctcgtgtttgaaacataaattataagtaggtattgtaaagactgctatgatcctagactagcattcttccttagtggcttttgttcctgccacataggtcagttttaacaaagcaacaaagcataatgttctttaacccactacttttgatttaggtgcttattctttatctctgcatcttaaaagtgtagactggaggcatccatctcagagatgatagggaagtctggggttagattctggcatattgtggttttgttttgagggggtgtgttttggcttggtttggttttggtttatgttcttgtttgtttgcttgcttaatcttcatgggtaactctgacatgagctactactgtgctttattccatggagatcttgaggctaggccatttatattaaaaatatatgtggggaagtaatgaaatacaaataagaaaagttggggctattggggctatgaattagaatgttgccaaagagaaaaagagattttgttctgaactttgtagtgaacacaaaaagagaattattctcactgttcaaaaggaaagagcaatccacttcttagggagaacaggccttttcacagaacttttacatgtgaagcttccttgtatacagggctttaaatcttgaaataagttgctttagacacagtctgtattctctgcctcttttcttgatttctgagctaattagagtgcatccaagtatcagtgatggggagacattctgaagtatgcatcctttttcaaacatcatagagtgtacctacaggaacctaggtggcatagcctgcagctatacacctaggctgtagagtacagcctattgtgtctaattaggctataaacccgtgcagcattttactgtacttaatactgtaggcagttgtaacacagtggtaaatatttgtgtctaaacatagaaatctaaacaatctaaacagaaaaggtacaataaaaatatagcatacaagattaaaaatggtacgtaccatgtatagagcacttaccatgaatggagcttgcaggactggcagttgctgtaggtgagtcagtgagtgagtggcgagtgatattactgtacactactgtggactctatactacactgtgggtacactaaatttgttaaaaaaaaaaaaaaacaaatttttcttcaataataaattaacctcaacttactataattttttgactcttataataacatttagcttacaacacaaacacattgtacatctgcacagaagtatttctttttttgtttgtttttttgagacaaggtctgtgtcacccaggctggagtgcagtggcacatacagctcactacctcgaactcctgagctcaagccattgtccagcctcagcttcccaagtagctaggactacaggcacttgctaccatgcccacctaattttttatttttttgtagagatgatgtcttgttctcttgcccaggctggtctcaaattcctggcctcaagcagccctttcacctcagcctctcaaagtgctgggattatgagcatgaacaccatgtctggccttttcttttgtaacgtttttctgttttttaattttttaatttttttttaactttttaaacttttttgttaaaaactaagatgcaaacacacacattaggctaggcctacgcagggctaggatcatcaatatactttcatctacctccacatcctgtcccactgggaggtcttcaggggcagtaacacatacagagctgtcatgtcctatgataacaatgccttcttctggaatacccgctaaaggatctacctgaagctgttttataagttttaagtaaaaagagtacactctaaaataaccagaaaatgtatagtaaatacataaactagtaacataattctttttatcagtatcagatattatgtactgtatgtaactgtatgtactgaactgttaggactgtaggtgtagtaggtttgtttatatttaatactagcaccagcaaaaacacttgagtcatatgttctatgatattagaacagctatgatgtcactaggtgataggaatttttcagcttccttatgatcttatgggaccatcaatatatatgtggtctgttgttgactaaaatgtcatgcagcacatgactgtattgggtcatttgggatttgcattcttaagattttcagattccagatgaaattaacttctaacaatattttctctttaatccttatgtagatctcagccagcttttatgcaaagcagtttatcccagccatctgtggtcctttctggtactgctattcacaactttccaactgtccaacaccaagaacttgccaaggcacaatccggtcttgcctttcagcaaacatcaaatactcagcccattcctatattgtatgaacatcaactggggcaggcatcaggactaggaggttcccagctgattgacacacatcttctccaggtaagtcaggggactagagcaatgcaccctcattgtattcctatgccacagatcattttaaggaaacatttttaaaagaaaacatgttagaagatgcaatgaaaaaaacaaagtcctttcatttatctaatactaaaaattgctagacattgctttgaagtcataatctccacctctgaatttgaaatttttttcagtcttactcatgttttcttaaaaaattttttctaggccagagcaaatcttacccaggcctcaaatctttattctggacaagtacaacagcctggtcagacaaatttttataacactgcccagtcaccaagtgctctccagcaggtaaactatggcatggtaaatttcctcaattttctttattattatttttattgcttttgttattgtttgggaatttaaattgaaccaagatgcaagatggaggatggtttttgaactgttcactgagatgtcctgaagaattccactgggtccacgtagaaggggtttcaggctcatgacacccctcttctcaccaccatcaccccctacttcagtcattcctgtttttttatatcttccaggttttttgttggtttagggggttttgttttgtttttttctgtcacctaggccagagtgcagtggtgtgatcatggctcattgcagcccaacctcccaggctcaagtgatccttgcaccgcagcctcctgtgtagctgggactacaggctcacgccattatgcctggctaatttttcttcgtagtttttgtagagacagggttttgccatgttgccccaggctgatcttgaactactggtttcaagcgatctgcctgcctcggccttccaaagtgttgggattacaggcttgagccaccacacctggctgctttttgttttttgtttttttttaattaagggggaaaaaacaacttaggtttccgtgtaattatttattctattttaacaaaggattcaatgaatataaaaccttgaaaaccattgtccagaatatagttacattaagtgtgatacaggtggtttacccattagtgctagggagaagcctcccaaagaccatctggcaggttagctatacatacaacagtgtggcagactgtgatcgagcataaatgacaaacactttcttaagtgtatgaatgcaataataattttcagtgaaaagtatatggtacgtttaaaactatctctaataatttcattagcttattctttaaaagtggtggagggctggtgggggaacaagtcattagtcattttcttataactgttgttgtttgctattttagggagtgataattcatgaatatcttattgacattcagattaaatatagtgtttatgtgaaaactgagagattcttgttcttctcatagctcattttgaccagccttgaaagtattatgtaaaatgtctgtttggaaacttgtgaatactgcttatattgtgtcctcatttactttgtgattatttgacatgtcctgtggataaattcaaagatagtcctaattctttcagtttctattctcttcactacaagtagcattaactaaactatgttgtacctttaatagaagaatggagatacggttgagggttgagtgtctcttaccgaaatgcttgggaccagaaatgtctcggatttcagattggtttttttttgtgtgtttgcgtatacataatgaggtgtcttggggcgtggggcctgtctaaacatgaaattcctttgtttcatacatactttatacatataacctgaaggtaattttaagcaacattttaaataactttgtgcatgaaacagaagttctgacctcacttcgactgatccgtcgcaggaggtcaggtgttgatttttttttttttttttttttttttttttgagacggagtctccctcacccaggctggagtgcagtggcatgatcttggctcactgcaacctccacctcccaggttcaagtgattctcgtgcctcagcctcccaagtagctgagattacaggcacccaccaccatgcctggctaatttttgtattttattttatttatttatttatttatttttttagtagagacggagtttccccatgttggccaggctggtctcaaacccctgacctcaagtgatctgcctaccttggcctcccaaagtgctgggattataggcgtgagccaccgtgcctggacttggtgtcaaattctctacttgtggtgtcatatcagcctctcagaaagttttggagcattttggattttgattttcagattagagatactcaacttgtcatcactaagcaaaagaaatatgtgaaatatattagtagatggatgtgttctatgtattttattttattttattttattttattttattttattttattttattttgagacagagtctcgctctgtcgccaggctggagtgcagtggcaggatctcggctcactgcaacctccccctcctgggtccaagtgattctcatgcctcagcctcccaagtagctgagactacaggcacatgccaccacatacagctaattttcgtattttttttttttagtagagacagggtttcaccatgttggccaggatggtctcgatctcttgacctcgtgatctgcccgccttggccttccaaagtgctgggattacaggcatgagccactgcacctggccgatgtgttctgtttgaaatcttactcaaaagtatttgaagagttgtgtatagttgtatggatatgtctgtagtaaacagaaacaaattgcttcagtttctctttacttattttctaggttacagtacctttaccagcatcccagctttccttgcctaattttggatctacagggcaacctctaattgctttgcctcagactcttcagcccccattacagcataccactccccaagcacaggctcagagtctgagtcgtcctgcacaagtaagccagcctttcagaggattaattcctgctggaacacagcatagcatgattgcaaccacaggaaaagtaagtaaagagacatttgcacaggttatttgagaatttaaggtagtgtgttcagatatatgcatctgtgttatctaaaaaactaaaatgcgtcagtttttaccaccctgcaaaaatctcaaaccccagtatatttacattttatctatttacttttaatgtgtttggccccatctagtttttacctaataacaaagaattcacaaatttattggaagaattggatttatagtgtctcttgggcttatttaattataagtctgtttggtcaggtaattccataatacttgaagcctaactataggagttttgtactaaggttctttgccctttcctagattacgtcttcacgtataggacatgtaaacacagcacttagcttgtggaattaaagaaatgttaagtttattttatgcttctcctcagatgtctgaaatggaactaaaagcctttggaagtggcattgatataaaaccaggcacacctccaatcgctggtagaagcaccacaccaacatctagtcccttccggtaaaatgggcatttaaatttgcttatgaaattccaatttggtcactatttgttaaatacttatcagtcctgtgtgacataatcccttttccaagcagaaaaggaattattaagacattctttttgatagttttgtctaaaatgttaagcttttaaattatttaaaatgtgtttattgtactatattttaagtaaattcttttgttacagagcaaacctttttttcttttattttttttgagacagagtctcacactgttacccagactagagtgcagtgccatgattatagctcactgcaacctcaaacacctgggctcaagcaagcctcctgcctcagcctcctgagtagctgggactacatacacgtgccaccacacctggctaatttttaaaaaaatattgtccaagctggtctcgaaccagccaatctaactggtaactggtatcctttcttacctctgctcctccaatgtctctcttctaccagaatgttttggtaatcatcatagtaaatttttaccaactaccaagtatgatgaaaataccaagaacggtgtttgcaaaaatctaacagcattatttacttggtattactatactgactagtaatggcttctttccaagggctacttctacaagtccgaacagccagtccagcaaaatgaacagcattgtctaccagaagcagttccagtcagcccctgccactgtgagaatgacacaaccatttcctacacagtttgcaccccaggtgggcagacataattaagaaatgagtattatttacttaaaaatagttgctaatctgataaattattatcttgccttatgttaaccagttaagaagtacagtttttaataaaaaattgtttctgaatttaacaataaatttattttataaagatagtctgcgatttatagccagacatggtaattgtttagttctaaagcagacaagagaaatagttaaaagattccccacacagctctgataatgagtccttttccttttaactttttttaaggagttgacttttcagcgaagggtcccagtgcttgaagttttctaggtttaaagttgttttttgttgttgttaagatatttatgtgcaattgagataaaatttccaaaaagatgttttaatatatgtaaaaaatgttggcttctcttccccttgctgatcgtataaaaggactaagaactctcacaaactagaactggttcctgagaaattcacatttgttgaattagtattgattttatttatcttcagattacatttgttacaggtgtgtgccttttctgcaactaccttttgaaaagatagcctaattaaaagtctttctatccccccttcagaatttacaactgagatgctaggaccaactgaagtgccatagcatgctttgcctagtttttctgttaaactctccaagcatggcctgtttattccttgtccttgttaatggaatggcacaatctgtacacttcctttcactggtaggatgggcacagatttactctgggatgagccaacctggtctagttggcagttttttttttttttttttttttaacagttcaatgttgtatgttttgtttttttcactcagattctctctcagcctaacctggtccctccattggtaagagccccacatactaacaccttcccagcgcctgttcagaggccaccaatggcactggccagtcagatgcctcctccgctgaccacaggcctcatgagccatgctcgtttgccacatgtagccaggggtccttgtggatcactatctggagtcagaggtaatcaggcccaggctgcgttgaaggctgaacaagacatgaaggttagtacagtgttaacagccaacagatcaagaatctgtctctgaaccatgtcttaaaatgcctctggacccataactgtatatccaggcattcattgtcttagcagacttaaccaagctaactacttttattcattcccccttttttttcttttttttcccccattcccattcctttcatcttttttttctttttgtttctttttctttttctttttttttgcaactgtagtcaggaaatgaattaatgtcttaaactgtggccaaatgaattgttatcaaataaatatttgagggagatctgagtttagatgcacacttttttttggaatagcaaagaagtaatatcaattattatagacttccccattttctttctttttttttttttttttaatatatattttcttcccccctttcccctgactctcctcctcccagcagcttaaaatgtaaatcatggttatatgaaaactctggaatgggtaagatgtgttactatcttagtacttttttccattatgagtcatcaaagtacagttttcttctcaaactgttttcatacccttattggcctaccacatgaggtggttgtattccacagtggattgtgcagttatagatgaagaactcagaaaagcactttgggatccttcatgatgaaaggcactgataaacatgaggtttgctaatgcagaaagagtgcctttaggagtctgtgtggggacagttttgtagcataaaccttacatgtctgccagtacagccagttgaatccgtttatttctatatttactttaggcttgactttcagggatcttagtaatttttgcctgttttgtcactacatatgtcatcagatcagactagaacaaagaaaagcttactgctttcaaacagggaaatgtgcatagtaatgctttactctgaattagaaacatgtttatgataatcctattagaaaatttgattgattgattaaagtgtctttttgggtcgacatccctagtgtttctgatcctgagtaatcaaatttaaagactacccagcagcaaaacttttattaaataattatctacttttattaaggctgtatgcctaggatttccatctgtttgttataattagaaataccagtgtgagtaaaaatcttaggaagttatttggccttggattccagttctactcctggctccttggctcttgattttcgcatattcccatgttggaaataacattagagcttaatagtagtaatggggtgggagagggtacaaacttcttgaaaattgcttcagatctttggatagtacaggttacctatagaacataaagcatttttttaatatgcaagaaggatggaaacttaagttttaattgtgaatgttacagtggtaaaatttacagatttgacgtaagtatatttttgggggcacatagtcaaaactaagaaattatttaccagctcagaatgtggtaggagctatcagaacttagtgatcaagtgaagtcgtagttactaatttctgatgctcttcccctgcagaagagagctgtgggaagaggactcagccacaagacatttggtcctaggtgttggtaatgccacaatataagtgcttccttttcattttattgtagaccacatattgataactagaagttttaagtgttacatgtatgtttttagatttgcaagcaggttccctaaataaaatttaatatgagagggcagaccttgaaaaggtggtgggaggtggtcctgtggtttttttttttttttttaaatcacatgaaatatttcaaaaataggaagaaatctattcattaaaagctcaaagatcaatgaggtacttttggctttggccaaaccagtgtggggaaaactgatttgtgattggtaaaagaatttgaaccaagattgatttgacaggctttggtaatgctgcagtattttcagttgttctttctcattttttaaggcaaagcagagagcagaggttcttcagtccacgcaacggttcttctctgaacagcaacagagcaaacagataggaggaggcaaagcccagaaagtggacagtgattcaagtaaacctcctgaaacactgaccgaccctcctggggtctgtcaggaaaaagtagaagaaaagccaccccctgcaccctccatagccaccaaacctgttagaactggaccaatcaaacctcaggcgatcaaaaccgaagaaacaaaatcttaaaggctatggtttattgcaggggattgggaggggggcgggaaaacatggagaattaagtcagataatgctggcagccaaaggggcaaaatggcctgtgacattatcctgttcagagcttggagatgtacaagggacataggagcaatttacactgacacacagctgctgtaccagtgaaaacgaggctttgcaagcttgtacctactatataacatgtgcttggttgatggccatgcatcttcagtcagaatttatatataaatgtatgcacccatttttttgagtgcatataatttagacctaaaaatccttatgattagatgaaacaccaaaaatataaggaaaataacacagcagaggaatagctcagcctgaacagtgtgatggtcccagctactacatcagatgcggtttttttgctcccttatgttcttcggatatggttatggcatttgtaggcttggaggtaaagaactgaagataactggtgctggatagaggagccttattttttattatggcagcttgctatttttataacatggtgattgagttgaacacaatcaaagtacagtagtaactgatgtccccttcttcctggatgaatgagcagataaatattgatgtcagcatccttgaaccatatcaaagtgagcagtgtttggctactgcttctatttgaaatggtgctgtgttttggttgtggtctgaagctttgaagcgctacttagcatctcctttcttccatggagctctcacgattcaaacatgacagatttggtaaaatgctggttaggttgagtcttccttgcccccactcagtcatctttgtatgaatcccatgatttgggggtttttttctttttttttttataccagtttttagctggtgtttatgaagaacagtgagtacctagaactgtgccactaattaaaggaaatcctaagaaggtgcatttctttacagagctgtgtcatgccatcctttgggccctctgctggaaaagtagaatcaagtctcaaataatgcctttttaattgtatcctctagtattatagatataggacagtactgtatcatacctctgtgaatgtaaaatatcttgtacctgctttatgatacgtagtagtgaccgtgctttatcagagctgtttttaatgatgttattctagaatgttttctttccagatgatgattcagaagctaattttaaaaaacggtgccaggtaccacaacagtaacagaactttgcaattttctggggttttgttttttacctttttccccccttttttttaaatggagtgtgctggatgtctctataattttattcagatgactgcagaacctggaaaagctgttgctgctattgatgcataacatactgctattggtctttttatataaatatatatatatatatacatatatatatataatttgaatttttggaaactttagctgtgctgtcaactttggaaaaagtatcccggtttactgtgttgagttggcattgtacagaaattaacagccatattggtctagaaacgttaaacttaatttttttccatttgtacaggggtaacgcactgtattaaatatgtaaggtcttatctacatgggtttgattacagaaactaataaagtattctctaaataatgattcttggagcttataatcatttcctaaaatctgaagcaagagggtttgtcatgtattaaaaatagtggtcaagagtactggccagtcgcagtggctcatgcctgtaatcctagcactttgggaggccgaggcgggtgaattgcctgagctcaggagtacgagaccagcctgggcaacatggtgaaaccccatctctactaaaaatacaaaaaaaaagtacattatacagccgggagcaatggctcatgcctgtaatcctaacactttgggaggccaagggaggtggatcacctgaggtcaggagtttgagaccagcctggccagcatggcaaaaccctgtctctactaaaaatacaaaaattagctggcctggtggcaggtgcctataatcccagctacttgggaagctgaggcaggagaattgcttgaacctggggcgggagtcagaggttgcaatgagccaacatcaagccacttcactccagcctgggcaaaagagtgaaactccgtcttaaaaaaaaaaaaaaaaaattacattatactctagaaaaggattatcatccaaagccttgacttctcactttgaagaactctggagatcattcaactaaagtaactattgtcatggcagatagtcatggcccctgttctgaagtagccaaactcatattgaaaacaaatctgtcagctgggcgtggtggctcatgcctataatcccagcactttgggaggctgaggtgggcggatcacctgagatcaggagttcgagaccagcctggccaacatggtgaagccctgtctctactaaaaatacgaaaataagctgtgcgtggtggtgcatgcctgtagtcccagctacttgtgaggccgaagcaggagatgtcaaggagtaaaattctcttgatgcacagtgccagatgtagaagagtttcaccatcttttggtcagaagctgaaggaccaaaaatagatctcagtattatttatgtttgtatttttcatagctttgttagcatgttcatgaacatcacctgccctaaaaggctatagggcatttattctatcatttactcaatttatgaaatgaaatactgagggattgtaattacttaatcccatgttcagaacatacggcttccagacccagctttgagaaaactagtcatttagtcactaatgacgcatgtgccttcttaactcatggatactgcgattgttaaacacaagatactcaagttttgatggttttgtgttgggtagagacagggtttctccatgttgcccaggctggtcttgaactcctgagctcaagcaatccacctgcctcagcctcccaaagttctgggattacaggcgtgagccaccgcaccaggtctgatacgtattaataggccctgccttgatccaagttttcagtctagggtttttctcaaaatatgctctaaattaaaagctgtggtttattgcaggggattgggggaagaggtatgatggataagaatgggaatcaagtacttgccttactaagtcactgccattgtcagtatttttcatattctagtttttaagtttaatcctcctaaattttaagacctaatgggtgaccagctatacagcttgcattacccccacttgcaaaccagcaggcatgtgctatttggttgtattaactgttaaaataccactaatacttagggtccttcgctagaacctacaatggaaaaatggcaccaaaagcatatcgaatgaaagtaagataatgtatataagtgtctctgcagttggccatgtagttttgtccatggcttctctgacatgtgacagaataacccaaaaggttttgcagttaatagttgactgtagatacttggtcacataagcttctgaacattgtcccttgagctgccctggtagaaggtaaggggagtccaggtccttgcccctagttaataacaaatagtgcttatgatagaagagtgattgggggaggagggttggggaatgagaggagggtatagtttataaagttctaacaaactcttggccagaggcaagatacagagggcagaatgagtcagaagctatttaagtgtcttttctaacaagtaacccgtgatttttcatgttaccactgcagcatatttcacagatgcttaccattttcagtactgacttcacatgcccctgcaacttttttccaccttatggataaatataaaactatattatagtttgacagacctaattattttgtaggtgctttagaagtagaagaactaggattggtggttggtcagttaaaatggaaagtcacaaagtctagatactttgattgcttgtattagatgtatgcttattttccatacaatcttttaatgaaggactacaccatttctttgagatgtctgctgcctagattctattacatatgcatcatatatagttttcagttttgtcttaaagaaatctgaatagagaattcccttgaactttcacagataccttccctcagttttccagctttcttcatacccctaatttgaccacagtttttacagtaaaaattgtagaaatcaagtaatattgacaaccacctactagctaatagtcatcagtcaacttatattaccttggaagtggttaaatagagtttggttaagagccacaaatttacttcatattgtaatgtaatgatttttttaaaaacttccctcaacagaaaggaataatgtgctacaggaaaaggaaaacttacctgaggtagagagtttaagcaagaggtgaatctggtgtaatcaggcaaggagtcaagtattaactctgtatgtgtcaggtgctgggaatatagaggacagtttcttaacacagtctggggtgtaggtggagatacatggggtggctttgaggcctttcaggttttcatcactgatagatacctagcccttatttcatggatgcctcaaaccccattttccagtctaagctttcgcccctaatctatttgcctgtactgcataaccttctaaatatgattaaaatcttccagaagtttttagtcagccctgatctggccttctcaccatttcttcacatactagctaatatttaataagtagaattatgtgtaaatttgggtcttcctggtatatgagcaaaaaaagcaatagtttccttatctgagctgaaaaagacactaatgttcagtggagaacagaggaagagaattccaataagcagagcctgtggttccaggtgaataagtcttaagttcaaggatggtgtagagggacagagatgcattctggccctccagggttagatttgtcaagaggcgaaatagttaatttcagacagttctctggaactgatgtaatctggtttacttagggcagtggttttcagattggaagtacacactattaaacagaagcaattccactttaaaattttgcttggctaaaggattcagtggctattttttttttttttttaattaccaatgtgaataaggtttattggttccggggaggagacaccctctctagtatgagaagctgcaaagaaggttgtacttggagtaaaaaccacactcttcacagaagctgatcgtgatacccattgaggagactgattgggcctcagctttctataacctgggaatataaatgggtgttataaagtttcgtgttacatgactcagttatcagaattgtatctccagcttagaaccttacagggaaaaactggaaattacacataaatatcacccacttgccccctccaccccccaactttataaggtaggtaatattatttacacatgcagagaatgaggtgtggtaacctgcccaatgatacacagtaagcagaggaggcagggttttttggtccagacagtctaattcttaagtgtaagctctttactaagctgcactgttgtgaaagcactgtacttgaagttacaggcataccttgttttactgcactttgcagatattgcaagattttttcttcaaaataacgaaggtttgtggcaaccccatgttgagcaagttcattagtgctattttctaacagtgtgtgctcatttcctgtctgtgtcacatttgataactcttaaaattatttcaggcttaaattatcatgttatggtgatccgggatcttgaatgttactagtgtaatttggagcctcatgaaccacacccatacgatggtgaacataaatgcacgtgttctgattgctccacaaacaggctgttccctctctccgtctccttaggcctctgtattcccggagacacaacattgaaattaggccaattaatagccctacagtggcctctaagtgttcaagtaaaaggaagagtcgcacgtctcagtttaaatcaaaagctgaaaatgattaagcttaatgaggaaggcatggcaaaatctgagatgggccagaaagataggcttcttgggcccattagacaagttgtgaatgcaaaagataaatcttgaaggaaattaaaagtgctactccagtgactacacaatgataagaaaacaaaagaaccctatttctgatataaagttttagtggtctggataaaagattgaaacaggcccaacattctcttaagccaaaaccgtatccagagcaaagccgtaactccaattccgtgaagtcagagaggtgaagaagctgtggaagaaaagtttgaagctagcagaggctggttcatgagatttaaggaaaacacccatctccataacattaaagtgcaaagtgaagcagcaagagttgatgtacgaactgcagcaagttgtctggaagatctagctgagataattgatgaaggggctatgctaaatagcaagtatttaaggtagacaaaatagccttctattggaagcagatgccatctaggcctttcataggctagagagaagtcaatgcctggcttcaaagcttcaaaaaagactgacttgtgaggggtttatgcagctggtgactttaagctgaagccaatactcatttaccatttcgaaaatcctagggcccttaaaaattaagctaaatctactctgcctgtgctctagaaatagaacagcaaagcatggatgacagcacatctctatagcataacgcatctaatattttaaacccactgttgagacctattgctcagggacggaaaaaacctaaagctttcaaaatatgataagctcattgacaatgcacctagtcactcaagagttgtgatggagatgtacaagaagattgatgttttcatgcctgctaacatgacatccattctacaacctatggatcaaagagtaattttgactttcaagtcttatttaagaaatattaggccagacgcggtagatcacgcttgtaatcccagcactttgggaggccgaggcgggcagatcatgaggtcaggagttcgagaccagcctggccaacatggtgaaaccccgtctcttctaaaagtacaaaaaaaaaaaaaaatccaggcatggtggcacatgcttgtaatcctagctactcaggaggctgcggaaggagaattgcttgaacctgggaggtggaggttgcagtgagctgagattgtgccactgcactccagcctgggtgacagagtgagactctgtctcagaaaagaatatatatatattaatacgttttgtaaagctacaactttcgtaaatagtgagtcctctgatgaatctgggcaaagaaattgaaagccatatgaaaggatttaccattctagatgccattaataacatttgtggttcatgggaggatgtcagaatatcaacaacaaataggagtttggaagaagttttattccaaccctcatggagccctaggggattcaagacttcaatagaggaagtaaatgcagatgtggtggaaatagcaagagaggtagagttagaagtggagcctgaaggtgggactgaattgctgcaatctcatgatcaaacttgaacagatgaggagttgcttcttatggatgagcaaagaaagtggtttcttgtgatggaaccttatccttgtgaagatgctgtgtatgttgttgaaatgacaagaatttagaattttacacaaactcagttaataaagcagtgacaaggtttgaggcgactgactccaactttggaagaagttctactgtggctaaaatgatatcaaacagcatcacgtggtacagataactcattcatgaaaggaagagtcaattgatgtggcaaacttcattggcttatttgaagaaattgccacagccaccctggtcttcagcaaccaccaccttgattaggcagcagccaccaacatcaaggcaagattctccaccaacaaaaagatataacttggttgggcgcagtggctcacgcctgtaatcccagcactttgggaggctgaggcaggcggatcacctgaggtccggagttccagaccagcctgaccaacctggagaaaccccgtctctactaaaaataacaaaattagccaggcgtggtggtgcatgcctgtaatcccagctactcaggaggctgaggcaggagaatcgcttgaacccaggaggcagaggtttccgtgagctgagatcgcgccatttcactccagcctgggcaacaagagcgaaactctgtctcagaaaaaaaaaaaaaagatatgactcactagaagctcagatgatcattagcatttttttagcaatgaagtattttaaataaaactgcatttttttagacataatgctattgaacacttaatagcaaccatgtaaacataacttttatatgcactggacacccaaaaagtccacgtgacttattttactgtggtagtctataaccaaacccacaatttcttcaaggtatgccttgctaggtgagtaacctaagaaaaatcactcagttgggtgcagtggctctgagggaagagagagaccttctcatattgttttatattcagtgcctgttttaagaaaaaaagaaaaaacaacaaggaagtaaaaccaaagacaggcagcccagcgccaggcctgaaaccaggcctgggcctgcctggcctaaacccagtagttaaaaatcaactcctgacttagaaaccaatgttacccatagatttcaggcattgtataaaagaacatgtggaactccctgctctgttctgtttctctctgactaccagtgcatgaaacccctgtcacgtatcccctagattgctcaatcaatcacgaccctttcatgtgaaatctttagtgttgtgagcccttaaaagggacagaaattgtgcactcagggagctcggattttaaggcagtagcttgccaatgctcccagctgaataaagcccttccttctacaacttggtgtctgagaggttttgtctccggctggtcatgctacatttcttggttccctgaccgggaaacgaggcagacaaaacctgggtagttaaggggctacccgaggcagccccttaggtggcttaggcctgctgtgtggagcatccctgcaggggactccagccagcctgagtgaagccatccgaagagcgatcccaggtagagaattgccccggtggaacgcctcgccagagcagtgcgtagcaggcccccgcggaggattaacacagtggctgaacaccaggaaggaactggcacttggagtccagacatctgaaatttagtaagactagtctttagaacttgccccactccatctgagtggaagcgtggcctgatcacccagggtgtgcctgcattggcacttttgttctggttttgacttgacttgaattgctggacactttggttttagttttgacttggcttgaattttttggtacacggattttgaatttcgtgattttggtttggtataaacagtaaaagtgtgggtgtgccctctttacccgttctttgtcttgtggtgagtgtgtgtagtgtgagcgtggtattttgtctcaaaaaaaaaaaaaataggtcaggtgcaaagtaagcccaccccactgggaactatgttaaagaatttcaagaaaagattttagggagactatggagtcactatgactccaggaaaacttaggactttgtgtgacatagactggccagcattagaggtgggttggccatcagaaggaagcctagacaggtcctttgtttcaaaagtatgacacaagttaacctgtaagccaaggcacccagaccaatttccgtacatagacagttacagctggttttagacccccttcctccccacagtagttaagagaacagcagcataagcggctggcagaggcaaggaaagaccagcagagagaaaaagagaccatctataccaattctaagttaatttagactaaacaaggtcttattaatagcaaaagataattgaaatcccaaacttacaaggttttcaacaaagtgaagtttgctaaaagttaacagtgtaacatgtattatggtaacttctaatcttgtagccttagacagtctagtccaaagacataaagaaagtttgctttaaaaaaaaaaaaggaatagttatcttcaaaaaataaagagaaaaaaaaggggggaggcagaatttatgtaaagagtgttatatggtaaattcttgtcctgaaataaattaactgcttgtttaaagaaaaaaatctttgtaataagtcagaaagttgagacatgttgaaaaattgtgtgcgaaagtcgtgaaagaaaaaatgttataaaaaattatgcaaaaaatgttgtataatttaaaagtaataaggcctcctgagtactgtttaaaaaaacagtttatgtgcaaagtgtataagaaaagtaaaatgtacctttagtaaaaagattataaaggggcataaaaacgtggatttttacctacattaaaaggttaaaaaaatattgttttaaaagttttaaaacgttaattgtaaagaaaattctgtgtgtaaacatattagctaaagttaaaaaggtatcatccaatttttctgtgaactagacattaaagtaaaaatgcaacaggtttttcttaaagcatcaacctgctctttaacaaaaattataaaaagttaaaaagagtctataaaatcttaccttatggtcaaacataaaaaattagataaatatgtctacaaggttttattaaaattaagtttaacattaataacaccctaatataaaagtaaaatttaacttacgtggtataaaaatcatacaagaagcattattaaatataaaatagtgtttaactttctttggtctaaaaactaataaaaaatagatgctaaaagaaacattcattttactagaggatcatagaagttaaagacttaaaacaaactttggcaattaagacggcataccaagatgcaaatgcctggttgaaatagatcaaatattccatctgcacgttataaaaagcaattgttatgcttgtgcacatggcaggccagaggccccgattgtcccccttccactaaggtggtcctccagtccaccaggcgtgggctgcatggtagctcttttccaggattctacagcctagagtaataagtcatgccaagctctctctgctatatcccgaagtccctgcaggtcagcccccaaaggccatccagcttccgtctcccaacactaagttcacttcgtgtctctcacggcagggaggagacttattagcattccttagagacctgaagggatgcagtgagcttaagaattttcaaccagtcagcccttgttcctccccgagcaaatgtgtggtggtattctggtggacctttactgggcactctgccgcataactagagtggcacttgtgctttagtccacttggctatccctttcaccctggcatttcatcaaccagaggaaaaacaaaaaataagacatcgtaaagtgagagaagcccttataggtctttcaactctcacatctatttagatgcaattggagccccacaagaaatacagatcaatttaaa

SEQ ID NO: 629 - DNA, 10361 bp, Homo sapiens
ctcgctccccctcggaaagctgcgaaagtgctttggcggtttgtccatccgcagcttcggcttttccagtctggtggcccttccggccacccctttaaccccagctttccctcccccttctttcgatcagagatcggcggagaccctcgaagtgcgcaaacttgacactcaccctgaccggactggggttttaaggggtgtggcaggaggttttggactcgatgagtttccaccgaaatgtcggagaagtcaggccagagcacaaaagcaaaggatgggaaaaagtatgcaacactcagtttatttaatacttacaaggggaaatcattagaaacacagaaaaccacagttgcagctcgacatggattacagagtcttggaaaagtcggtatttcacggcgtatgcctccacctgctaacctcccaagtcttaaagcagaaaacaaaggcaatgatcctaatgtaaacattgtacctaaagatggcacagggtgggcatcaaaacaagagcaacatgaagaagaaaaaacaccagaagtgccaccagcacagccaaaacctggggttgcagctcccccagaagtagcacctgctcccaaatcatgggccagtaacaagcaaggtgggcaaggagatggaatccaagtgaatagtcagtttcagcaagaatttcccagcctgcaggcagctggggatcaggaaaaaaaagaaaaggaaacaaatgatgacaactatggacctggacccagtttacgtccaccaaatgttgcttgttggagagatggtggtaaggctgctggctcaccttcgtcatctgatcaagatgaaaagctccctggccaggatgaaagcacagctggaacatcagagcaaaatgatatcctcaaagtggtggaaaagaggatagcttgtggtcctccacaggctaaactgaatggacagcaggctgctctcgcttcccagtatagagctatgatgcctccttatatgttccaacagtatccgaggatgacatatcctcctctacatggtcccatgagattcccaccttctttatctgaaacaaacaaaggccttcgaggaagaggcccacctccttcatgggcctctgagcctgaacgcccatccattcttagtgcatcagaactgaaggagcttgataaatttgataacctagatgctgaagctgatgaaggttgggcaggtgctcagatggaagtagattatacagagcaactgaatttcagtgatgatgatgaacaaggaagtaacagtcctaaagagaataacagtgaggatcaaggttcaaaagcctctgaaaacaacgaaaacaaaaaagaaacagatgaagtttccaacactaaatcatcttcccaaatacctgcccaaccatcagtagcaaaagttccctatgggaaaggaccttcatttaatcaggaacgtggaacatcttcacatctgccaccacctccaaagttgcttgcacagcagcatccacctccagatcgacaggcagtacctggaagaccaggcccctttccctccaagcagcaagtagctgatgaagatgaaatatggaagcaaagacgaagacaacaatcagaaatttctgcagcagtagaacgtgctcgtaaacggcgtgaagaggaagagcgaagaatggaagaacaaaggaaggcagcttgtgcggagaaactgaaacgattggatgagaagcttggcatcctggaaaaacaaccatctccagaggaaattagggaaagggagcgagaaaaagaacgggagcgtgagaaagaacttgaaaaagaacaagaacaggagcgagagaaggagagggaaaaagacagagagagacagcaggaaaaggagaaagagctggagaaggagcaggaaaaacaaagagaaatggagaaagaaagaaagcaagaaaaagaaaaagaactagaacggcagaaagaaaaggaaaaagaactacaaaagatgaaagaacaagaaaaggaatgtgagctggagaaggaaagggaaaaattagaggagaaaattgaacccagagaacctaatttagagcccatggtagaaaaacaagaaagtgaaaacagctgtaataaagaggaggaacccgttttcactagacaagacagcaatcgcagtgaaaaggaagccacaccagtggtgcatgaaacagaaccagaatcagggtctcaacctcggccggctgtattatctggctatttcaaacagtttcagaagtctttacctccacgattccagcggcagcaggaacagatgaaacagcagcagtggcagcagcagcaacagcaaggtgtacttccacagactgttccttcacaaccgtccagtagtactgtccctcctccaccacacagacctctttatcagcctatgcagcctcatcctcagcatttggcttctatgggttttgatccaaggtggctcatgatgcagtcctacatggatcctcgaatgatgtcaggaagacctgctatggatattccacccattcatcctggaatgattcctcctaaaccattaatgagaagagaccagatggaagggtcaccgaacagttctgagtcatttgagcatatagctcgatctgcaagagatcacgcaatttccctttctgagcctcgtatgctgtgggggtcagatccctatcctcatgctgagcctcaacaagcaactactcccaaagcaacagaagagcctgaggatgtaaggtctgaagctgcgttggaccaggaacagattactgctgcttattctgtagaacataatcaattagaggctcacccaaaggcagactttatcagagaatcaagtgaggcacaagtacaaaagtttttaagcagatctgtggaagatgttagacctcaccatactgatgcaaataatcagtctgcttgttttgaagcacctgatcaaaagaccttatccgctcctcaagaggagcggatttcagctgtagaaagtcagccttcccggaaaagaagtgtttcccatggatctaaccatacgcaaaaaccagacgagcagagaagtgaaccatctgcaggcattcctaaagtaaccagcagatgcattgattcaaaagaaccaatagaaaggccagaggagaaaccaaaaaaggaaggctttatacgatcttctgaaggaccaaaacctgaaaaagtatataaatctaaatcagaaactcgttggggcccacgaccaagctctaacagaagggaagaagttaatgatagacctgtgagaagatcaggtcccattaaaaaacctgtacttagagatatgaaagaggaacgggaacagaggaaggagaaagaaggagaaaaggccgaaaaggtcactgaaaaagtagttgtaaagcctgaaaagacggaaaagaaggatcttcctcctcccccaccaccacctcagccaccagcaccaattcagccacagtcagttccaccaccaattcaaccagaagcagagaaatttccttcaacagaaactgcaactttggctcaaaaaccatctcaggatactgagaagcctctggaacctgtgagtactgttcaggtagagcctgcagttaagactgtaaaccaacagactatggcagcaccagtagtcaaagaagaaaaacaacctgagaaagtcatcagcaaagaccttgttatagagaggcctcgaccagattcaagaccagcagttaaaaaagaatcaactttgcctcccaggacctattggaaagaagctagagagagagattggtttccagatcaaggatacagaggtcgaggccgaggtgaatattactccagaggtcgaagctatagaggttcttatggagggcgtggcaggggtggtaggggacacactcgagattatcctcagtatagagacaataagccaagagcagagcatataccctcagggcctctcagacagcgagaagaaagtgaaacacggagtgagagctctgattttgaagttgtccccaaaagaagacgacagcggggttcagagactgacacagacagtgaaattcatgaaagtgcaagtgacaaggacagtttaagtaaaggcaaacttcccaaaagagaggaacggcctgaaaacaaaaaacctgtaaagcctcattcttctttcaagcctgataatcatgttcgaatagataatagactgctagaaaagccttatgtaagggatgacgataaagctaaaccaggctttcttcctaaaggagagcctacaaggagaggcagagggggaacattcaggcgtggtggaagggatcctggaggccgtccatcacgcccttccactttacgaagaccagcttatcgggacaatcagtggaacccaaggcagtcagaagttcctaaaccagaagatggagagccgccaagaagacatgagcagtttattcctatagcagcagataaacgacctccaaaatttgagcgaaaatttgacccagctagagaaaggcctcgaaggcagcgtcctactcgaccaccaaggcaagacaagccacctcgatttagacggctaagagagagggaggctgcttcaaaatcaaatgaggtggtagcagtgcccacaaatggcacagttaataatgtggctcaagaaccagttaatactcttggggatatttcggggaataagacaccagatttatctaatcagaactcttcagatcaggcaaatgaagaatgggaaacagcttctgaaagcagtgatttcaatgagaggcgagagagggatgaaaaaaaaaatgctgacttgaatgcacaaacagttgtaaaggttggagagaatgttctacctccaaagagggaaattgcaaagagaagtttttctagtcagagaccagtagatcgtcagaatcgacgtggcaacaatggtccacccaaatcaggaaggaatttctcaggtcctagaaatgaaaggagaagtggcccaccatcaaaaagtgggaagagagggccatttgatgaccagcctgcaggcacaactggggttgacctcatcaatggcagctctgcacaccatcaggaaggagtacctaatggtacaggacaaaagaactccaaagattgtactgggaaaaaaagagaagaccccaaaccaggccctaaaaaaccaaaagagaaagtggatgctctatcacagtttgatctcaacaattatgcaagtgttgttataattgatgatcatcctgaagtaacagtaattgaagatccccagtcaaatttgaatgatgatggttttactgaagtggtatccaaaaaacaacaaaaacgtttacaggatgaagaacgccgaaagaaggaagaacaagtcatacaggtctggaacaaaaagaatgcaaatgaaaaaggaagaagccagacttctaagcttcctccaagatttgccaaaaaacaggctacagggatccagcaagcacagtcttcagcctcagttccacctctagcttcggctccacttccaccttcaacctcagcttcagttccagcctcaacctcagctccacttccggcaaccttaactccagttccagcctcaacctcagctccggttccagcctcaactttagctccagttctggcctcaacctcagctccagttccagcctcacccttagctccagtttcagcctcagcctcagtctcagcttcagttccagcctctacttcagctgcagctataacctcttcttcagctccagcctcagccccagctccaacccccatccttgcctcagtttcaaccccagcttctgtcaccattcttgcctcagcctcaattcccattcttgcttcagccctagcatcaacttcagctccaacgccagccccagcagcctcttccccagctgccccagtcatcacagcaccaactatcccagcctcagccccaactgcctcagtcccacttgcccctgcctcagcttcagccccagccccagcccctaccccagtctcagccccaaatcctgccccacctgccccagcccagactcaggcacagacccacaaaccagtccagaatccactacagactacatctcagtcttcaaaacaaccaccaccatcaattaggctgccttcagctcaaacacctaatggcacagattatgtagcctcaggaaaatccatccagaccccacagtcacatggcactctgacagctgaattatgggataacaaggtggccccaccagctgtgctgaatgatatctctaagaaattaggtcccattagtccaccacagccaccttcagtcagtgcatggaataagcccttaacatcgtttggatcagctccttcatcagagggagcgaagaatggtcaagaaagtggactcgaaattggaactgacacaattcagtttggtgctccagcctcaaatggaaatgaaaatgaagttgttcctgtgctttcggaaaaatctgctgacaaaatacctgaacctaaagaacagcggcagaagcagccacgagcaggacctatcaaagcccagaagcttccagatttgagtccagtagaaaacaaagaacacaaacctggtcccattggaaaggaacgttcattaaaaaatagaaaagtaaaagatgcccaacaggtggagccagaaggacaagagaaaccaagcccagctacagtcagaagcacagatcctgtcacgacaaaggagactaaagcagtctcagaaatgtctactgaaataggaacaatgatctcggtatcatctgcagaatatggtactaatgcaaaggagtctgtaacagactatactacaccctcttcttctttgcctaacaccgtggctactaataatacaaagatggaggatactttggttaataatgtgcccctgcccaacacccttcccctccctaagagggagactatacaacagagctccagcctaacttcagttcctcccactactttcagcctcaccttcaagatggagtctgcacgcaaagcatgggagaattctccaaatgtaagggaaaaggggtctccagtaacttccacagcacctccaattgcaactggagtcagcagtagtgccagtggaccaagcactgctaattacaattcgttctcaagtgcatccatgccccagattcctgttgcttcagtcactcctacagcatcactatcaggagctggtacatacactacctcttctttgagcacaaaatctacaaccacatcggaccctccaaatatttgtaaagtgaaacctcagcagttacagacaagcagcctgccttctgcaagtcatttttcacagttaagctgtatgccttcccttattgcccagcagcaacagaatccgcaagtttatgtgtctcagtctgcagcagctcaaatcccagccttctatatggacacaagtcatttattcaatacccaacatgcacgattggctccgccatccttggctcaacaacagggtttccaaccaggtctctctcagccaacttcagttcagcagattccaatccctatttatgcaccactgcaagggcagcatcaagcccaactgagtttgggggctggccctgctgtttcccaggctcaggaattgttcagctcctcacttcaaccatatagatctcagccagcttttatgcaaagcagtttatcccagccatctgtggtcctttctggtactgctattcacaactttccaactgtccaacaccaagaacttgccaaggcacaatccggtcttgcctttcagcaaacatcaaatactcagcccattcctatattgtatgaacatcaactggggcaggcatcaggactaggaggttcccagctgattgacacacatcttctccaggccagagcaaatcttacccaggcctcaaatctttattctggacaagtacaacagcctggtcagacaaatttttataacactgcccagtcaccaagtgctctccagcaggttacagtacctttaccagcatcccagctttccttgcctaattttggatctacagggcaacctctaattgctttgcctcagactcttcagcccccattacagcataccactccccaagcacaggctcagagtctgagtcgtcctgcacaagtaagccagcctttcagaggattaattcctgctggaacacagcatagcatgattgcaaccacaggaaaaatgtctgaaatggaactaaaagcctttggaagtggcattgatataaaaccaggcacacctccaatcgctggtagaagcaccacaccaacatctagtcccttccgggctacttctacaagtccgaacagccagtccagcaaaatgaacagcattgtctaccagaagcagttccagtcagcccctgccactgtgagaatgacacaaccatttcctacacagtttgcaccccaggcaaagcagagagcagaggttcttcagtccacgcaacggttcttctctgaacagcaacagagcaaacagataggaggaggcaaagcccagaaagtggacagtgattcaagtaaacctcctgaaacactgaccgaccctcctggggtctgtcaggaaaaagtagaagaaaagccaccccctgcaccctccatagccaccaaacctgttagaactggaccaatcaaacctcaggcgatcaaaaccgaagaaacaaaatcttaaaggctatggtttattgcaggggattgggaggggggcgggaaaacatggagaattaagtcagataatgctggcagccaaaggggcaaaatggcctgtgacattatcctgttcagagcttggagatgtacaagggacataggagcaatttacactgacacacagctgctgtaccagtgaaaacgaggctttgcaagcttgtacctactatataacatgtgcttggttgatggccatgcatcttcagtcagaatttatatataaatgtatgcacccatttttttgagtgcatataatttagacctaaaaatccttatgattagatgaaacaccaaaaatataaggaaaataacacagcagaggaatagctcagcctgaacagtgtgatggtcccagctactacatcagatgcggtttttttgctcccttatgttcttcggatatggttatggcatttgtaggcttggaggtaaagaactgaagataactggtgctggatagaggagccttattttttattatggcagcttgctatttttataacatggtgattgagttgaacacaatcaaagtacagtagtaactgatgtccccttcttcctggatgaatgagcagataaatattgatgtcagcatccttgaaccatatcaaagtgagcagtgtttggctactgcttctatttgaaatggtgctgtgttttggttgtggtctgaagctttgaagcgctacttagcatctcctttcttccatggagctctcacgattcaaacatgacagatttggtaaaatgctggttaggttgagtcttccttgcccccactcagtcatctttgtatgaatcccatgatttgggggtttttttctttttttttttataccagtttttagctggtgtttatgaagaacagtgagtacctagaactgtgccactaattaaaggaaatcctaagaaggtgcatttctttacagagctgtgtcatgccatcctttgggccctctgctggaaaagtagaatcaagtctcaaataatgcctttttaattgtatcctctagtattatagatataggacagtactgtatcatacctctgtgaatgtaaaatatcttgtacctgctttatgatacgtagtagtgaccgtgctttatcagagctgtttttaatgatgttattctagaatgttttctttccagatgatgattcagaagctaattttaaaaaacggtgccaggtaccacaacagtaacagaactttgcaattttctggggttttgttttttacctttttccccccttttttttaaatggagtgtgctggatgtctctataattttattcagatgactgcagaacctggaaaagctgttgctgctattgatgcataacatactgctattggtctttttatataaatatatatatatatatacatatatatatataatttgaatttttggaaactttagctgtgctgtcaactttggaaaaagtatcccggtttactgtgttgagttggcattgtacagaaattaacagccatattggtctagaaacgttaaacttaatttttttccatttgtacaggggtaacgcactgtattaaatatgtaaggtcttatctacatgggtttgattacagaaactaataaagtattctctaaataatga

SEQ ID NO: 630 - protein, 2801 aa, Homo sapiens
MSEKSGQSTKAKDGKKYATLSLFNTYKGKSLETQKTTVAARHGLQSLGKVGISRRMPPPANLPSLKAENKGNDPNVNIVPKDGTGWASKQEQHEEEKTPEVPPAQPKPGVAAPPEVAPAPKSWNKQGGQGDGIQVNSQFQQEFPSLQAAGDQEKKEKETNDDNYGPGPSLRPPNVACWRDGGKAAGSPSSSDQDEKLPGQDESTAGTSEQNDILKVVEKRIACGPPQAKLNGQQAASQYRAMMPPYMFQQYPRMTYPPLHGPMRFPPSLSETNKGLRGRGPPPSWASEPERPSILSASELKELDKFDNLDAEADEGWAGAQMEVDYTEQLNFSDDDEQGSNSPKENNSEDQGSKASENNENKKETDEVSNTKSSSQIPAQPSVAKVPYGKGPSFNQERGTSSHLPPPPKLLAQQHPPPDRQAVPGRPGPFPSKQQVADEDEIWKQRRRQQSEISAAVERARKRREEEERRMEEQRKAACAEKLKRLDEKLGIKQPSPEEIREREREKEREREKELEKEQEQEREKEREKDRERQQEKEKELEKEQEKQREMEKERKQEKEKELERQKEKEKELQKMKEQEKECELEKEREKLEEKIEPREPNLEPMVEKQESENSCNKEEEPVFTRQDSNRSEKEATPVVHETEPESGSQPRPAVLSGYFKQFQKSLPPRFQRQQEQMKQQQWQQQQQQGVLPQTVPSQPSSSTVPPPPHRPLYQPMQPHPQHLASMGFDPRWLMMQSYMDPRMMSGRPAMDIPPIHPGMIPPKPLMRRDQMEGSPNSSESFEHIARSARDHAISLSEPRMLWGSDPYPHAEPQQATTPKATEEPEDVRSEAALDQEQITAAYSVEHNQLEAHPKADFIRESSEAQVQKFLSRSVEDVRPHHTDANNQSACFEAPDQKTLSAPQEERISAVESQPSRKRSVSHGSNHTQKPDEQRSEPSAGIPKVTSRCIDSKEPIERPEEKPKKEGFIRSSEGPKPEKVYKSKSETRWGPRPSSNRREEVNDRPVRRSGPIKKPVLRDMKEEREQRKEKEGEKAEKVTEKVVVKPEKTEKKDLPPPPPPPQPPAPIQPQSVPPPIQPEAEKFPSTETATLAQKPSQDTEKPLEPVSTVQVEPAVKTVNQQTMAAPVVKEEKQPEKVISKDLVIERPRPDSRPAVKKESTLPPRTYWKEARERDWFPDQGYRGRGRGEYYSRGRSYRGSYGGRGRGGRGHTRDYPQYRDNKPRAEHIPSGPLRQREESETRSESSDFEVVPKRRRQRGSETDTDSEIHESASDKDSLSKGKLPKREERPENKKPVKPHSSFKPDNHVRIDNRLLEKPYVRDDDKAKPGFLPKGEPTRRGRGGTFRRGGRDPGGRPSRPSTLRRPAYRDNQWNPRQSEVPKPEDGEPPRRHEQFIPIAADKRPPKFERKFDPARERPRRQRPWPRQDKPPRFRRLREREAASKSNEVVAVPTNGTVNNVAQEPVNTLGDISGNKTPDLSNQNSSDQANEEWETASESSDFNERRERDEKKNADLNAQTVVKVGENVLPPKREIAKRSFSSQRPVDRQNRRGNNGPPKSGRNFSGPRNERRSGPPSKSGKRGPFDDQPAGTTGVDLINGSSAHHQEGVPNGTGQKNSKDCTGKKREDPKPGPKKPKEKVDALSQFDLNNYASVVIIDDHPEVTVIEDPQSNLNDDGFTEVVSKKQQKRLQDEERRKKEEQVIQVWNKKNANEKGRSQTSKLPPRFAKKQATGIQQAQSSASVPPLASAPLPPSTSASVPASTSAPLPATLTPVPASTSAPVPASTLAPVLASTSAPVPDLAPVSASASVSASVPASTSAAAITSSSAPASAPAPTPILASVSTPASVTILASASIPILASASTSAPTPAPAASSPAAPVITAPTIPASAPTASVPLAPASASAPAPAPTPVSAPNPAPPAPAQTQAQTHKPVQNPLQTTSQSSKQPPPSIRLPSAQTPNGTDYVASGKSIQTPQSHGTLTAELWDNKVAPPAVLNDISKKLGPISPPQPPSVSAWNKPLTSFGSAPSSEGAKNGQESGLEIGTDTIQFGAPNGNENEVVPVLSEKSADKIPEPKEQRQKQPRAGPIKAQKLPDLSPVENKEHKPGPIGKERSLKNRKVKDAQQVEPEGQEKPSPATVRSTDPVTTKETKAVSEMSTEIGTMISVSSAEYGTNAKESVTDYTTPSSSLPNTVATNNTKMEDTLVNNVPLPNTLPLPKRETIQQSSSLTSVPPTTFSLTFKMESARKAWENSPNVREKGSPVTSTAPPIATGVSSSASGPSTANYNSFSSASMPQIPVASVTPTASLSGAGTYTTSSLSTKSTTTSDPPNICKVKPQQLQTSSLPSASHFSQLSCMPSLIAQQQQNPQVYVSQSAAAQIPAFYMDTSHLFNTQHARLAPPSLAQQQGFQPGLSQPTSVQQIPIPIYAPLQGQHQAQLSLGAGPAVSQAQELFSSSLQPYRSQPAFMQSSLSQPSVVLSGTAIHNFPTVQHQELAKAQSGLAFQQTSNTQPIPILYEHQLGQASGLGGSQLIDTHLLQARANLTQNKGQVQQPGQTNFYNTAQSPSALQQVTVPLPASQLSLPNFGSTGQPLIALPQTLQPPLQHTTPQAQAQSLSRPAQVSQPFRGLIPAGTQHSMIATTGKMSEMELKAFGSGIDIKPGTPPIAGRSTTPTSSPFRATSTSPNSQSSKMNSIVYQKQFQSAPATVRMTQPFPTQFAPQAKQRAEVLQSTQRFFSEQQQSKQIGGGKAQKVDSDSSKPPETLTDPPGVCQEKVEEKPPPAPSIATKPVRTGPIKPQAIKTEETKS
